United States Patent Application Publication US 2018/0305689 A1 - sequence listing, part 3

SEQ ID NO: 1362 - DNA, 4001 bp, Homo sapiens
gaataaagtattacaaatcaacaggaaaacaagcatatcaatgaaaactggataaaaagatttaacaggcacgtcacaaaagaggacatataaatggcaataaaagatactcaatctcaatgaaaccacactgatatattactgcacccctactagaatggcaaaataatttttaactgacaggtatcagcgaagatgtggggtaaccagcatatccctgctaaatggtacaactactttgggaaaatgttcaacaatatgtaatactaaagttttatcattcatatacctctaaaaccaacaatgccacccctacaaatataccccagactagtaatgttcaatttcttgatctgtggtggttcacttggtaaaaattcattacttttttttttttttttttgagacagggtctcactctgccatccaggtcggagtgcactgccatgatcacggctcactgcaatctcaacctcccgggctctggtgatcctcccaactcagcctaccgggtagctgggactacaggcacacgccaccacacacagctaacttctgtatttttagtagagaaagggttttgccacattgcccaggctggtctggaaatcctgggctcaagtgatctacccaccttggcgtcccaaagtgctgggattacaggtgtgatcactgcgcccgggccacctgcacatgtaaaattgtgaacttctgtatacttcagtaacttttccaagatttctttgacgcaaagttctcagaaatcttaaagctagcatttcagaatagaaaaagtagcttctggttcactagtgaaattttaccaatagaatttaaaaacaaaaagctactaacgcatatcagctcagaacactaccagcagatcttttctttaacttcctgaagcactgggattcattcttttggcaaagaaaggatgaacaacactgtaacccaaagaaaagataccactgccagaaaagacttcttttcgaaagcagctctaagcaaaagataggaggaaaacaaggaagccaggccaaacgtcttggttaactctccgctgaaaggacgccacatgagatgatctaagaagccagccagccagccagacgcagggaaatcacagcaactctttggagtgcaaacagcaaccccacaatccaatctacccgaaatcctgcggttcatttgaggcttgccccgctagtcaggaggtgattcagtgatggctacaaatgctgctcatgtgcatcctggagctggcacacctggcttgcccatcaccagcctggagacaccgccaggagcagaagcccggaggccagtaaagaccccaactttgcaagtcaggggcgcgagcgcgctcgcctctcaggtccgcagagggaacggatttctggcctggagggtggggtgcggggtcagtgtcctctacaggatataggaggacgtgcccccgaagctgctccgtccctccaccccctgggatgccacagaacacccgccagcgagtttcttccccagcgcccacgagagttgggctgcgggcggcagcggcaggcgaagaatccagcgcggggaactcaggccccggcggtgcacgaccccccacagcccccacccgcccccgcgctcgcgcaacaaaacttgccacggccgcgcctcgacccagctgtgcgcccgcgggtcccggattcaccgcccgcccagcctggcgcggcgccctcacctcagaaacgctgggtggacttcgcgtaacttcccattcacagggcagccggcagccgcgccgccgcgcctcggcccagctcctggcgccgcagatcgcccgtcccgcgttcccaaaagcaccgcgctcgctcagaagctcgggcagcctcgcgaccctcacctacgcctcccagtaccgccgctgtctcaaccgccacccagcccctcgcctgcgcctgcgcctgcagcccactggctcctcaggatcccgatgggcgtgtcaggataacccaaggcgcaggcgcggcggggccttaaagggacccggcggcctcttctgcacaacgggttcgagcaggttaggggccgcgcaggcggaggaaaggagtaacccaggggaaggaccgagtgcagcggggacggggaaatccctctctcccctccgcctgtctttcaaagcaccagccctcgaccctccaaatcgctggtttccccggccacttgaacagcccctgccaggttgaagaggcaggagacacaccccctctggggctggagcgaccccgcgcttaggactgcaggcctcgcgctgccgcaccgccccgaatctgacttccaggcacgggcacgcggtgcagtcgggcaggcttcagaagagcccccagctctcccagaggtggccttaggtcactctcaaaaagaataaccaatgtgtcaatggcacttgtagttattttctaatttaaatttattaacagattttgcagatgggcttccactgaaataagcctttgagaaaaagaaaaactttttttttcaacaggattagaataccaagaaataggaagtaaagccatgccgtccacccagctaaaaactttgaaaacttgatattttatctaaggcaaatgtttgcataactttaggtcatgccattatttaaagtcaatttcagttaacaatttcattgcaactgaatctatcttgtataagaaaactaagatacatccctgataatctacctctcccctcctatactccatccgtcagcaaatcctactggtttttaccttccaaattttccttgaatctgtcctcttctatctcctccgtcaccaccctagtctaggctgccttcacctggggagtgagggtcgagggactactgacctagtcttcttgtggtttacccatatcccctttatcgcctctctaatctcaacacaacaggcagagtggcttttccaaaatataatgtgaccgtgtcacttcccagcctaaagcacttaaacaccttcccattctcttagacaaaacctcctaactaaccaagccccgaatggccaggcgccttgcccacttcttcatctcttctcactactcagaccaattctgttctgctctctctgctccagccaaactggcctcttttattccctatttaccagcttcctggcctccacagagcttttgctcatgctttgctctgtgcctggaaagttcttctaacccctattcttctgagaacagctgtagtctccacctctgaaaagcaccttctgacctccctatggtggtcccttactcctatcacattgcatgaaactgtaatcgggtggttattttggtgaattttttactatcggctacgtaagcccagggtttggttttgtttgcttcatgatttgtatttccacatttgttaaatacatatttgttcataaatgagaatgatggatgctagaagttgaagtaaatttggcataaagtcagagaaagagaaaatgtcacaatctgacagttggagtcagaatgtagaaacttcagttatattaaaactgattttatatcgttttaggctgagttgtcttaggatgctttgggtaacctttaaaactgagttctcaaagagccttgtataaacacctgaattaataatgataagccatggggtggcccacataaaactaataacattggttgctttaagagaggaagactgagccaggcacagtggctcatacctgtaatccaagcactttgggaggccaaggcccgcagatcatttgagctcaggagtttgagactaacctgggcaacttggtgagaccctgtctctacataaaatacaagcaaaattagccaggcgtggtggcgggcacctgtactcccagctatttgggaggctgaggtgggaggattgcttgagctcaggaggttgaggctgcagtgagccatgatcatgccactgcattccagcctggatgacagagcaagatcttgtctca

SEQ ID NO: 1363 - DNA, 4001 bp, Homo sapiens
ggtcactgcctacagggcaggagccaggtccatcccaaggacaaaactctccccagtaccagggtctagacagggatttccacatctttactcttcagtctcctgactttctggcatctgatcctccaaaatttaaagacgaaaaaagagaaactcaagggcacatcaaggaagttgacaagatgattcaaccacaacgaagtggagtcagaactcacagcccctgaggtctgactctgaatgcggggccactttcccaagccttgcagcctctcctctaaaacactgcactggggcatgaagtagtgatttcttgtacagtcgggaaggcccctaggactatgggactgatggcttcccttttactgggtatttcaaggacaaatatgtcaaggactttaaaaatatttcacttttaaatcaatattcagatatggttttaagaatcatatctgaagcataaagtgtgagacataagacaataaggccatgaaggaaatatgcccaaatactttattagtatgagaggcagcattaagatttagattagttgtgttaatttagaaacagcataagattagtttgtgttaatttagaaacatcagaatgaagaactaatagatagtgtttacactgtgccaattaatgttcaaggagattgacaggaaatacctcaggtaattcattgcagcaatttacagaggtaggtattattgtagtaccctctgaacagatgaggaaactgagggacagacaagacaagcaacttggatggagcccaggagacaggctgagggtccctgctttgcacactgcactgctgcttccacacattctccggtgtgatctttcctctttaggaacaagagcctgtgcaccaggaagcaggacttcactctcaccaaggtactctctgctttttatttttatttttgatttatttatcgttttgtttgtttgttttttgacgagtcttgccccgtcacccatgctggagtgcaatagtgcaatcttggctcactgcaacatctgcctgctgggttcaaaggattcttctgcctcagcctcccgattagtggtgattacagttgcccgccacgatgcccatctactttttgtatttttagtggagatggggtttctccacgttgcccaggctagtctcaaactgctgacctcgtgctctgcccgcctcagcctcccaaagtgctgagattataggagtgagccacgttgcacggcccctactccctgctcttgatgctgtcacttatagatagcacaggttctattaggagcagactccccttgaagcccctcagagcaggtactggctactatcaccaagttcccctcagagtcactagaacagagctttgcctgttgggcctcaacagaaacttgaactgaataaaagttcactagtcctagacatttagaacaacagactagatgttatttgtctgcaggatcttatatggtacagagaggattcttaaaaacatgattgagccccttggagaaaacaggtcattctgtgcctgtgttagaaatcaataactgtgagtttaactctagttccacccccatctgattgcaaacatggaaagttgctaaatactttggcacctctgtcttccaactttaacaaaatgttaaaatacccatttctgttttcctagaagtacaggaaggatgaaattatttttgatggagagagcatttagtgtctcagagagaagacaggatatcattcatcactttcatgatggtgagcctatagatcttactgtatttcttctgtcggttggccaggaagccggccagttgagttagaaaacatttctctttgaggcttctgaactgctgtttcttctctgccagctgggggcgcaatgtctcgttgatttctagaatgttcatctctgccttctcactggaccaagggccggctgataccaccatgctgacgtttgtggcagaagaggtggagtcagggactggggagaagaaacccaaacatatgatgggttaaaaactggtgaaatcaaatcggtttaatgaggactgagggatgtcagtaactgaaattcttaacttactgttgtgaaaaatgtgatcactccccacagcactttaggatccttcaccacaaaaacaaggttcgaggtgcctcaactcagagctgaaagcactgccagtagctcagactctgataagagtgaggcagaatgtggccagcgtgccaggtaaccgtctgcagttgcaataacagaattagaaggtgggggtgtcatggaatcttaggagctctgcattccaattgcccaggctttgctgaaacacaggcaccctactctcacctgagggtcaccaccaatggggatcattccttcagcattcactctcagtattcgtgtacccttgtgacaatgccacagacccgtgtctttcccaatacatctaagcatattcctcactgtttatctcttgtctgtacaacatcatcaaggcagaaacagtttcccaacaggttatattttcttaatggtagtcatgaagtcaccccacctgctctcagttaaaacagagcttaaggcttttccacaggtgtaagatatcaaacttttagcctgccctgatatcctccgggtcttctgcagttttttctgtatccactagaaagtgaatgaataattcatttttttaaaatattttctttcctgtctcagtattcttgctgctgcatcccattgttagattgatttcttctttcttactggggcaccttcttgggttttcattacattctagaccagtttgacatccctacgtccaaagctcttcctctatgtgggttgatttgttttttaatgtcactgagcactacattttatacttgtcacttatagatgtcattctagtgccccaagacctcttttcaaggtatcaagtgatcaaagtcatttatatagaggtctcctgaaaacatgtgtgaccatctatcttgggaagttttgtaaacctgatgctattttgttgtttccattttgttttcccatatactgaaaagaacagggccacgagcagttcttatggaatatggtttgatatatattttgttgagatgacctaacaccattgattttgggttgcattccactaacagaacatggcaagatcaaggttatggtcagggttggttggcgatcctcagtgttgctgtgcagtagaaggtgagtttgaggtgagaggaacaagtaggaaagagtgatcccctgaaccacctcttcgctttctcagctttcatccccacctaggttttgtgagcctggaacttgagagactgttctgtagcccaggtctcctaagattggctgctggacttgcctgagttgagggtgcagtgggttgaccctgggctgcccagcattcatgtggaagtgaaggaaggaggactggttaatcccatttgaaagcatccctctctgcagcccgcaccatcttccagtgacactgtaaggatactgctttgagatgtatcaaaggctttaagtcaatgtattttctagggtctgggagacctgacattctgtgtcagaatgaaaatctgtcaagtttctaaatgaaaaaactgcaggttcacaaagtgtcatgggttacttgaggtcacaaagggatgagttttcagcactgccaataaaagcaatcacaataattattcagtaattattcataggatccatacaatccagtaaatattcacatatttagtaattattcattgaccaattcgtacaaggcattttgctcaaaactgtgtttatatttggacattgtatcttcatcataatccttaaggtaatgctattatctataagtaacagataagaaacctgaagatgagggacagctaatcacgtatttggccatatttccattttttggtttttgtgatgctggaagaatgaccagaatgggtcacgggaagagtattcatt

SEQ ID NO: 1364 - DNA, 4001 bp, Homo sapiens
atccaggccagagtgcactggcacgatcactgctcactgcaatctcaacctcccaggctctgttgaccacacacagctaatttttgtatttttagtagagatggcattttgccacgttgcccaggctggtctggaactcctgggctcaagtgatccgcccaccttggcctcccgaaatgctggaattacaggtgtgatctaccacgcccagatcacctgcacgtttaaaattgtgaacttcttctgtatacttcagtaacttttcgaagatttctttgacacaaagttctcagaaatcttaaagctagcattttagaatagaaaaaaaaaagagcttttggttcactggtgaaattttactaattaaatttaaaaacaaaaagaaagctattaatgcataacagctcagaacaaagattaaaaaccaccagcacatcagttttccttaacttcgtgaagcactggtattcattctttcggcaaagaaaggatgaacaacactgtaactcaaagaaaagataccactgcaagaaaaggcttttttttttttttttagagggagtctcgctctgtcacccaggctggagtgcagtgacaagatatctccgctcactgcaacctccgcctcccaggttcaagcgagtctcctgcctcagcctcccgagtagctgggactacaggcacctgccaccatgcccggctaattttttgtattttcagtagagacggggtttcactgtgttagccaggatggtctcaatctcctgacctcatgatccgcccgcgtcggcctcttaaagtgcttcttttcgaaagcagctccaccagcaaaaggtaggaggaaagcgaggaaaccattcctcgcttggttaactcttgggtgaaaggacgccaaatgagatgatctaagaagcctcaaagaaagacagacaggcacagaaaaatcacagcaactctttggactgcaaacaccaacaccacagtccaacctaccagaaatcctgtggttaattggaggcttgccccgctagtcatgagatgattcagtgatcgctacaaacgctcctcacatgcatcctggacctggcacacctggcttgcccatcaccagcctggagacaccgccaggagcagaatcccggaggccaataaagaccccaactttgcaagtcaggggcgcgagcgctcttgcccctcaagttcccagaaagaacggcctcgagggtggggtgcgaagtcagtgtgctccacaggacttccgaagacgtgcccccgaagctgctccgtccctccaccccctgggatgccacagaacacctgccagggagtttcttccccagcgcccacgagaggagggctgcgggctgcagcggcaggcgaggaatcaagcgcagggaacttaggccccggcggagccctgcggagcccggcagtgcccggcgcaaccgccccgctcgcctaacaaaacttgcggcggcccagcccgccgcgcctcagcccagctgtgagcccgcaggtcccagactcacctcccgcccggcctggcgcggcgccctcacctccggaacgctgggtggacttcgcagtaaacttgaacttcccatccaggctgcagccgtgccgccgtacctcggccccgctcctggcgccgcaggtcgcccgtcccgcgttcccaaaatcaccaggctcactcagaagctcaggcagcctcgcgaccctcacctacccctcccagcaccgccgctatctccaccgccgcccagcaacttgcttgcggcccgctggctcctcagggtccggatgggccgtgtcaggagagcccaaggcacaggcgcagctgggccttaaagggacccggctgcctctaccgcacagcgggttcgggccgcgggccgagaaaaggagtaatggaggacagagcgcagcggggacgggaaaatccctctctcccctccgcctctctttcaaagcaccagcccttgaccctgcaattcgctgatttccccggccacttgaaccgcccctgccaggttaaagaggcgggagacacaccccctcggaagcccggagctaccccgcgtttaggactgcaggcttcgcgctgccgcaccgccccatagtctgacttccgggctcggcccgcggcgcagacgcacaggagtcggaaggcagcccccagctcccgcgagaggtggccttaggtcactcgcaaaaacaataaccaacgtgtcaatggcacttgtatttattttctaatttaaatttataacagatttcgcagatgggcttccactgaaataagcctttgagaaaaagaaaaactttttttttaacaagattaggaaataccaagaaatatgaagtaaagccatgccatctacccagctaaaaactttgaaaacttgaaattttatctaaggcaaatgtttgcataattttaagtcgtgccattatttaaagtcaatttcaattaacaattgcattgcaactaaatacatcttctataagaaaactaagatacatccctgataatctacctttcccctcctatattccgtccatcagcaaatcctactggtttttaccttccaaattttccttgaatctgtcctcttctacctcctccatcaccaccctagtctaggctaccttcacctggggagtgggggtggagggactactgacctagtctccttgtggtttacccatatcccctttatcgcctctctaatctcaacacaacaggcagagtggctttttcaaaatgtaatgtgaccctgtcacttcccagcccaaaccacttaaacaccttcccgttctcttagacaaaacctcctaactaaccaagccctgaatggccaggcgctttgcccacctctccatgtcttcttacaggtcagaccaattccatcctgctctctctgcttcagccaaactggcctcttttattccctatttactcagcttcctggactccacagagcttttgctcatgctttgctctgtgcctgaagattcttccaaccctcatccttctgacgacagctgtagtctccacctctgagaggcaacttctgacctccctacggtggtcccttactcccatcacattgcataaaactgtaatcaagtggttatgttggggaatctaccatcagctccgtaagtccaggatttggttttgtttggctcatggttgtatttccacatttgtgaaatacatatttgttcctaaatgagaacgatagatgctagaagttgaagtaaatttggcataaagtcagagaaaggtaaaatgtcacaatctgatatttggaggcagaatctaaaaacttcagttatattaaaactgattttatatcgttttaggctggattgttgcagggactctttgggtaatctttaaaactgagttctcagagagccttgtataaacacctgaattaataatgatagccctgggatggtccacataaaacgaataacattggttgcttcaagagaggaagagcgagccaggcacagtggctcatgcctgtaatccaagcactttgggaggccaaggctgacagatcatttgagctcaggagtttgagactagcctgggcaacttggtgagaccctgtctctacacaaaatacaagcaaaattagctggtagtcccaaacacctgtagtcccagctgtgtgggaggctgaggtgggaggattgcttgagcccagaaggttgagaggctgcagtgagccatgatcatgccactgcacttcagcctggatgacagagcaagatcctgtcaaaaaaaaaaaaaaaagagagagagagaaagaaagactcttgactggtggctactggtgggaaagaggtttttactacatccccaattggacctttttattttaaagtatgtgaagataaataaatgacacaaaagagtgcataccatcccatttatttgaaattccagaaaaggcaaaattaatctgtggtgaaaaaatcataac

SEQ ID NO: 1365 - DNA, 4001 bp, Homo sapiens
taaatttccactatggtgactccaacaggtctctgtcctcagaactagagcttttctaattattacataagttgacttcttagtagatttcccatccattacatcccagacacctcacaatgattagtaaccaccacatgtccctgcctctcaaggaaatccctcccgccttgtctctagacagccaagtcccacggcctgtcctctactcttccagaaccctgttgttctgacagcagggagggcaaatccatgcagcatctcccgccatgacctccagcctgtagaggagaggcgccacaggacctttacatgcacgccgctgttcccctcacccatgcatttcttaatgccttggtgaggagaatgcctctgggtcttccttggtgggagctaaaggaacaaaggtaaataatgctatgggacccactgagaattggggctgtggaagagtggccactgaagtaatagacagatgcagctattgtcagatactcagtgccagagcagggagggagagggaagaaatacggacctcaccttcctctcacttccaggctccatcgggtgcccacattgctaaacctaactagaagtgtgcacacaggggagccagggatgcattctagaagggacaagccccaagtggcgtaagacaggatggaaatgagtggaaagtggatctgtgggaaggaggaggggatgttatggggaaacaaaaggagaatactagctaataacgctaggtgacactaatatccccaagtctgtgctcatattcagaaaagaaagctcagcataaagcactcaaccaggagtcaagatattgttattttcaactgttgttccaacagttgtattataaagggccagtttatttcatgcctttctaatttgacataaagtgctacatggcattggggctggtacagcctcactcaattatgtgttgaagagtacacagagactgccaggctgagggacgatgcaagagaatagaagagatgctcacagacaaccacagaccacacggccctagagtcaggggcagcaccagccactgtcggctgctcatttgtccagacagagcccacaagcctcaaccatgctttgcttctgcaagatgcttcttcaccttttcaataaacctgcctgaattaaagctgatgggagtttatttctccttcatcataaaagaaattcttcaccacaacaatctccaatgaattgtgggcacagaaggcagacccatccctgcttctcttccactatctcccctgtaggctgaaaaggaggaggtactgaattacctccaaatgttcctctggctctgatattctgtgactctggtttctttttggctactttgtttttggaagcatgtatcctaaggcatcctgttgaaaaacctttgtctactgtgtccagacattcctggtggtatttcagataagacactcttgggttgctgcactcacaagcactgaaacaattctatgaccatctgtttcatggccacctgtttgctcattttctatgtacataaagggaggggacagacagcaaatttgcatattataaattgtatcatcttaaaaaggaaacaaggcaatattttgcaataaaaccttaagatgcattaaatttaagcctaatgcaataaagaatgcccataaaattattatctaaagaatgtttagaaaattgttgaacaagggacatcatcatttaaagtgatatgaagaaaactcagctaagcatatgggctagattagagagaaaaataaaggacacatctctgccctggaaaaactactggtagcatctttcagaaagctctctgtgtttgagtacgcaccttgatccataggctcacatttgatcccaactggcagctgcttcttggcattaactttggattcccaaccagtaaatcttagcaagatctgagtttctccaggtatgatattattttgtttgaccatccttatcttcaagggctaccaagaagaaacaaataatttatttacctccccagaggaaaaggttttaccaatgagacactttcttaccatgaccctgttcacttgagtgccctgtgtggcctgagagaagctcatactggtcacaggattctttacatgattaaactccttcctgaatcccaacttcatggtggtggtgatgacaggtatcccatgctcatgtccctgaagtcatcagcctgtctccagttagaaaaaattacatgtatatagagaggcctctttggaagtagcgaaagctttctcaccttcatacattaatggttggaatgtacaatagtataaacactttgggaaaaaacgtctggcatattcttacagaactaaacaactacctattctatgactcagtaattcctaagcatttatccaagagaaattaaaacatatgtgcagaaaatgatatatacaagaatgtccatagcagttttattcgtaataggaaaaactggaaacattcaaatatctatcaatacaagaatggatacattcttgtattcaaatatctatcaatatacattcaaatatctatcaatacaagaatgtgatacattcattccatggaatggctaaaggaacaaacttttgacacacaaaacaacatggatgaatctcaaaaacattttgagtgcaataggagccatacgcaaaacagtgtgagaaaaatgataaataataatggtttcaagaaatgcagagcagagagcccagaggcaaagacccacaggacagagggtcagtcccaggctgtggatccttactaagaaactcctgcgggattttgcccagctccatttccaaactattttgggttagtgacttctttatcccctccatgttccctcattttgaactagaatcactgtagttgttattctatgcctgtcccatcatttcacattagggacagataagctgtttgttcagtttcacaggtcgacagaggtaagggaattatgtcaaggatctgcacttaatggacactctcggaagcctcattcacacctggtgtggatgttttagatgggattttaagcttttgatctgatgtggtctacatgacatttttcatgttgaactaatgctttaatgacatgaaatctggaaacctcaggggagagggtaaatgcactttgcagatgggggaatgtgagtgtcctactgtggtagatggaatttctgaaatggtccccaaacatgccacacccttgtctctaaagcctcttaaggtgatgagacaccattcctgtgactacattgttatatgccagttatatgactttaagatggtgaggttaccgcatgaactggatctaatcacatcactccatacatgacagagctttgtgtggctggttggagaagatgaagtcagagaaggtgggagcttgagaaggactccataagttgttattggttgaaagatgaaacagacaggtaaggaggaaagcacgtggcctctggagtcagagtagactgtctccccgctgacagccagcacagaaaaagggccctcagtcccccacaaacaagaataggaactctttcattatctgtagtgaacctggaaaaatagcttgagctctaggaaaaaaacacagccagcccattcccggattttagtctcacatgactctgatcagagaacccggccgcttcattccagacttctgtggtttcaaaccactggtttgtggtaatgtgataataggcagcgagagaaaactagtacaggtgcctgtctctcctcttgaatttcaatttcagataaatgtatgctaaccctctaagagaaaaaaatcaatcaatcgaccaatcaatgaaagaactacagtaaaaatattgccctcacctttatgtggctgttccagagcccttgccacctgaagaagacaatgaggggtatttcaggcacttgaggagtgtggctttactgttatcaatcacatttctgaa

SEQ ID NO: 1366 - DNA, 4001 bp, Homo sapiens
tgcactctgccatccaggccagagtgcactggcacgatcactgctcactgcaatctcaacctcccgggctctgttgaccacacacagctaatttttgtatttttagtagagatggcattttgccacgttgcccaggctggtctggaactcctgggctcaagtgatccgcccaccttggcctcccgaaatgctggaattacaggtgtgatctaccacgcccagatcacctgcacgtttaaaattgtgaacttcttctgtatacttcagtaacttttcgaagatttctttgacacaaagttctcagaaatcttaaagctagcattttagaatagaaaaaaaaagagcttttggttcactggtgaaattttactaattaaattcaaaaacaaaaagaaagctattaatgcataacagctcagaacaaagattaaaaaccaccagcacatcagttttccttaacttcgtgaagcagtgggattcattctttcggcaaagaaaggatgaacaacactgtaactcaaagaaaagataccactgcaagaaaaggcttttttttttttttagagggagtctcgctctgtcacccaggctggagtgcagtgacaagatatctccgctcactgcaacctccgcctcccaggttcaagcgagtctcctgcctcagcctcccgagtagctgggactacaggcacctgccaccactcccggctaattttttgtattttcagtagagatggggtttcacagtgttagccaggatggtctcaatctcctgacctcatgatccgcccgcgtcggcctcttaaagtgcttctttcgaaagcagctccaccagcaaaaggtaggaagaaagcgaggaaaccattcctcgcttggttaactcttgggtgaaaggacgccaaatgagataatctaagaagtctcaaagaaagacagacaggcacagaaaaatcacagcaactctttggactgcaaacaccaacaccacagtccaacctaccagaaatcctgtggttaattggaggcttgccccgctagtcatgaggtgattcagtgatcgctacaaacgctcctcacatgcatcctggacctggcacacctggcttgcccatcaccagcctggagacaccgccaggagcagaatcccggaggccaataaagaccccaactttgcaagtcaggggcgcgagcgctcttgcccaagttcccagaaggaacggcctcgagggtggggtgcgaagtcagtgtgctccacaggacttccgaagacgtgcccccgaagctgctccgtccctccaccccctgggatgccacagaacacccgccagggagtttcttccccagcgcccacgagaggagggctgtgggctgcagcggcaggcgaggaatcaagcgcagggaacttaggccccggcggagccctgcggagcccggcagtgcccggcgcaaccgccccgctcgcgtaacaaaacttgcggcggcccagcgcgccgcgcctcagcccagctgtgcgcccgcaggtcccagactcacctgccgcccggcctggcgcggcgccctcacctccggaacgctgggtggacttcgcagtaaacttgaacttcccatccaggctgcagccgtgccgccgtacctcggccccgctcctggcgccgcaggtcgcccgtcccgcgttcccaaaatcaccaggctcactcagaagctcaggcagcctcgcgaccctcacctacccctcccagcaccgccgctatctcaaccgccgcccagcaacttgcttgcggcccgctggctcctcagggtccggatgggccgtgtcaggagagcccaaggcacaggcgcagctgggccttaaagggacccggctgcctctaccgcacaacgggttcgggccgcgggcggagaaaaggagtaatggaggacggagcgcagctgggccttaaagggacccggctgcctctaccgcacaacgggttcgggccgcgggcggagaaaacgagtaatggaggacggagcgcagcggggacgggaaaatccctctctcccctccgcctctctttcaaagcaccagcccttgaccctgcaattcgccgatttccccggccacttgaaccgcccctgccaggttaaagaggcgggagacacaccccctcggaagcctggagcgaccccgcctttaggactgcaggcttcgcgctgccgcaccgccccatagtctgacttccgggctccgcccgcggcgcagacgcacaggagtcggaaggcagcccccagctcccgcgagaggtggccttaggtcactcgcaaaaacaataaccaacgtgtcaatggcacttgtatttattttctaatttaaatttataacagatttcgcagatgggcttccactgaaataagcctttgagaaaaagaaaaacttttttttaacaagattaggaaataccaagaaatatgaagtaaagccatgccatctacccagctaaaaactttgaaaacttgaaattttatctaaggcaaatgtttgcataattttaagtcgtgccattatttaaagtcaatttcaattaacaatttcattgcaactaaatacatcttctataagaaaactaagatacatccctgataatctacctttcccctcctatattccgtccatcagcaaatcctactggtttttaccttccaaattttccttgaatctgtcctcttctacctcctccatcaccaccctagtctaggctaccttcacctggggagtgggggtggagggactactgacctagtctccttgtggtttacccatatcccctttatcgcctctctaatctcaacacaacaggcagagtggctttttcaaaatgtaatgtgaccctgtcacttcccagcccaaaccacttcccgttctcttagacaaaacctcctaactaaccaagccctgaatggccaggcgctttgcccacctctccatgtcttcttacaggtcagaccaattccatcctgctctctctgcttcagccaaactggcctcttttattccctatttactcagcttcctggactccacagagcttttgctcatgctttgctctgtgcctgaagattcttccaaccctcatccttctgacgacagctgtagtctccacctctgagaggcaacttctgacctccctacggtggtcccttactcccatcacattgcataaaactgtaatcaagtggttatgttggggaatctaccatcagctccgtaagtccaggatttggttttgtttggctcatggttgtatttccacatttgtgaaatacatatttgttcctaaatgagaacgatagatgctagaagttgaagtaaatttggcataaagtcagagaaaggtaaaatgtcacaatctgatatttggaggcagaatctaaaaacttcagttatatcaaaactgattttatatcgttttaggctggattgttgcagggactctttgggtaatctttaaaactgagttctcagagagccttgtataaacacctgaattaataatgatagccctgggatggtccacataaaacgaataacattggttgcttcaagagaggaagaccgagccaggcacagtggctcatgcctgtaatccaagcactttgggaggccaaggctgacagatcatttgagctcaggagtttgagactagcctgggcaacttggtgagaccctgtctctacacaaaatacaagcaaaattagctggtagtcccaaacacctgtagtcccagctgtgtgggaggctgaggtgggaggattgcttgagcccagaagattgagaggctgcagtgagccatgatcatgccactgcacttcaacctggatgacagagcaagatcctgtcaaaaaaaaaaaaaaaagagagagagagaaagaaagactcttgactggtggctactggtgggaaagaggtttttactacatccccaattggacctttttattttaaagtatgtgaagataaataa

SEQ ID NO: 1367 - DNA, 4001 bp, Homo sapiens
cgcctgcctcagtggaaggctggacatgctgctgtggtcactgcctacagggcaggagccaggtccatcccaaggacaaaactctccccagtaccacggtctagacagggatttccacatctttactcttcagtctcctgactttctggcatctgatcctccaaaatttaaagacgaagaaagagaaactcaagggcacatcaaggaagttgacaagatgattcaaccacaacgaagtggagtcagaactcacagcccctgaggtctgactctgaatgtggggccactttcccaagccttgcagcctctcctctaaaacactgcactggggcatgaagtagtgatttcttgtacagtcgggaaggcccctaggactatgggactgatggcttcccttttactgggtatttcaaggacaaatatgtcaaggactttaaaaatatttcacttttaaatcaatattcagatatggttttaagaatcatatctgaagcataaagtgtgagacataagacaataaggccatgaaggaaatatgcccaaatactttattagtatgagaggcagcattaagatttagattagttgtgttaatttagaaacagaataagattagtttgtgttaatttagaaacatcagaatgaagaactaatagatagtgtttacactgtgccaattaatgttcaaggagattgacaggaaatacctcaggtaattcattgcagcaatttacagaggtaggtattattgtagtaccctctgaacagatgaggaaactgagggacagacaagacaagcaacttggatggagcccaggagacaggctgagggtccctgctttgcacactgcactgctgcttccacacattctccggtgtgatctttcctctttaggaacaagagcctgtgcaccaggaagcaggacttcactctcaccaaggtactctctgctttttatttttatttttgatttatttatcgttttgtttgtttgttttttgacgagtcttgccccgtcacccatgctggagtgcaatagtgcaatcttggctcactgcaacatctgcctgctgggttcaaaggattcttctgcctcagcctcccgattagtggtgattacagttgcccgccaggatgcccatccactttttgtatttttagtggagatggggtttctccatgttgcccaggctagtctcaaactgctgacctcgtgctctgcccgcctcagcctcccaaagtgctgagattataggagtgagccacgttgcacggcccctactccctgctcttgatgctgtcacttatagatagcacaggttctattaggagcagactccccttgaagcccctcagagcaggtactggctactatcaccaagttcccctcagagtcactagaacagagctttgcctcttgggcctcaacagaaacttgaactgaataaaagttcactagtcctagacatttagaacaacagactagatgttatttgtctgcaggatcttatatggtacagagaggattcttgaaaacacgattgagccccttggagaaaacaggtcattctgtgcctgcgttagaaatcaataactgtgagtttaactctagttccacccccatctgattgcaaacatggaaagttgctaaatactttggcacctctgtcttccaactttaacaaaatgttaaaatacccatttctgttttcttagaagtacaggaaggatgaaattatttttgatggagagagcatttagtgtctcagagagaagacaggatatcattcatcactttcatgatggtgagcctatagatcttactgtatttcttctgttggttggccaggaagccggccagttgagttagaaaacatttctctttgaggtttctgaactgctgtttcttctctgccagctgggggcgcaatgtctcgttgatttctagaatgttcatctctgccttctcactggaccaagggccggctgataccaccatgctgacgtttgtggcagaagaggtggagtcagggactggggagaagaaacccaaacatatgatgggttaaaaactggtgaaatcaaatcggtttaatcaggactgagggatgtcagtaactgaaattcttaacttactgttgtgaaaaatgtgatcactccccacagcactttaggatccttcaccacaaaaacaaggttcgaggtgcctcaactcagagctgaaagcactgccagtagctcagactctgataagagtgaggcagaatgtggccagcgtgccaggtaaccgtctgcagttgcaataacagaattagaaggtgggggtgtcatggaatcttaggagctctgcattccaattgcccaggctttgctgaaacacaggcaccctactctcacctgagggtcaccaccaatggggatcattccttcagcattcactctcagtattcgtgtacccttgtgacaatgccacagacccgtgtctttcccaatacatctaagcatattcctcactgtttatctcttgtctgtacaacatcatcaaggcagaaacagtttcccaacaggttatattttcttaatggtagtcatgaagtcaccccacctgctctcagttaaaacagagcttaaggcttttccacaggtgtaagatatcaaacttttagcctgccctgatatcctccgggtcttctgcagttttttctgtatccactagaaagtgaatgaataattcatttttttaaaatattttctttcctgtctcagtattcttgctgctgcatcccattgttagattgatttcttctttcttactggggcaccttcttgggttttcattacattctagaccagtttgacatccctacgtccaaagctcttcctctatgtgggttgatttgttttttaatgtcactgagcactacattttatacttgtcacttatagatgtcattctagtgccccaagacctcttttcaaggtatcaagtgatcaaagtcatttatatagaggtctcctgaaaacatgtgtgaccatctatcttgggaagttttgtaaacctgatgctattttgttgtttccattttgttttcccatatactgaaaagaacagggccacgagcagttcttatggaatatggtttgatatatattttgttgagatgacctaacaccattgattttgggttgcattccactaacagaacatggcaagatcaaggttatggtcagggttggttggcgatcctcagtgttgctgtgcagtagaaggtgagtttgaggtgagaggaacaagtaggaaagagtgatcccctgaaccacctcttcgctttctcagctttcatccccacctaggttttgtgagcctggaacttgagagactgttctgtagcccaggtctcctaagattggctgctggacttgcctgagttgagggtgcagtgggttgaccctgggctgcccagcattcatgtggaagtgaaggaaggaggactggttaatcccatttgaaagcatccctctctgcagcccgcaccatcttccagtgacactgtaaggatactgctttgagatgtatcaaaggctttaagtcaatgtattttctagggtctgggagacctgacattctgtgtcagaatgaaaatctgtcaagtttctaaatgaaaaaactgcaggttcacaaagtgtcatgggttacttgaggtcacaaagggatgagttttcagcactgccaataaaagcaatcacaataattattcagtaattattcataggatccatacaatccagtaaatattcacatatttagtaattattcattgaccaattcatacaaggcattttgctcaaaactgtgtttatatttggacattgtatcttcatcataatccttaaggtaatgctattatctataagtaacagataagaaacctgaagatgagggacagctaatcacgtatttggccatatttccattttttggtttttgtgatgctggaag

SEQ ID NO: 1368 - DNA, 4001 bp, Homo sapiens
agaacttggtgatgactaggaaccactgagactcagcagctgccccagtggcacccacaaatcagaggaggaggaggctgggaggacctaagggctacaggacgagctccctgcctacaagacagaagcagctccagaggttttggtaagtaatgtagatttcagtgcagtgtggtcttttttaaaaagtagaacaaaaaggaaagaaaaagagagagcatgagagacaaagaaaaagaaaagaagaaaggaagaaaggaaagaatggagggagggaaggaaggaggaaggaaggaaggaaggaaggaagggagggaggaagggagggaggaagaaaaggagggagggaggaaggcagggagggagagaggaagggaggaagaaaggaagggagggaaggcagaagggaaggagggagggaaagaataaagagagagagaaaaagagtgggagagaagtagggaagggagagaagtagggaaggaaggaaggaaggaaggaaatgaacaaatttacatgaagatgagaacatccaggggaacttacaccaccagtatttcccattaacaggaacacgctaactagttattggagacagatgcactactgtaaaactatatgctgtttccacggggtacaaccccttcttcctcctctgaaacacattattcctctggcccactgttgccagagacactgagtcttgtctttggataagttctggtgcccaaaagaatgagatgagacagtggatcccagaacaccaggccgcaaccttccctgctgctccttgtccactccagaagcttcccagctgcaggtgggggcctcagcccctgggtctgacatcgtccatttgtcattctcactggacttccctccttgcactggctcccactcccccaggacctggtggacggccacgtgagaaggatacaaacaggccatgcccctttctttctccccctctcaatgcctgcagtggtgggttccatggggtagtgacctgagatttactcgttatggggtctctagcccagagcagggcatggtacctaatagtcaccccatgaatgctcagtgaaagaaggcatccaccacaaggtcctggggaaccaagaattccactgtggcccataaattctaagtcctacaggattctggaatgggagatgggaacggccttcaaaagtggcctctcttttaacacattatactggcaactgagccatgtttccccatcctggacacatctagagggcactgcctaaaaccacacacatctccccacccaggacagtgcagggccttagcctgggggatgcgggtggacagggagggggtgagccatgaaagctgaagaggagaaagcaggtgaaaggggacggcagggtggaaacaagagacggaaatgggggcagagaatggggggtaagaggggaagagcaaggagtgggatgcagatctagctactaaggaaaagtcctggagagaacactctcctctcctgaggtaaaatcacttccacctgacgacggcactgcaggtcgagggtggcacacgctgtgaatatttgttcattcacctaacaaatattaattcagtatctgtttcatgccaggcaaggccctgcgatgtttagggcccttggcatcttcccttcacatctgagtcataatagaaaaaggactctctgactccatcgagctggcaatgcctcagggtttttacctgtgggatctggcagctcttcattcagcccacaccgtgtgaggttgctcttggtgcaccgaatggggaagtttctacatcagtacctcggagagtccactggaagccctggacagtgggagttggtggcagccccagcgtggaggccaagaacacacagcactgaagctccaggacaccctcaggaggacggtaagggacggtaaggtgagagcctgggtcaccaggaaccttcgcctgcatctaaacaggatttgctttcagattgcctatgagataaaagagagaaatcatggttaatattgagatttggggcttcggcaacttgaaggatggagctgccgtttacggagactgggaagacccagggaggagcaggttgaaaggtggtggggaactagaattgtttgggttcctgtcatatgtaatcaacagtcctcaccagcctcggcaacatagtaagaccccatctctgaaaataaaaaatgaaaaattggcccagcatggtggcacacacttgtagtctcagctactcagaaggctgaggcaggaggattccttgagccttgaattagaggttagtgagctatgatggcaccactgaactccagcctgggggaaaaaaaaataaagagtcctgactaaatacttgagtagccagggaagttttcacaaagtaatacttgaggcagatcttagtgaacaagaattcgattctttctgttagggaattatgagtgtgtgggtgtagttaatgcttctttggaatctcatctactggtctatctggtctatctgtacacgtatattctacaggctgtctcgctgagctttcgctaggttatgctacagtaacaaaagccccaaaatcttagcagcaacacatacaaaggtttatttttcattgacatttccttttatgtcaggttgactgtgactctgctgtatacaagctattttatttgttagatggtgaaaactgtgacacttggagattgttgaatatggtattagtatgttccttcattcattcctttaacaaatatttattcaatatctgtttcatgccaggcaaggtcaagtactgagaatacagtggtgaataagagacaaaatctcaaatttccaggagcttatgttgaaaatgagattgaacacatacaaaataatcataataacaacaatgaatactatactcataaataatagctgtaagagattttagtaaatcttttaaattagaaaaacataaaaattattaaaactaaaatggccagcggtgatggcttatgcctgtaatcccaacactttgagatgccaaggtgggaggatcatttgagcccaggagtttgaaaccagtctgagcactacaggaaaaccctgtctacaaaaaatagaaaattagccgggcatagtggtgcatgcctgtagacccagctactaaggaagctgaggtgggcagactgcttgagcctgagaggtcaaggctgcagagacccatgatcataccactccactccagcctgggcaacagagcgagacactgtctcaagaaaaaaaaaaaaaattgttcgatgtagtcctaaaactattatgtagaatactattgtttacatcacatcacgtcggccctttaaatggcttaacgcttatttaggtacgatccataaagttttcctggtaattaagtatacctaagaacaatgaagtataaaagagttactgccttgacaggaagattgtaaaaattgtaaaaaagataaataaataaagagtcaagactgtagctctgtgaggctcaaataacatctaattcaagtcacaatgaacatctagcaatcactgtgaacaccacatacttcccttaatacattttccctgaatgcccaacacatctgaattaccaacacccgtatgtagccaagaaactgacaatcatttataaattatcacctatgactccatctgctctatgcacttattttttaaattttactcatttatttattatttttattttttgtagagatgggatctcactatattgcccaggttggtccagaaacagaaacagacccacactaatttcataaattggatgaccatgcagtcatccgatttaagaaaaaaagtgccaaacagtgcagaaggaaaaggatagtcttttcaataaatggtgctggatcaagcagacacatccatgtagtaaaaagtgaatcatagccgggtggggtggctcatgcctgtaatccccacactctgggaggttg

SEQ ID NO: 1369 - DNA, 4001 bp, Homo sapiens
tgactgtgactctgctgtatacaagctattttatttgttagatggtgaaaactgtgacacttggagattgttgaatatggtattagtatgttccttcattcattcctttaacaaatatttattcaatatctgtttcatgccaggcaaggtcaagtactgagaatacagtggtgaataagagacaaaatctcaaatttccaggagcttatgttgaaaatgagattgaacacatacaaaataatcataataacaacaatgaatactatactcataaataatagctgtaagagattttagtaaatcttttaaattagaaaaacataaaaattattaaaactaaaatggccagcggtgatggcttatgcctgtaatcccaacactttgagatgccaaggtgggaggatcatttgagcccaggagtttgaaaccagtctgagcactacaggaaaaccctgtctacaaaaaatagaaaattagccgggcatagtggtgcatgcctgtagacccagctactaaggaagctgaggtgggcagactgcttgagcctgagaggtcaaggctgcagagacccatgatcataccactccactccagcctgggcaacagagcgagacactgtctcaagaaaaaaaaaaaaaattgttcgatgtagtcctaaaactattatgtagaatactattgtttacatcacatcacgtcggccctttaaatggcttaacgcttatttaggtacgatccataaagttttcctggtaattaagtatacctaagaacaatgaagtataaaagagttactgccttgacaggaagattgtaaaaattgtaaaaaagataaataaataaagagtcaagactgtagctctgtgaggctcaaataacatctaattcaagtcacaatgaacatctagcaatcactgtgaacaccacatacttcccttaatacattttccctgaatgcccaacacatctgaattaccaacacccgtatgtagccaagaaactgacaatcatttataaattatcacctatgactccatctgctctatgcacttattttttaaattttactcatttatttattatttttattttttgtagagatgggatctcactatattgcccaggttggtccagaaacagaaacagacccacactaatttcataaattggatgaccatgcagtcatccgatttaagaaaaaaagtgccaaacagtgcagaaggaaaaggatagtcttttcaataaatggtgctggatcaagcagacacatccatgtagtaaaaagtgaatcatagccgggtggggtggctcatgcctgtaatccccacactctgggaggttgaagtgggaagattacttgagcccaagagtttgagaccaacctgggaaacatgttgaatcccaatctctacaaaaaatatgaaaattaagccaggcatggtggcacactcctatagtcgcagctactcaggaggctgaggtgggaggatcgcttgagccaggaggtggaggttgcagtgagctgagatcctgccacggcactctagcctgggcaatagagtgaggccctgtctgaaaaaaaaaaagaaatgcaaaaactaaaataaaattgctataaggttaacacagaaaaatgtgttcatactcctaggttcggcattgatttcttaaacaggacacaaaaagcactaaccataaaggaaaagattgataaagtataatttcattaaaattaagaatctcaggctgggtgcagtggctcatgcctgtaatcccaacactttgggaggccgaggcagatgtctcacctgagaccaggaattccagaccagcctatgcaatgtggcaaaaccccatctctactaaaaatacagaaaagagctgagtgtggtggtgctcacctgtaggtcccagctacttgggggctgaggcaggaggatcacctgagccttgggaggtcaaggttgcggtcagctgtgattgtgccactgcactccagcctgggcaacagagtgagatcttgtctcaaaaagaaaaaaaaagttagagaatctccattcatgaataagcaccattaaaagagcgaaaaggcaagctacagattgaaaaaagggaaatgcaatacatatatatcgtagaaaggacacataaccagaaaaaagtattacaaatcaacagaaaaacaagcatatcaatgaaaactggataaaaagatttaacaggcacttcacaaaagaggacacacaaatgacaataaaagatactcaatctcaataccaggaaaatgcaaaatgaaatcacactgatacattactgcacccctactagaatggcaaaataatttttaactgacaggcatcagcaaggatgtggggtaaccagagtatccctgctaaatggtacaaccactttgggaaaacgttcaacaatatgtaatactaagttttatcattcatatacctctaaaaccaacaatgccactcctacaaatataccccagtctagtaatgttctatttcttgatctgtggtggttcacttggtaaaaattcattacctgtactttttttttttttttttttttttttttttttttggagacagggtctcactctgccacccaggcgggagtgcactgccatgatcacggctcactgcaatctcaacctcctgggctctggtgatcctcccacctcagcctaccaggtagctgggactacaggcacacaccaccacacacagctaacttttgtaattttagtagagatagggttttggcacgttgcccaggctggtctggaaatcctgggctcaagtgatccgcccaccttggcgtcccaaagtgctgggattacaggtgtgatctaccgcgcccggaccacctgcacatttaaaattgtgaacctctctgtatacttcagtaacttttcaaagatttctttgacacaaagttctcagaaatcttaaagctagcatttcacaacagaaaaaaagagcttctggttcactggtgaaattttactaataaaatttaaaaacaaaaagctactaacacatatcagctcagaacaaagactaaacactaccagcagatctttcctttaaccttgtgaagcactgggattcattctttcggcaaagaaaggatgaacaacactgtaacccaaagaaaagataccactgcaagaaaagacttcttttcgaaagcagctctagcagcaaaagataggaggaaagcaaggaaaccatgccaaacgtcttggttaactcttcggagaaaggacgccaaatgagaagatctaacaagccagaaagacagatacagggaaatcacagcaactctttggagtgcaaacaccaaccccacaatccaacctaccggaaatcctgcggtgaattagaggcctgccccgctagtcatgaggtgattcagtgactgctacaaacgctcctcatgtgcatcctggacttggtacacccggcttgcccatcaccagcctggagaaaccgccaggagcagaatcccggaggccaataaagaccccaactttgcaagtcaggggcgcgagtggtctcgcttctcaggtccccagaggcaaccgatttctggcctcgagggtggggtgcggggtcagggtcctccacaggatacacgaggacgtgcccccgaagctgctcgtccctccaccccctgagatgccacagaacacccgccagcgagtttcttccccagcgcccaaggagggctgcgggcggcagcggcaagcgaggaatccaacgcatggaacttaagccccggcggggccggaacacacgccctcccaaccccccaccccgcctcgccctccgtcgctcgcaacaaaacttgcgacagccgcagctcgacccagctgtgtacccgcgggtcccggactcaccgcccgcccggcctggcgcggcgccttcacctcggaaacgctgggtggacttcgctgtaaaccgtaacttcccatccagacggca

SEQ ID NO: 1370 - DNA, 4001 bp, Homo sapiens
ttgatttttaaatcatatcttcagttatgattttaagaatcatatctgaagcataaagtgtgacacataacaccttaaggccatgaaggaaatatgcccaaatgttaataaagtttgtgttaatttagaaacagcagaatgaagaactaataaatagtgttcactgtgtgccaataaatgttctaggagattgacaagaaatagctcatgtaattcactgcagcaatttacagaggtaggtattattgtagtaccctctgaacagatgaggaaactgagggacagacaagacaagcaacatggatggagcccaggagacaggctgagggtccctgctttgcacactgcactgctgcttccacacattctcgggtgtgatctttcttcctctttaggaacaagagcctgtgcaccaggaaacaggacttcgctctcaccaagctactctctgctttttatttttatttttgatttatttatctttttgtttgtttgttttttgacgagtcttgccctgtcacccatgctggagtgcaatagtgcaatcttggctcactgcaacatctgcctgctgggttcaaaggattcttctgcctcagccacccgattagtggtgattacagttgcccaccacgacgcccatctactttttgtatttttagtggagatggggtttctccatgttgcccaggctagtctcaaactcctgacctcgtgctctgcccgcctcagcctcccaaagtgctgagattacaggagtgagccacgttgcacggcccctactccctgctcttgatgctgtcacttatagatagcacaggttctattaggagcagactcctcttgaagcccctcagagcaggtactggctactatcaccaagtttccctcagagtcactagaacacagctttgcctgttgggcctcaacagaaacttgaactgaataaaagttcactagtcctagacatttagaacaacagactacatgttatttgtctgcaggatcttatatggtacagagaggattcttgaaaacatgattgagcctcttggagaaaacaggtcgttctgtgcctgtgttagaaatcaataaatggcagtttaactctagtcccacccccatctgattgcaaacatggaaagttgctaaatactttggtacctctgtcttccaactaacaaaatgttaaaatacccatttctgttttcctacaagtacaagaaggatgaaattatttttgatggagagagcatttagtgtctcagaagacaggacatcattcatcactttcatgatggtgagcctatagatcttactgtatttcttctgctggttggccaggaagccggccagttgagttacaaaacatctctctttgaggtttccgaactgctgtttgttctctgccaactgggggcgcaatttctcgttgatttctagaatgttcatctctgccttctcgctggaccaagggccggctgataccaccatgctgacgtttgtggcagaagaggtggagtcagggactggggagaagaaacccaaacatatgatgggttaaaaactggtgaaatcaaataggtttaatcaggactgagggatgtcagtaactgaaattcttaccttactgttgtgaaaaatgtgatcactccccacagcactttaggatccttcaccacaaaaacaaggttcaaggtgcctcaactcagagctgaaagcactgccagtagctcagactctgataagagtgaggtagattgtggccagcgtgccaggtaaccgtctgcagttgcaataacagaattagaaggtgggggtgtcatggaatcttaggagccctgcattccaattgcccaggctttgctgaaacacaggcaccctagtctcacctgagggtcaccaccaatggggatcattccttcagcattcactctcagtattcgtgtacccttgtgacaatgccacagacccgtgtctttcccaatacatctaagcatattcctcactgtttatctcttgtctgtacaacatcatcaaggcagaaacagtttcccaacaggttatattttcttaatggtagtcatgaagtcataaataaaaaaatggaatcatttagtatgttctcttgttttgactttttctttttttttttttggagacagagtctcactctgtcgcccaggctggagtgcagtgacgcgatctaggctcactgcaagctctgcctcccaggttcacgctattctcctgcctcagactcccaagtagctgggaatacaggcacccgccaccacgcccggctaatttttttttttttttttttttttgtatttttagtagagacggggtttcactgtgttagccacgatggtctcgatctcctgacctcgtgatctgccgcctcggcctcccaaagtactgggattacaggcgtgagccaccgcgcccggccgacttctctttactcaggtgggtatatatgccactaatttgtttgattgtgtttttcccttgtttcattttgttttggccaagtaatatcctattgattgtatgattatcacacaattttatatccatttttctgatgggagacaggtttacttgataactactgtgcataagtaactatgaatattctcatacaattatttctgtgaagatacatacttattttcctgggtatctatagctagggatggagttgcttggtgaatgggtagaaaatgttggacagagttttgcaaagtatttgtattgctttacatttctatgaaagatgtaggccatttccagttgctctacattcccacacacttaatattttcagtcttttaaactatgccaggtgtgtagtgatatcataaaatttggttttctcatgcctaatgttcatttagatatcttcttatggaaaatatcttctcaaatttttatattcattgatatactgggctgtttgtcaatttctttgtaataggagttctttatatattttgaatgagtccatttatacatacatattttttgctgtattatatagcaaataattattcctggtctagagatagcgtttaagttgttaaacaacaacataataaggagaagctttttaaaaatgaagtgcaattcgcttgatttcttattgtggtgagtgctacagtatctagtctaagaaatattttcctgtgtcaagttcatgaaactatttcctatttttcctttacaaggtttctaattttaactttcacatcttaagataatttcaacatatgatggagagtggttaatattaactttttaaaacaacaaatattatttcactcaaaatcgttttacttaaaagtctttcatttccccaatgaagggcattggtgtctttgtttttaaaacatttagaagcggcggtgcgagcatgttctcactcatgggtgggaactgaacaatgagaacacttggacacaggacggggaacatcacacaccagggcctgtcatggggtgagggctgggggagggatagcattaggagaaatacctaatgtaaatgacgagttaatgggtgcagcaaaccaacatggcacacgtatatatatataatatatatacacgtgtatatatattatacacatatatacatgtatacacgtatacatgtatacatgtatatacgtgtatacacgtatatataatatatatacaaacacatgaatatatataatatatatacgtgtatatacatacgtgtatatatataatacgtgtatatacataatatactatatataacacgtgtatatatatattatatatatatatttttcttttttaagtggcggagcgagggctactgcacagctagcagagtcgtggcgaggaggacagcacctgcatcgagctctccgcctcccccacccgccagcccaggcggccccagcagcagtgaccagaagagcccctgcagcaacgcaacggccaggtggacacctccatctacag

SEQ ID NO: 1371 - DNA, 4001 bp, Homo sapiens
aacaggaaaacaagcatatcaatgaaaactggataaaaaggtttaacaggcatgtcacaaaagaagacacataaatggcaataaaagatactcaatctcaatgaaaccacactgatatattactgcacccctactagaatggcaaaatgatttttaactgacaggcatcagcgaggatgtggggtaaccagaatatccttgctaaatggtacaaccactttgggaaaatgttcaacaatatgtaatactaaagttttatcattcatatacctctaaaaccaacaatgccactccaaaaatatactccagtctagtaatgttctatttcttgatctgtggtggttcacttggtcaaaattcattactttttttttttttttttttgagataggctctcactctgccatccaggtcggagtgcactgccatgatcacggctcactgcaatctcaaccttccgggctctggtgatcctcccacctcagcctaccgggtagctgggactacaggcacacaccaccacacacagctaacttttgtatttttagtagagatagggttttgccacattgccgaggctagtgtggaaatcctgggctcaagtgatctacccaccttggcgtcccaaagtgctgggattacaggtgtgatctactgcgcccgggccccctgcacatttaaaattgtgaacttcttctgtatacttcagtaacttttccaagatttctttgacgcaaagttatcagaaatcttaaagccagcatttcagaatagaaaaaaatagcttctggttcactagtgaaattttactaataaaatttaaaaacaaaaagaaagctactaacgcatatcagctccaaacagattaaacactaccagcagatctttaacttcgtgaagcactgggattcattcctttggcaaagaaaggatgaacaacaccgtaacccaaagaaaaggtaccactgccagaaaagacttcttttcgaaagcagctctagcagcaaaagacagaaggaaagcaaggaaactaggccaaacgtcttggttaactcttcggtgaaaggacgccacatgagatgatgatctaagaagccagaaagacagacagacaggcacagggaaaccacagcaactcctcggagtgcaaacagcaaccccacaatccaacctagccgaaatcctgcggttcatttgaggcttgccccgctagtcaggaggtgattcagtgatggctacaaacgctcctcatgtgcatcctggacctggcacacctggcttgcccatcaccagcctggagacaccgccaggagcagaagcccggaggccagtaaagaccccaactttgcaagtcaggggcgcgagcgctctcgcctctcaggcccgcagagggaaccgatttccggcctcgagggtggggtgcggagtcagtgtcctctacaggatataggaggacgtgcccccgaagctgctccgtccctccaccccctgggatgccacagaacacccgccagcgagtttcttccccagcgcccacgagagctgggctgagggcggcagcggcaggcgaagaatccagcgcggggaactcagcccccggcggtgcacgaccccccacaccccccacctcccacccgcccccgcgctcgcgcaacaaaacttgcgacggccgcgcctcgacccaggtgtgcgcccgccggtcccggattcaccgcccgtccagcctggcgcggcgccctcacctgagaaacgctgggtggacttcgccgtaacttcccatccagacggcggcccgcagccgcgccgccgcgcctcggcccagctcctggcgccgcaggttgccagtcccgcgttcccaaaagcaccgcgcgcagaagctcactcagtctcgggatcctcacctacccatcccagtaccgccgctgtctcaaccgccacccaacccctcgcctgtgcctgcgcctgcgcctgcgcctgcagcccactggctcctcagggtccggatgggccgcgtcaggagaacccaaggcgcaggcgcggcggggccttaaagggactcggcggcctctactgcacaacaggttcgagcaggttaggggccctgcgggccgagaaaaggagtaacctaggtgatgcaccgagtgcagctgggacggggaatccctctctgccctccgcgtctctctcaaagcaccagccctcgaccctccaaatcgctgatttccccggccacttgaaccgcccctgccaggttaaagaagcagaagacacaccccctcggaggcccggagcgtccccgcgtgcccacacggattttatttttttctgaaaagatggtacatttacatggttcgaaattcaaatagggccaggcgtgagccctggagttcgagaccagcctggacgaaaaagaaagagccccgtatctattaaaaaaaaaaaatcaaatagtacagaaaattgtaaagttaaaataggcatcttttccattcctgtctcccagtctcaccctgtaggcaatctgtgggatgctgttcctgtgaatccttccagggatattttatgtacgttttcgctttttttatttttatttttttttttgagatagagtcttgctctcgttgcccaggatggagtgcaatggcatgatcttggcttcctgcaacctccacctcccaagttcaagctattgtcctgccttagcctcccaaatagctgggattacaggtgcccaccatcctgcctggctaattgttgtatttttagtagagacggggtttcaccatgttggcaaggctggtctagaactcctgacctcgagtcttgctctgtcacccttgctggagtgcagtggcacaatctcagctcactgcaacctctgcctcccaggatcaagcgattctcctgccccagcctcccgagtagctaggactacaggcgtgtgccaccacacccagcctcccttcccatttggcacgtgccagccacgtgccaagtcccaggccccaaactggttaggggtcaggaagagcgttccaaagagctcacacagaagttcaatcctatctctccaccaaggtgggcgacaccatggggctgcaatgcctgcttttgtgcttttcaggcacctcccccagtgctgccaactgcccttctgaagggcctgtgtttgccaccctctgccttcgcactaatttgctatttctaatctgctctgggccaggagaacagataaaactagggccctcaatggtttagagttttatagttcaccaagtgctcaaggcacattatcttctgtgaacctcaccccaggccctagggaaagacagatcaggacgagccacgtgactgtgcaggtcatttaagttttcattctcctacctctaaaatgctgaaaataacaggaacgactccataggactggtgtgaggattaaatatccatggactgcttagaacaggtccagcatatagtggcaataacaatattaatgagagctaacattcagtgagcacttagcatgttccaaaatctgttctgttctaagtgctatatatagaacagcttatttgatcctcaaaagaaagctacatttttaagtatcattacttcccctatcctacagatgagaaaaatgaggcatggagaagtgattttctaaagatcacaaaactgggctgggcacagtggctcaacctgtaatcccagcactttgggtggccgaagcgggtggatcacctgaaggcaagagttccagaccagcctggccaacatggtgaaacccccgtctctactaaaaatacaaaaattagccagacatggtggtgcacgcctgtaattccagctactcgggaggctgaggcaggagaattgcttgaacccaggaggcggaggttgcagtgagctgagatcatgtcactgcaatccagcctaggggacagagtgagactccatcttaaaaataaatagcccaggcatggtggctcacgcctgtaatc

SEQ ID NO: 1372 - DNA, 4001 bp, Homo sapiens
ctcagcttgcctgagcttctctgccagcttctccatggactgcagttcatccctcagcacagagtctatgatgtctttgtactcttcacactctgagaaaagacagacacgcctgcctcagtggaaggtgggacatgctgctggggtcactgtctatagggcaggcggcagcatccatcccaaggacgaaagcagctccagtaccaggctccaggcaggcatttccacatctttatttatcaacctcccaactttctggcatctgatactccccaactcagggatggggagaaagaaacacaagggcacatcaagtaacttgacaagatgattcacctggaagaaggcggagtcagaattcacagcccctgaggtctgactctgaatcctgggccactttcccaagccttgcggcctctcctgtaaaacactgcactggtgcatgaagtagtgattttctatacagtcaggaaggccctaggactatgggacccaaagtttcccttgtactgggaatttcaagtgcgaatatgtcaaacatttaaaaaatcatatctggatataattgcataaaatatgaggcacaagaccgtgaggctatagtagaaatatgcccaaatactactaaagtttgaattaagttagaaatagtagaatgaagaactaatagatagtgtttactctgttccaagaactgttctaggaaatttacaagaaataggtcatgtaattcattgcagtaatttacagaggtaggtattattatagtactcaatgagcagatgaggaaactgaggcacagagaagataggcaacttggatggagcccaggagactggcccagggtccctgctctgcacactacactgctacctctacaatgtctcatgtgccatctttcttcctcttcaggaataagagcctgtgccccaggaagcagcacttccctctcactgggacactccctgctttgaagggtgtcacagatatcacagtttctgttaggggcagtctcctctttaagctccttagagtgggtactctgtacagttgccatgtttcccccagggtcctctggatggagctttgcctattgggcctcaaagaagcttgaactgaatggaagttcattagtcccagacatttagaccaacagactagatgttacttgtctgtagaatcttatatggtacagagaggattctcataaacatgatttagcctcttactgaggaaaacaggtggttctgtgcctgtgtcagaagacaataagtaggattttaagtctagtcccacctcacaccagactgccaatgtggaaaagttgctaaatactttgtgcctctgttttccatgtttaacaaaatgaggttaaaacatccacttctattttcctagaagtatgggaaggatgaaattaatttcgatgaaaagactgttcagtttctcagaacacaggtgatcattcatcacgttcatcattgtgaatctatagaacttactgtatttcttcagctggttggccagggagtaggcagtagcttgagttataaggaatttctctttgaggtctcggaactgctgattgctctctgccagctgcgagcgcaattcctggttgatttctaggatgttcatctctgccctctcgctggacaaagggtcggcagataccaccatgctgacgtttgtggcagaagaggtagagccagggactggggagaagaaacccagacacatgatgggtcaaaaaatagtgaaatcaattaggtttaatcaggactgagagatgacaattactggaattgttaacttacagttgagaaaaagttgatgaacacgacacaacactttagagtccttaaccgcaaaaacagggaccgggatgcctgagctcagagctgaaggcactgcctgtagctccgactctgacaagagtgagggaggtagcagccagcgtaccaggtaacggtctgcagttgcaataacagaattagaaggtgggggtgtcatggaatcttagaaaccctgcattccaattgcccaggctgtgctgaaacactaggccccctggtctcacctgagggtcactgatggggaccatttcttcagcagtcactctcagtatttgtgcacccttgtgacaatgctacaggcccacctctttctcaatacatataagcatattcctcattgttcatctcttgtgtgtataaaatcatcaaggtagggatagttttccagaaggttatattttcttagtggtagtcatcaagtcacctcaccttctttttaaggtaaaatgatcttaatgcttttccacaagtgaaagatagcaaacttttagtctgctatgatatccctctgggtcttctgcagttttttctgtatcgactgaaaatgaaggaataattcacttttaaaaaagattttctaccctgtctcagtattcttgctgcatcccattgttatgttgatttcttttctcttactggggcagcatcttggcttttcattacacttaagaccagtttcacatccctacgtccaaagctcttcctctatgtgtgggtcggtttgcttttttaatgtcactgaacactcgtttcatacttgtcacttacgaatatcattctcgtcccaaaatagctcttttcaaggtatcaagtgatcaaaatcatttgtatatatcccctgaaaacatgtgtgaccatctatcttgggaagtcttgtaaacctgatggtattttgttgtttttagttttcccatatattgaaaagaacagggcattgaacgcttctcagggaatattgttggagatatatatatatatatatatatatatatatatatatatatatatatacacacacatatagagttgctctaacactgttgatgtgtggttgcattccactaaccgaacctggcaagatcaagctcatggtcacgggtggttggtgatcctcagtgttcctgtgcagtagaaggtgagtttgagatgagagggatgagtaggggagtgtgctcccccaaaccacctcctcactttctcagcttccatcttcaactaggtcttgtgaggctaggacttgggagattgtcctgtagcccaggtctcctaagtgtggctgctggacttgcctgagttgagggtgtgatgagtgtgaccacgggctacgcagcattcatgtggaagtgaaggaggaggactggatcaatcccagtggaaagcgcacctctcagcagcccgcaccatcctccacctacactgtgtagtgacagtgctttgagatgtagcaaaggctataaatttatctattctctggtgtctcaaagacctgacattctgtgtcagaatgaaaatctgtctagtttcttcactttaaaaatgataaaactgcaggttcacaaagttactggtttacttgaggtcacacagggatgcattttgagcactgccaataaaaggaatcacaataattattcagtaattatttatagaatccatgtaattcaataaataaaaataattatttattgaccaattcatactaggcattttgttcaaaactgtacacatacttggatatcatattttcatcataatccttaaggcaatgttattatccataagaaacaggtaagaaacctgaagaagagggatagcaaatcatgtatttggctatatttctattttttggtttctgtgatgctggaagaatgaccagaatgagtcatgggaatagcattcattcctgtgtcattttccaggacagaggtgtgccctccttcagcattgggaccgaaattcagaagtgtctgcaaccttgctttaacagtgtgggaaataacctctattacctggaatttcactggaactttggaatatacagagaaatatgagacttgggtcttcccctggctgtatttaattcactattctattgagtaccaatgattctcattaagacttttgcctttttataacttttctttc

SEQ ID NO: 1373 - DNA, 4001 bp, Homo sapiens
cctcagcttgcctgagcttctctgccagcttctccatggactgcagttcatccctcagcacagagtctatgatgtctttgtactcttcacactctgagaaaagacagacacgcctgcctcagtggaaggtgggacatgctgctggggtcagtgtctatagggcaggcggcagcatccatcccaaggacgaaagcagctccagtaccaggctccaggcaggcatttccacatctttatttatcaacctcccaactttctggcatctgatactccccagctcagggatggggagaaagaaacacaagggcacatcaagtaacttgacaagatgattcacctggaagaaggcggagtcagaattcacagcccctgaggtctgactctgaatcctgggccactttcccaagccttgcggcctctcctgtaaaacactgcactggtgcatgaagtagtgattttctatacagtcaggaaggccctaggactatgggacccaaagtttcccttgtactgggaatttcaagtgcgaatatgtcaaacatttaaaaaatcatatctggatataattgcataaaatatgaggcacaagaccgtgaggctatagtagaaatatgcccaaatactactaaagtttgaattaagttagaaatagtagaatgaagaactaatagatagtgtttactctgttccaagaactgttctaggaaatttacaagaaataggtcatgtaattcattgcagtaatttacagaggtaggtattattatagtcctcaatgagcagatgaggaaactgaggcacagagaagataggcaacttggatggagcccaggagactggcccagggtccctgctctgcacactacactgctacctctacaatgtctcatgtgccatctttcttcctcttcaggaataagagcctgtgccccaggaagcagcacttccctttcactgggacactctgtgctttgaagggtgtcacagatatcacagtttctgttaggggcagtctcctctttaagctccttagagtgggtactctgtacagttgccatgtttcccccagggtcctctggatggagctttgcctattgggcctcaaagaagcttgaactgaatggaagttcattagtcccagacatttagaccaacagactagatgttacttgtctgtagaatcttatatggtacagagaggattctcataaacatgatttagcctcttactgaggaaaacaggtggttctgtgcctgtgtcagaagacaataagtaggattttaagtctagtcccacctcacaccagactgccaatgtggaaaagttgctaaatactttgtgcctctgttttccatgtttaacaaaatgaggttaaaacatccacttctattttcctagaagtatgggaaggatgaaattaatttcgatgaaaagaccgttcagtttctcagaacacaggtgatcattcatcacgttcatcattgtgaatctatagaacttactgtatttcttcagctggttggccagggagtaggcagtagcttgagttataaggaatttctctttgaggtctcggaactgctgattgctctctgccagctgcgagcgcaattcctggttgatttctaggatgttcatctctgccctctcgctggacaaagggtcggcagataccaccatgctgacgtttgtggcagaagaggtagagccagggactggggagaagaaacccagacacatgatgggtcaaaaactagtgaaatcaattaggtttaatcaggactgagagatgacaattactggaattgttaacttacggttgagaaaaagttgatgaacacgacacaacactttagagtccttaaccgcaaaaacagggaccgggatgcctgagctcagagctgaaggcactgcctgtagctccgactctgacaagagtgagggaggtagcagccagtgtaccaggtaacggtctgcagttgcaataacagaattagaaggtgggggtgtcatggaatcttagaaaccctgcattccaattgcccaggctgtgctgaaacactaggccccctggtctcacctgagggtcactgatggggaccatttcttcagcagtcactctcagtatttgtgcacccttgtgacaatgctataggcccacctctttctcaatacatataagcatattcctcattgttcatctcttgtgtgtataaaatcatcaaggtagggatagttttccagaaggttatattttcttagtggtagtcatcaagtcacctcaccttctttttaaggtaaaatgatcttaatgcttttccacaagtgaaagatagcaaacttttagtctgctatgatatccctctgggtcttctgcagttttttctgtatcgactgaaaatgaaggaataattcacttttaaaaaagattttctaccctgtctcagtattcttgctgcatcccattgttatgttgatttcttttctcttactggggcagcatcttggcttttcattacacttaagaccagtttcacatccctacgtccaaagctcttcctctatgtgtgggtcggtttgcttttttaatgtcactgaacactcgtttcatacttgtcacttacgaatatcattctcgtcccaaaatagctcttttcaaggtatcaagtgatcaaaatcatttgtatatatcccctgaaaacatgtgtgaccatctatcttgggaagtcttgtaaacctgatggtattttgttgtttttagttttcccatatattgaaaagaacagggcattgaacgcttctcagggaatattgttggagatatatatatatatatatatatatatatatatatatatatatatagttgttctaacactgttgatgtgtggttgcattccactaaccgaacctggcaagatcaagctcatggtcacgggtggttggtgatcctcagtgttcctgtgcagtagaaggtgagtttgagatgagagggatgagtaggggagtgtgctcccccaaaccacctcctcactttctcagcttccatcttcaactaggtcttgtgaggctaggacttgggagattgtcctgtagcccaggtctcctaagtgtggctgctggacttgcctgagttgagggtgtgatgagtgtgaccacgggctacgcagcattcatgtggaagtgaaggaggaggactggatcaatcccagtggaaagcgcacatctcagcagcccgcaccatcctccacctacactgtgtagcgacagtgctttgagatgtagcaaaggctataaatttatctattctctggtgtctcaaagacctgacattctgtgtcagaatgaaaatctgtctagtttcttcactttaaaaatgataaaactgcaggttcacaaagttactggtttacttgaggtcacacagggatgcattttgagcactgccaataaaaggaatcacaataattattcagtaattatttatagaatccatgtaattcaataaataaaaataattatttattgaccaattcatactaggcattttgttcaaaactgtacacatacttggatatcatattttcatcataatccttaaggcaatgttattatccataagaaacaggtaagaaacctgaagaagagggatagcaaatcatgtatttggctatatttctattttttggtttctgtgatgctggaagaatgaccagaatgagtcatgggaatagcattcattcctgtgtcattttccaggacagaggtgtgccctccttcagcattgggaccgaaattcagaagtgtctgcaaccttgctttaacagtgtgggaaataacctctattacctggaatttcactggaactttggaatatacaagagaaatatgagacttgggtcttcccctggctgtatttaattcactattctattgagtaccaatgattctcattaagacttttgcctttttataacttttctttctgacacagaatgtc

SEQ ID NO: 1374 - DNA, 4001 bp, Homo sapiens
gggcatgaggtagtgatttcccgcacaggtgggaaggcccctaggactgtgggactgatggtttcccttttactgggaatttcaaggacaaacatgtcaaaggttttaacaatctttgatttttaaatcttatctttggatatgattttaagaatcatatctgaagcataaagcatgagacataagaccataaggccatgaaggaaatatgcccaaattccaataaagtttgtgttaatttagaaacagtagaatgaagaactaaaagatagtgtttactctgtgccaataactgttctaggagattgacaagacatagctcatgtaattcactgcagcaatttacagaggtaggtatcattgtagtaccctctgaacagatgaggaaaccgaggaaaaaacacgacaaacaacttggatggagcccaggagacaggcccagggtccctgctctgcacactgcactgctacctccacacattcttgggtgcgatctttcttcctctttaggaacaagagcctgtgccccaggaggcaggacttccctctcaccagggtactgtctgctttctttttctttctttcttttttttttttgtcaagtcttgccctgtccccaaggctgtagtgcaatggtgtgatcttcgctcattgcaacttctgcctgccgggttgaaaggattctcctgcctcagcctcccaagtagctaggattacaggcacccgccactacgcccagctagtttttatatttttagtagagacggggtttcactattttggccaggctggtctcaaactcctgacctcgtgaacagcccaccttggcctctcaaagttctacgattacaggagtgagccaccgcacatggcccctactcccagctctcgatgctgtcacttatagataccacaggatctattaggagcagagtctcttgaagctcctcagagcaggtactgggtactaacaccatgtttcccccaggggccctagaacagagctttgcctattgggcctcaacagaagcttgaaatgaataaaagttcactagtctcagacatttagaacaacagaatatatgttatttgtctgcaggatcttatctggtacagagaggattcttgaaaacatgattgagcctcttggagaaaacaggtcgttctgtgcctgtgtcagaaatcaataactgggattttaactctagtcctacacccacctgactgcaaacatggaaatttgctaaataccttgctacctctgtcttccaaattaaacaaaatgttgaaatacccatttctattttcctagaagtacgggaaggatgaaattacttttgatggagagagcatttagtgtctcagagagaagacaggacatcattcatcactttcatgatggtgagcctatagatcttactgtatttgttctgctggttggccaggaagccggccatttgagttacaagaaatttctgcttcatgtttctgaactgttgtttgttctctgccagctgggggcgcaatttctcattgatttctagaatgttcatctctgctttctcactggaccaggggccggcagataccaccatggtgacgtttgtggcagaagaggtggagccagggactggggagaagaaacgcaaacacatgatgggttaaaaactggtgaaatcgaataggtttaatcaggactgaggaaggtcagtaactgaaattcttaacttactgttgagaaaaacgtgatcactccccacagcactttaagatccttcaccacaaaaacaaggttcgaggtgcctgagctcagagctgaaggcactgcctgtagctcagactctgacaagagtgaggtagattgtggccagcatgccaggtaacggtctgcagttgcaataacagaattagaaggtgggggtgtcatggaatcttaggagccctgcattccaattgcccaggctttgctgaaacacaggcaccctggtctcacttgagggtcaccaccaatggggatcattccttcagcattcactctcagtattcgtgtacccttgtgacaatgccacagacccatctctttcccaatacatctaagcatattcctcactgtttatctcttgtctgtacaacatcatcaaccagaaacagtttcccaacaggttatattttcttaatggtagtcatgaagtcaccccacctgctctaagttaaaacagagcttaagccttttccacaggtataagatatcaaacttttagcctgccctgatatcctctgggtcttctgcagttttttctgtatccactagaaagtgaatgaataattcattttttaaaaatgttttctttcctgtctcagtattcttcttgctgcatcccatggttatgttgatttcttttttcttactggggcaccatcttgggctttcattatgctctagaccagtttgacatccctacgtccaaagctcttcctctacatgggttgatttgttttttaatgtctctgagcactacattttatacttgtcacttatgaatgtcattctagtgccacaagagctcttttcaagatatcaagtgatcaaaatcatttatatagagagatctcctgaaaacatgtgtgaccatctattttgggaagtttcataaacttgatgctattttattgtttccatttcattttcccatatattgaaaagaacagggccatgaacagttcttatggaatatggtttgatatatattttgctgagttggactaacaccatttgtttttggttacattccactaacagaacatggcaagataagtttatggtcagggttggttggtgatcctcagtgttgctgcgcagtagaaggtgagtttgaggtgagaggaacaagtaggaaagagtgatcccctgaaccacctcctcactttcttagctttcaaccccacctaggttttgtgagcctggaacttgggagactgttcggtagcccaggtctcctaagagtgggtgcagtggctgtgaccctgggctgctcagcattcatgtggaaatgaaggaaggaggactggatcaatcccatttgaaagcatccttctctgcagcccacacaatcctccaatgacactgtaaggatcctgctttgaaatgtatcaaagactttaaatcaatgtattttctggggtctgggaggcctgacattctgtgtcagaatgaaaatctatcaagtttcttcattttaaaaatgataaaactgcaggttcacaaagttacatggcttacttgaggtcacacagggatgagttttcagcactgccagtagaagcaatcacaataattattcagtaattattcataggatccatgcaattcagtaaatattcacataattatttagtaattattcattgaacaattcataccaggcattttgttcaaaactgtgctaatatttccacagtgtatttttatcataatcctattatggtaatgctattatccataagtaacaggtgataaacctgaagatgagggatagctaatcatgtatttggccatatttccattttttggtttttgggatgctggatgaatgaccagaatgagtcacaggaagagtattcattcctgtattattttccaggacagaggtgtaccctcctagtgtactgggaccaaaattcggaagtgtctgcaaacttgctttaaccgtatgggaaataacctctatcacctggaatttccttgggactttggaaaatacaagagaagtatgagacttgggtcttcccttggctgtgtttaattcactcttctatggaataccaatgattctcactaagacttttgcctttttataaccacaatgtatgctttatggagaagattttactctttgctctacttagaaagaataaatatgagcaatgctttaggttttatgccctggacttaatatttttctgatttctgttttgagattaaattctcatgtaaatagaaa

SEQ ID NO: 1375 - DNA, 4001 bp, Homo sapiens
gaagaaagagaaactcaagggcgcgtcaaggaagttgacaagatgattcaaccacaacgaagcggagtcagaactcacagcccctgaggtctgactctgaatgcggggccactttcccaagccttgcagcctctcctctaaaacactgcactggggcatgaagtagtgatttcttgtacagtcgggaaggtccctaggactatgggactgatggtttcccttttactgggtatttcaaggacaaatatgtcaaggactttaaaaatatttcatttttaaatcaatattcagatatggttttaagaatcatatctgaagcataaagtgtgagacataagacaataaggccatgaaggaaatatgcccaaatactttattagtatgagaggcagcattaagatttagattcgttgtgttaatttagaaacagcataagattagtttgtgttaatttagaaacatcagaatgaagaactaatagatagtgtttacactgtgccaattaatgttcaaggagattgacaggaaatgcctcatgtaattcattgcagcaatttacagaggtaggtattattgtagtaccctctgaacagatgaggaaactgagggacagacaagacaaggaacttggatggagcccaggagacaggctgagggtccctgctttgcacactgcactgctgcttccacacattctcgggtgtgatctttcttcctctttaggaacaagagcctgtgcaccaggaagcaggacttcactctcaccaagctactctctgctttttatttttatttttgatttatttatctttttgttttgtttgttttttgacgagtcttgccctgtcacccatgctggagtgcaatagtgcaatcttggctcactgcaacatctgcctgctgggttcaaaggattcttctgcctcagcctcccgattagtggtgattacagttgcccgccacgatgcccatctactttttgtatttttagtggagatggggtttctccatgttgcccaggctagtctcaaactgctgaccttgtgctctgcccgcctcagcctcccaaagtgctgagattacaggagtgagccatgttgcacggcccctactccctgctcttgatgctgtcacttatagatagcacaggttctattaggagcagactcctcttgaagcccctcagagcaggtactgggtactatcaccaagttcccctcagagtcactagaacagagctttgcctgttgggcctcaacagaaacttgaactgaataaaagttcactagtcctagacatttagaacaacagactacatgttatttgtctgcaggatcttatatggtacagagaggattcttgaaaacatgattgagcctcttggagaaaacaggtcgttctgtgcctgtgttagaaatcaataactgtgagtttaactctagtcccacccccatctgattgcaaacatggaaagttgctaaatactttggtacctctgtcttccaactttaacaaaatgttaaaatacccatttctgttttcctagaagtacaggaaggatgaaattatttttgatggagagagcatttagtgtctcagagagaagacaggacatcattcatcactttcatgacggtgagcctatagatcttactgtatttcttctgtcggttggccaggaagccggccagttgagttagaaaacatctctctttgaggtttacgaactgctgtttgttctctgccaactgggggcgcaatttctcgttgatttctagaatgttcatctctgccttctcgctggaccaagggccggctgataccaccatgctgacgtttgtggcagaagaggtggagtcagggactggggagaagaaacccaaacatatgatgggttaaaaactggtgaaatcaaataggtttaatcaggactgagggatgtcagtaactgaaattcttaccttactgttgtgaaaaatgtgatcactcccacagcactttaggatccttcaccacaaaaacaaggttcgaggtgcctcaactcagagctgaaagcactgccagtagctcagactctgataagagtgaggtagattgtggccagcgtgccaggtaaccgtctgcagttgcaataacagaattagaaggtgggggtgtcatggaatcttaggagccctgcattccaattgcccaggctttgctgaaacacaggcaccctagtctcacctgagggtcaccaccaatggggatcattccttcagcattcactctcagtattcgtgtacccttgtgacaatgccacagacccgtgtctttcccaatacatctaagcacattcctcactgtttatctcttgtctgtacaacatcatcaaggcagaaacagtttcccaacaggttatattttcttaatggtagtcatgaagtcataaataaaaaaatggaatcatttagtatgttctcttgttttgacttttttatttttttgagacagagtctcactctgtctcccaggctggagtgcagtgacgcgatctaggctcactgcaagctctgcctcccaggttcacgctattctcctgcctcagactcccaagtagctgggaatacaggcgcccgccaccacgcctggctaatttttcttttctttttttttttctttttttgtatttttagtagagacggggtttcactgtgttagccacgatggtctcgatctcctgacctcgtgatctgccgcctcggcctcccaaagtactgggattacaggcgtgagccaccgcgcccggccgacttctctttactcaagtgtgtatatatgccactaatttgtttgattgtgtttttcccttgtttcattttgttttggccaagtaatatcctattgattgtatgattatcacacaatttgatatccatttttctgatgggagacaggtttacttgataactactgtgcataagtaactatgaatattctcatacaattatttctgtgaagatacatacttattttcctgggtatctatagctagggatggagttgcttggtgaatgggtagaaaatgttggacagagttttgcaaagtatttgtattgttttacatttctatgaaagatgtaggccatttccagttgctctacattcccacacacttaatattttcagtcttttaaactatgccaggtgtgtagtgatatcctaaaatttggttttctcatgcctaatgtgcatttagatatcttcttatggaaaatatcttctcaaatttttatattcattgatatactgggctgtttgtcaatttctttgtaataggagttctttatatattttgaatgagtccatttatacatacatattttttgctgtattatatagcaaataattattcctggtctagagatagcgtttaagttgttaaacaacaacataataaggagaagctttttaaaaatgaagtgcaattcgcttgatttcttattgtggtgagtgctacagtatctagtctaagaaatattttcctgtgtcaagttcatgaaactatttcctatttttcctttacaaggtttctaattttaactttcacatcttaagataatttcaacatatgatggagagtggttaatattaactttttaaaacaacaaatattatttcactcaaaatcgttttacttaaaagtctttcatttccccaatgaagggcattggtgtctgtttttaaaacatttagaagcggcggtgcaagcatgttctcactcatgggtgggaactgaacaatgagaacacttggacacaggacggggaacatcacacaccagggcctgtcatggggtgagggctgggggagggatagcattaggagaaatacctaatgtaaatgacgagttaatgggtgcagcaaaccaacatggcacacgtatatatatatataatatatatacacgtgtatatatattatatatacatatatacctgtatacacgtatatataatata

SEQ ID NO: 1376 - DNA, 4001 bp, Homo sapiens
gactttctggcatctgatcctccaaaatttaaagacgaagaaagagaacctcaagggcgcatcaaggaagttgacaagatgattcaaccacaacgaagtggagtcagaactcacagcccctgaggtctgactctgaatgcggggccactttcccaagccttgcagcctctcctctaaaacactgcactggggcatgaagtagtgatttcttgtacagtcgggaaggcccctaggactatgggactgatggtttcccttttactgggtatttcaaggacaaatatgtcaaggactttaaaaatatttcatttttagatcaatattcagatatggttttaagaatcatatctgaagcataaagtgtgagacataagacaataaggccatgaaggaaatatgcccaaatactttattagtatgagaggcagcattaagatttagattcgttgtgttaatttagaaacatcagaatgaagaactaatagatagtgtttacactgtgccaattaatgttcaaggagattgacaggaaatgcctcatgtaattcattgcagcaatttacagaggtaggtattattgtagtaccctctgaacagatgaggaaactgagggacagacaagacaagcaacttggatggagcccaggagacaggctgagggtccctgctttgcacactgcactgctgcttccacacattctcgggtgtgatctttcttcctctttaggaacaagagcctgtgcaccaggaagcaggacttcactctcaccaaggtactctcttttatttttatttttgatttatttatctttttgtttgtttgttttttgacgagtcttgccctgtcacccatgctggagtgcaatagtgcaatcttggctcactgcaacatctgcctgctgggttcaaaggattcttctgcctcagcctcccgattagtggtgattacagttgccctccacgacgcccatctactttttgtatttttagtggagatggggtttctccatgttgcccaggctagtctcaaactgctgacctcgtgctctgcccgcctcagcctcccaaagtgctgagattacaggagtgagccacgttgcacggcccctactccctgctcttgatgctgtcacttataggtagcacaggttctattaggagcagactcctcttgaagcccctcagagcaggtactggctactatcaccaagttcccctcagagtcactagaacagagctttgcctcttgggcctcaacggaaatttgaactgaataaaagttcactagtcctagacatttagaacaacagactagatgttatttgtctgcaggatcttataaggtacagagaggattcttgaaaacatgattgagcctcttggagaaaacaggtcgttctgtgcctgtgttagaaatcaataactgtgagtttaactctagtcccacccccatctgattgcaaacatggaaagttgctaaatactttggtacctctgtcttccaactttaaccaaatgttaaaatacccatttctgttttcctagaagtacaggaaggatgaaattatttttgatggagagagcatttagtgtctcagagagaagacaggacatcattcatcactttcatgacggtgagcctatagatcttactgtatttcttctgtcggttggccaggaagccggccagttgagttagaaaacatctctctttgaggtttccgaactgctgtttgttctctgccaactgggggcgcaatttctcgttgatttctagaatgttcatctctgccttctcgctggaccaagggccggctgataccaccatgctgacgtttgtggcagaagaggtggggccagggactggggagaagaaacccaaacatatgatgggttaaaaactggtgaaatcaaataggtttaatcaggactgagggatgtcagtaactgaaattcttaccttactgttgtgaaaaatgtgatcactcccacagcactttaggatccttcaccacaaaaacaaggtttgaggtgcctcaactcagagctgaaagcactgccagtagctcagactctgataagagtgaggtagattgtggccagcgtgccaggtaaccgtctgcagttgcaataacagaattagaaggtgggggtgtcatggaatcttaggagccctgcattccaattgcccaggctttgctgaaacacaggcaccctagtctcacctgagggtcaccaccaatggggatcattccttcagcattcactctcagtattcgtgtacccttgtgacaatgccacagacccgtgtctttcccaatacatctaagcatattcctcactgtttatctcttgtctgtacaacatcatcaaggcagaaacagtttcccaacaggttatattttcttaatggtagtcatgaagtcataaataaaaaaatggaatcatttagtatgttctcttgttttgactttttttttttttttgagacagagtctcactctgtcgcccaggctggagtgcagtgacgcgatctaggctcactgcaagctctgcctcccaggttcacgctattctcctgcctcagactcccaagtagctgggaatacaggcgcccgccaccacgcctggctaatttttcttttctttttttttttttttttttttttttgtatttttagtagagacggggtttcactgtgttagccacgatggtctcgatctcctgacctcgtgatctgccgcctcagcctcccaaagtgctgggattacaggcgtgagccaccgcgcccggccgacttctctttactcaggtgggtatatatgccactaatttgtttgattgtgtttttcccttgtttcattttgttttggccaagtaatatcctattgattgtatgattatcacacaatttgatatccatttttctgatgggagacaggtttacttgataactactgtgcataagtaactatgaatattctcatacaattatttctgtgaagatacatacttattttcctgggtatctatagctagggatggagttgcttggtgaatgggtagaaaatgttggacagagttttgcaaagtatttgtattgttttacatttctatgaaagatgtaggccatttccagttgctctacattcccacacacttaatattttcagtcttttaaactatgccaggtgtgtagtgatatcctaaaatttggttttctcatgcctaatgttcatttagatatcttcttatggaaaatatcttctcaaatttttatattcattgatatactgggctgtttgtcaatttctttgtaataggagttctttatatattttgaatgagtccatttatacatacatattttttgctgtaatatatagcaaataattattcctggtctagagatagcgtttaagttgttaaacaacaacataataaggagaagctttttaaaaatgaagtgcaattcgcttgatttcttattgtggtgagtgctacagtatctagtctaagaaatattttcctgtgtcaagttcatgaaactatttcctatttttcctttacaaggtttctaattttaactttcacatcttaagataatttcaacatatgatggagagtggttaatattaactttttaaaacaacaaatattatttcactcaaaatcgttttacttaaaagtctttcatttccccaatgaagggcattggtgtctttgtttttaaaacatttagaagcggcggtgcgagcatgttctcactcatgggtgggaaatgaacaatgagaacacttggacacaggacggggaacatcacacaccagggcctgtcatggggtgagggctgggggagggatagcattaggagaaatacctaatgtaaatgacgagttaatgggtgcagcaaaccaacatggcacacgtatatatatataatatatatacacgtgtatatatattatatatacacatatatacatgtatacacgtatat

SEQ ID NO: 1377 - DNA, 4001 bp, Homo sapiens
aacaagcagcggctgtactccctcctcccttcaccccccacacacaacccccccttcctagcactgcagcttctgctctgctgtccccagcttgggttcctccaaaaaggctaagccccaaactagctcccattccttaacctacctactgccatcctggccttcccctaggacccctccccagccacttccagccctgctactctctccaggcccagaacaaccatccccagccctcaagtactctgcactagttactacctgctgctgttaccctatgagtcagcttccatctgctctgggacgccccagaaaacagacccaggcagcccctagtgccacagccttattcagtcccattctcctctttgcccccattctcagggggagcaaaaaagagcacaaaggtaggggtcttgggccttcgttggtgcctccagggttgctagcactacgtacatatccttggggactcactgaccccattccttgggggcccaaccacccagcccttcccacctcccaattttcagccagttccttactagcagcagggctgcaaactgctcgctgtcattcttggcctcacggagggctcccaggtagcgctccagggtggggtttcggccctctgcctggttcagagctggctcgcaatccgaggccatgatgctcgccttgcccaactgtgaacacaagagggactgagcatccctctgcagaggagggacgggggtggggtgggggtgagagtggaggatggagggagggagggattagcacagagggaggggaggagagaatctggaggggtggactcctcaggactgacctccccccagaagcccctttaaggggctggatctgcaaatccttagggataaagaagggaccctggtccaaggtcacctccagaaagcgggaaagaaggaccatgcatgctgctgctcagccggacagctctcctcaccagtctcctgggggtgggcgggagctggccccactgctcagctgtccccctggcaccggaggctgggttttatctccctccacagggacacagagggagtgagtggtgaggacagacagggagaaatggagacatacatgggtgaagttcgattatccggactcaggctgacatgggagaaaaggacaccccaggcttcctttcccctcccttcttcagaggcagagatacgcttcagaagtgagaatacaagacgctcaacagggaaggcttggaggcccctttggggaccccacccctccagccagggctctcagtcgcccccgcaggctccttgcctcctctcctttccctccctcgggtagaggctgcagcagcagcagcagcggcggcggcagcagcagaattaaccccttgcgctccctcttctcgccctccccgtcccgctaccagcctgtggatgccggcaggggctggagaagcaagagggggtcccggatagttcccaggacaacggagaatccaaaagccggataatcgaagcagggctgctgagatggggagatgagaaggggaggagggttcctggcggtcaccacctgtcccgccgcagccaggtcacaacacgacattgatgaagtcacgacagggcggcgatgagatcacacttcacgatggcgcggtgatgtcacggagagatcacgtcaaaatcacgacatgggagacagcccccaaagatgacagggcaaattaaaaaaaaaaaagatatatattgaaaagggctgtgacaaaatggagtctcgacagggcacgatggtgtcgcgatatggcgcgatggagtcgcgatagggtccccggggtgtgtcggcatcgatcagcgccggctcggagaggccccggctgggatgcaggggagggcccgaagggggctgagctcaccaggctgcggccccgagcggcgaagtcttctcccagcgcgatgctccgggagcctcgggccgctgctcacgccgcgttgcccactcctggctccaggctgctgcagctccacccccacccccgcaccgctcttgacgaatccgcggctgcttcactccgggctctggccaatggcaagtcagggtgctaagcagtagggggtgccgccgttgccgccatcttgcttgtgggtattgcccgagtctgggggctggggctcgagcgaaggaggcaaggtgcagactgcctctggagagcgggcggcgagaggctgggggcccagattccttcgcttgtgcgtagttttacccgcccagcactgcccctcctcccccttggtctcgcggccggcattgcccttcccgggggaggggcgggagggcttggttagcatggagagtgtgtttccgggtcggtcccggggaggtgggaggaggcggtgtttccggccgccgtcgctgtccagggaggctgaggcgagaggtagctgtccgggtggggagcccgcactaccttcttcctcttcctcctcctcctccgggtgaggggagcgaaggttgggggtccccgagcccatggaccaggaggaggcggaggccgccgagagccggggccccgctatgtggccctgagccccggtaggtggccgggggcggctggctgccaggccgaggaccatgggctcaggggaggggcaagcgggacgggcgatgtcagcggctgcgctggccggatgttgggtccggaggtggcgcccctggctcggccagggcagccagctgcttctgtccttgcaggtgcgcagcttgggtcccaggctgaaccccgcttctctcgggcctgggcctagtcatgcagctccctccatcccctgagagccaggcagacagccggggttcggggcgctgccgtccttcttccaccttcgacctctgcagcctagtctttagttgctgtctctgatgtttggtctctccaccgagatagaaagttggtgcagaatgaagaggggatggggttgagcacgatgtgtccattataatgtgaaacctgcctcatccacgattttgaaaattatgccccacagagggtcctgtagtggctgcagtgagcacaaaggtgaaatgaaggaagtcaaaattgataacctctggcgggattccaggaactctttggcttctggtctcatagtggttgtgtccaactgacagtagttgcagttagtgaagagcattagctgactctccttgtgctctctcctgtgattaacagactgaaaactaggaacaaattggaaagacgacctcccagaacaatctgttcatttttccagctatttggaaaacagtgtctgcaaatataagcaaagctattcatggcagtctgttctgtaactttcccaaatatctgagactttttaaaaaagagctttattctcgattactcataccaactgaatagattgtttcagacgtgctccatcgttgttcaaacatatcttatcgctgtgtacataaatggagttccacgtatgtagttgacagactgaactgtgatacatcccccatcaacctgaagtattaagtaaacattaccccctgctctgtctgaacagctgctgcaacagagagtgcttttattttgggtgtacttgtaacgccctaaatgccagaactattgtgagcttctctagattttcatttgtcaagtattgtgggggtgtgtgttctctccctgggttgttaccctttgattcagtaacaaactattcggatcttggtgatgtgttgttgttcttgcgtttggtcagcaagcctttaactggaccctagcagtgatttgtgcccttaggcaattataggtttcagaggaatgactggttaggagttcaaatgaaattaactctgcctttctcttagacgcaagatttattagacatggcacttctaatcagcttgttagtccagtggtgtttattactccatttttcaaaagctattcatttcttttctgcttctcccacccacctgtcaggctattgatgacagctgtt

SEQ ID NO: 1378 - DNA, 4001 bp, Homo sapiens
agctgccaatctcttctcctggacaatgtgcactttgtgtccatcagccctcagaatgtgtggtgctgttcactcagcccctcagcaggcccctgagaggaggtggggccatgtccttcctccagccagaggtggggggtcctgccatgctctgccttagagcctgagattgacttgtcaagctatgtgagaacatttcagtcacttctctgtcttcctgtcaggagggtgtggctgaggcttgtttacctactgttggagtgtggaagggactgattctttaagggacctggggagtcaaccactgccacaccttgcaaagactggcagtaatcggtaaaaataataactaactcttatacagtggtgtgaagttccacgagacattaatagtttggcatctcacttaattttcatgatatttagaaactcaggaagctgaaagccagatgtctacataggctacatagcttgcttaagactaaaagtccagagagagacagaggctaggattcgatcctagatcttctccttccaaactccataccctttccaccttaccacaaccaatcaaaaaaataattatcgagaatgcttaactccatactatggtatttgagtgagaaaacataacgaaaaagatgcgagacatcccacaccatgcccccagcagacatcactagtcaatcacagtacaatttcctcttgccagcctcagcatctttaaaagagtctcctttataattgatcagaattgtcacttgggataaaagctattttttgtaagtgcctcccttaaatctcttgagcaggcaaagtcgacacacatgaaagtcttggaaagccaaaagaggtgccttagaatcaataatcaggtgtaaagcgctgggatagatagagattctgtgcccagaaggagttctgtgtagaagaaagtacgactaggacagccttcacaaaggtgttaaagacacttgtagaatgattttaatttagaagatggagaaagaggcaaccctggctgcccctcacctgctctccacctggagagcttttaaaactggctgcctggggcccctcccagaccagttaaatcaggctgtctaggggtggagcttgggcaacttttgttcttttcaatctccccagaggttaggtttccgaaatgcaatggggttgagaatcataataacaaatgcacagaggaggcccggaaagaggcacctccactcaccttctctgcttcagtcatgttcttcaggatagtgtacatgcagccaatgttgaagcaaatccgggagtgggggtcctggacggcactgaaggcatccagggctcccttccagtccttcttgtccgctgccagcaccccttcattccagaggctgatggcctccaccagggacatgattaggtagaaactaggaggccaagagagctgccaggagacagagagaagacaggttggagcgtctcccctagcagggctgccttagtggcccccaaggtgttcactttctgggccagatgagtagaatggggcccagcctcccttaagataacttctcagtgttgcaaatgcatcaggaaatgtccccaccttttggcaactgactcataaccctaccatgagagagaaaaggaaagaagcagagagagagagggcgagtaggggtggagtgtggaggagagaggaagtacatcagctgctgcctgaaggatcagttccccaaaatgcttctgctctgtcacccagctcctcttctctctcccacccctgttctgtggcagcttctggccaaagttctgcttctagagccagggtaaccttggcaggtagaggcacctccctggtgataatgacaggaggcagccaaatgcctaggcagataggggcaggtccctggtgaaaccccaccttcaagccaaaaacagcctgaaggctgaaagactaggctactggtcccaaatgaaacccgtgacctagagtgagaacttctgttcctgtttgtctgctctttcccaattaattatttctgactaatgccttttaaccaattgaatgttgccttttccagtactacctatgtcctgcccctcccctattctgagcccataaaagccccagactcacccgcactggggggactttcctgcctttgggtaggggaaccacccctgcatcccctctccactgaaagctgttttcatcactcaataaaactccccacccaggccgagtgggcaggccatctcctgcagcaggtagtgtggcccactgaggcctgggcagggtgtcaccagccagaggttcctggcttacaaagtgatggagaaaaaatcctgtgtcactgggccttgatttccacacccttgttaaatgggagtgtcagatgagaggataattctttccagtcttgaatgaattccttgctcacttttttgtaatcccataggctgtattaatatgttagtgtttatcttgagctgaaattatcattaacaaatttttgagacaggataatctttggagatccatctgatctgggcctgaaataacttttttttttttttttttgagacggagtttcactcttgttgcccaggctggaatgcagtgacacgatctcagctcattgcaacctctgcctcctgggttcaagcaattctcctgcctcagcctcctgagtagctgggattacagaagcctgccaccacgccctgctaatttttgtatttttagtagagatggggtttcaccatgttggccaggctgatggtctcgaactcctgacctcaggtgattcggcctcctcggcctcccctcaaagtgctgggattacaggagtgagccaccgtgcccagccgaaataacttttatgaacattcatgaagttcagaggggaccaatttcctgcaaatgtcaaaattgggagccacatgacagtgaattatgacttctcccatcttccagtgaaaaattgaagagatgaaagtcctgcactgatgactaatggatttactagtctctgaaaaaacagatttaagagttctttccttgcttttccagaaaagtaaaaatcagtaaaacctcccagaggaataactgggggtaaagggtatagccaatttggcttgctaaaatccaggcttctttttaggtaaaatgcatgtttatgggggtcaaatacttagatgcaaactcttgttttgtagcaactgaaagaattcactcattatcaccaagcttcccctaaaagcctgaaaataaaacttaaaaatgtatactccacagtgcttgtaggattgaaggtgtgagaattaagaagacatgtgtgtctttgtccagattgttttcctgtgtttacaaggccttcccagctctcttctttgcctggcaaactcctactcatctttcaaagcccagtttaaatgtcaccaactgtgctaaatctagccctgaactctgggtagtaggagaattttcctctcctttgtaccacctttacccaaaaacttgcatcatacttactgcaatttatctctttatctgctcaattcatgggctccttggaagttgggaccatgccttttcattctaggatctctagcacagatactcaatacatgatgaagggatacattctaaaagaaattagaaatcattggtaaatgacctgcaggtagcagtgatggcagaaagaggtattgctattccatctagtgaataaataatcaggacttgaatagcacattaattattcctgagaaaaccaaatggatttgtagctaaattagacttcatttttaaaaaatgtttttgccctcctattatcccaccctgacactcagaactctccttaatctgactgccaagacttttctagccttatccccagaactttccttcacaatcccatacaaactctgctgcttactcttctcccgctatgccttcattcctgcatctgtgcgactcgtgctagttcctctttctaggc

SEQ ID NO: 1379 - DNA, 4001 bp, Homo sapiens
tgaaaataattaaaatattatataaattgttatatttgtttactatacaaacttatacatgaatagtatacaattaaaatgataatgaataagaatgcatataaatgctagtaggaagggctcaagcaggaaaacaaagaaaggcagaaggaatgagaaggctagaagcagaggaatgccaggagaaacagagacatgtgggcctgaaggcctgggagctgagaagtgagtggtggcccacacaaccttgccaaggatcccatatccaggccaaggcaggaggctacagtccctgctggcatagctgtgcccagactagctgccaatctcttctcctggacaatgtgcactttgtgtccatcagccctcagaatgtgtggtgctgttcactcagcccctcagcaggcccctgagaggaggtggggccatgtccttcctccagccagaggtggggggtcctgccatgctctgccttagagcctgagattgacttgtcaagctatgtgagaacatttcagtcacttctctgtcttcctgtcaggagggtgtggctgaggcttgtttacctactgttggagtgtggaagggactgattctttaagggacctggggagtcaaccactgccacaccttgcaaagactggcagtaatcggtaaaaataataactaactcttatacagtggtgtgaagttccacgagacattaatagtttggcatctcacttaattttcatgatatttagaaactcaggaagctgaaagccagatgtctacataggctacatagcttgcttaagactaaaagtccagagagagacagaggctaggattcgatcctagatcttctccttccaaactccataccctttccaccttaccacaaccaatcaaaaaaataattatcgagaatgcttaactccatactatggtatttgagtgagaaaacataacgaaaaagatgcgagacatcccacaccatgcccccagcagacatcactagtcaatcacagtacaatttcctcttgccagcctcagcatctttaaaagagtctcctttataattgatcagaattgtcacttgggataaaagctattttttgtaagtgcctcccttaaatctcttgagcaggcaaagtcgacacacatgaaagtcttggaaagccaaaagaggtgccttagaatcaataatcaggtgtaaagcgctgggatagatagagattctgtgcccagaaggagttctgtgtagaagaaagtacgactaggacagccttcacaaaggtgttaaagacacttgtagaatgattttaatttagaagatggagaaagaggcaaccctggctgcccctcacctgctctccacctggagagcttttaaaactggctgcctggggcccctcccagaccagttaaatcaggctgtctaggggtggagcttgggcaacttttgttcttttcaatctccccagaggttaggtttccgaaatgcaatggggttgagaatcataataacaaatgcacagaggaggcccggaaagaggcacctccactcaccttctctgcttcagtcatgttcttcaggatagtgtacatgcagccaatgttgaagcaaatccgggagtgggggtcctggacggcactgaaggcatccagggctcccttccagtccttcttgtccgctgccagcaccccttcattccagaggctgatggcctccaccagggacatgattaggtagaaactaggaggccaagagagctgccaggagacagagagaagacaggttggagcgtctcccctagcagggctgccttagtggcccccaaggtgttcactttctgggccagatgagtagaatggggcccagcctcccttaagataacttctcagtgttgcaaatgcatcaggaaatgtccccaccttttggcaactgactcataaccctaccatgagagagaaaaggaaagaagcagagagagagagggcgagtaggggtggagtgtggaggagagaggaagtacatcagctgctgcctgaaggatcagttccccaaaatgcttctgctctgtcacccagctcctcttctctctcccacccctgttctgtggcagcttctggccaaagttctgcttctagagccagggtaaccttggcaggtagaggcacctccctggtgataatgacaggaggcagccaaatgcctaggcagataggggcaggtccctggtgaaaccccaccttcaagccaaaaacagcctgaaggctgaaagactaggctactggtcccaaatgaaacccgtgacctagagtgagaacttctgttcctgtttgtctgctctttcccaattaattatttctgactaatgccttttaaccaattgaatgttgccttttccagtactacctatgtcctgcccctcccctattctgagcccataaaagccccagactcacccgcactggggggactttcctgcctttgggtaggggaaccacccctgcatcccctctccactgaaagctgttttcatcactcaataaaactccccacccaggccgagtgggcaggccatctcctgcagcaggtagtgtggcccactgaggcctgggcagggtgtcaccagccagaggttcctggcttacaaagtgatggagaaaaaatcctgtgtcactgggccttgatttccacacccttgttaaatgggagtgtcagatgagaggataattctttccagtcttgaatgaattccttgctcacttttttgtaatcccataggctgtattaatatgttagtgtttatcttgagctgaaattatcattaacaaatttttgagacaggataatctttggagatccatctgatctgggcctgaaataacttttttttttttttttttgagacggagtttcactcttgttgcccaggctggaatgcagtgacacgatctcagctcattgcaacctctgcctcctgggttcaagcaattctcctgcctcagcctcctgagtagctgggattacagaagcctgccaccacgccctgctaatttttgtatttttagtagagatggggtttcaccatgttggccaggctgatggtctcgaactcctgacctcaggtgattcggcctcctcggcctcccctcaaagtgctgggattacaggagtgagccaccgtgcccagccgaaataacttttatgaacattcatgaagttcagaggggaccaatttcctgcaaatgtcaaaattgggagccacatgacagtgaattatgacttctcccatcttccagtgaaaaattgaagagatgaaagtcctgcactgatgactaatggatttactagtctctgaaaaaacagatttaagagttctttccttgcttttccagaaaagtaaaaatcagtaaaacctcccagaggaataactgggggtaaagggtatagccaatttggcttgctaaaatccaggcttctttttaggtaaaatgcatgtttatgggggtcaaatacttagatgcaaactcttgttttgtagcaactgaaagaattcactcattatcaccaagcttcccctaaaagcctgaaaataaaacttaaaaatgtatactccacagtgcttgtaggattgaaggtgtgagaattaagaagacatgtgtgtctttgtccagattgttttcctgtgtttacaaggccttcccagctctcttctttgcctggcaaactcctactcatctttcaaagcccagtttaaatgtcaccaactgtgctaaatctagccctgaactctgggtagtaggagaattttcctctcctttgtaccacctttacccaaaaacttgcatcatacttactgcaatttatctctttatctgctcaattcatgggctccttggaagttgggaccatgccttttcattctaggatctctagcacagatactcaatacatgatgaagggatacattctaaaagaaattagaaatcattggtaaatgacctgcagg

SEQ ID NO: 1380 - DNA, 4001 bp, Homo sapiens
cccactgcagctgcctgccaggacgtcacaaaactgaaactagctttgcttagagtggctctacctcaaggacacagctccttcctgacttcaggcaggaatggccatagtccacatggtgctacggagcccaggaactggcccaggggataagctgttgataggaaaccactacactagattcccacagagcccagccagttcctcaagcccagctcactatatgcccagctcaccgcacgcgccgcggctggctggcttggcaccatgctgcctccccacagctcatctcggccccagccagcacagagcccagcagggacaaggtgaagaaagccacaggccatgaaggggtcatgggaacccccttcccatttcctcctcccctcccaccaggcattcatggtcctttggtgtctcttggctgcccttctgtcccctctccccacttagaggacatgagtaaaggtattggcctacctagagttcctgccccatcatccactcccacgggctgatgggactcaggattccagggtattatgtgccctcttctatcccggtgctctggctgtgcctgtcactttctactaccaccaccaacacacacacgcacacacacgcacacacgtgcacacacccacatgcacacacatgcacacaagcgcacacacacacacatgcacacatacacacatgcaccataagagggggtgcctataatctgttgctcttggcttctgcttataactgttccatccacctagaccactgtctctagtatccatacccacctcttagaaccagccatctgtaaattcactatttgtgccaagcattgtacttcatatgcattcattcattcattggacaaatatgtattgagacctactgcatgctgggcaccgtgctggtgctggggatacaagggtgaaccaaataggcatcatccctgcccccaagcagctgctagcagacattaatagctcatgttcattgagtgcctactatatacccaccctgtattaaacactttatgagttatctgatttaatctgtcagagaaattgtttcatttaaggagcacatcaaactgaaacatagagaaaagtgtggacttgcccgagactgttggacggccttggctgaggggtaaagcagggactccaaagcgctgccctaaccaccacctttcctttccctgccccactcagatgccacctcctccaaggggccttccagaatcttctcccagactcaagggctgccttggtctctctaatccagccttcatatttgacacagccatctcctcccacaaggatacccagaggactggagccgtctctgcatccttcctcaggagcgctgctggatgagcgacccccgagcccctccaaacgtgctgtggatggaaactacggccctgggctccttctctgccgtgggttttcatctcgctgaatcgcagatcttccggaggggcctctgcatagggcagacccatcaaggcgcccatttaacagatggggcggataaggccccaagtgggtaaaagttcctttatctccaggccgggtcaaggtcgactcccttttcttccagcgagcctcggcccctccgccagatgcttgggtggggaggggacaaggaaacgacctcgtctccaagacccactggagatgatcagcctccctcccaccaccccggaccaacgccctcccgcgcagaccccaggcacttcctccaacagatgtgggggtgagactggggacccctcgtccccacccccgggccctccttcgcccagcgcggccggcaggtggacaggaagccaccgcacctgggccggaccgctcctcgctccccgcagccccgggcaaccccggcgaccaggcgcctcctacctgctctgtcgagccccgctcggcctcccgccggcaccgccgcgctcccagccagggtccccgccgccgcccggcgctgccaccctgggatcccgcccccgcccggggcgtcccgcccccggccccgccccgtgcaggtgatcctggggaggccggagaacgcgccgggggtgccagggtcccgcacactggagtggcggcgcctccccgtggtgtccccgctcctgggtcctttttgggactggctctggcactcccgggcactcagtccagtagagaagtccagcaggaggcttccaggtcggactcctccgcggggtaaagagagggaaagggcctcacaaacacacccaggtgagctccaggcactttgagtagggtctttaaaggagcacggcgctaatctgattgaaggttttgaggggcagctggagattcagacaaccacagaacgttagaccgggaggaaacaggcttggcagccggcaagtgtcaagaactcttgccgctgtaggatcaaaggctccttcctccccaggctgtcgagattccagctgtatcccaggagcccagggcgatatccctggcaggcagcgggtactcaatcaatatttatagaaagcgggaagagatctcggagaggggatctcttctctcagaaacagggaagctgaggcccaggaagcaaaggtgagcacaaagtcttatagcaggttagtaacagtatcaggagtggaggctggtttcccggttctattttcaattgatttccagaaagtgattgcatctgggccgactgccttgccgctcagtgcctgtgagatgctttcaaactctcctcagctaagaactaagatttttataggaagaaaacacgtatttttataggaaactccaaggtagtatttatttatttatttatctttgagacaggatctcactctgcagcccaggctggagtgtggtggcacaatctcggcttactgcaacctctgcctcctggttcaagcgattctcttggcttagcctcccgagtagctgggattacaggcacatgccaccacacccggctaatttttttgtgtgtgtatgtatatatatattttggtagggacagggtttcaccatgttggccaggatggtcttcaactcttgacctcaagtgatccaccagccttggcctctcaaagtgctggatgagccactgctcccaacccattttattttatggagactgggtcttgctctcctgccccagctggagtgcagtggcgggatttcggctcactgcagcctctaactcctgggctctagcgatcctcccaccttggcctcccaaagtactggaattacaggcatgagccaccatgcccagctgcaaggtggtattaacaaatattgattgagagtataatcctgtaattctactttctcatcaaagacttgagacacttgagtatggtctttaaggagcatggtgctaatccatggcttcaagagcttccctgttgtgggggaggcagacctggttacagggagaggccacaatgtggggagaggagtccagtgggagcctgctctggccctgaggcctgagttccacagtaaatggcactggggggggccacttcaggatgcttctggaagtttttccaggtttgtttgtgggggcaagagcccccagtgcatggtctcaggttcaaatcctggctccactgcttactattcgcaagatgggagtagtttctgagactgtttctttctgtaaaatgaagagaagatacttcagtatagttgcggtgaggattagaaatgagatcacacttgtgaagtgccaggtaagtgggagaatgattatgccaagtggcaggagctgggaagggggactttgatgtcttaggtccttctctgtggggtttggtagtcttcagccttctgttatctatggctcaagcccaccttctgctttgtcccttaatccaggctggctaagccacaggacacctgccctgtcagaatgagtttgtgcacaccgacagtaaggggtttgggaagggagctcttccttgcaccagccctcccataaccagggtc

SEQ ID NO: 1381 - DNA, 4001 bp, Homo sapiens
tcaccgtgagccgagatcgtgccattgcactccagcctgggggacaagagtgaaactccgtgtcaaaaaaaaaaggtctctcagcttagtgctcgggccaccagatcctggcatcatcacttattaccagtatgatcttgggaaagttactcaacttctttaagttttagtttcatcatttataaagtgacaataacagtaagacctattttgtggggttgtggttggggttgtatgagatgcacatgtaaaaagcttggtatgcagcatttactaaatgttagttcttattaattatcttgcctagcttgacagacggttatctgtaactgcctacatacagtccaatataagtgtcaaatctcctaagcaggacatggatgttacttagtatctagggcacagacaaatatcaatgtccacaaacatgaatccatctcaactcacactggcagccaatctgatgagtggcgttgagcaggcgaacacagggagctgttttatttaaggggatatatatcttcctctccactgagtttcccctgcacaaacctgatcggaagataaaaagtgttagaaaaatttgagagacacaggtactagcttctatcgtgtcattaacctgaagtatggcttgggtaaatcatttaatatcatactttctaaaatgagattaaagtccattcttctgatttcttgggcacacacttatcgtaacagatacatgttctacatggcacccagctatgtgcctcaaagggttattacaaagtccatgtagcgccattgacagtgacactaaaagagagaaaacttggtcaaaggaaaggtgtttgaccttagatttgccagattctggttgcacaggtgatcacacttctgcttgtatatcctgtatgtatattactaattggttaatacacaggtgctgggctaagaaaactttctgaggcatttttccaagagtgtgaacagaattgagagaaaccttatgacatacacgggtcagttaatttaacatcagcaggtcatttgtgtgcccacagtgtggggcagctgtagtttctcctttgaggatccttaaaaacaatgtgaattgggggaaggcacagtcatagttatatacaggcatttgcattttagggcttgaccaactaaaaagccatgtatcagtaaatgaacgcgtatcagcaaacacttaagtacattataaatgccaaaagttccttgaattgttacttcagggtcttcacagttaagagtacccatatcctaccttattcttgctttactgattaaaaaaaaaaaaaaaaaaaaaacctgaggcaaggcagggggacacagacttaggatgtaatcaacagaggaagaaataagaaatccaccttttaagcgccgcacagcacccacagaacaagattgctttcgtctcaaaaagtctaaacgcgaggaagaaagctaactttcacacctgttcctttcgactgtggggtgggtggctggggttgtgggaaaaacgagacatctggacaaagtgggagagggtcaggctcgaagtccaggaagaggcctagagaagggagtgaagcgacacgacgtgctgcgggggagaagggaccttcaggtccaggcaaagggggaacttctgtcgtgggaacgaaaaagaaagaggatttacagggtggggggacagaggggcagcaggaaccagaagggagacagtggcggtcgcggcggggccgatccgagagttccccttagagaacggagctcacgggcggggaggcctcacctgctagtaggacgcagaaagacagaaggcgaaggagaccccgacttcccgggtcagccccagagccaccccctgccgtagccatcttgcctctctgctgagcggaagcccccgttcggctcctgtctgttagcggcctctctaggctaccactgacaccgtctctgtggcccggagcctaagagaccggaagttcgtgtttccaggcgcttccggaaaccgcgggagagggtcgctgacgtggaggcgtccgaagggcagcagggtgtgtcggggctcggattaagacatcggagtcggagacctgagagatgttaaccaaattcgagaccaagagcgcgcgggtcaaaggtagtggagaataaaagggggaacatggaggttggatgtcaggagcggcgctgacaccggggaagagaaaatgggtagaggtgttggtcgaaatgggcccaccagacggacccggaggaagacggagggtgggagagaggttgggcctggctagcggttctccagtcccctcttctttggtgtgtccttgggcttcgatttacctataaagtggctcccacactgcaggggattccttagaccccctccctattctttcttccccctttctctcttggctgtgctcccgatttgtgttgttctgctccaaaggccctgtgatctgttggctttttgatgactgtgttatatggagtggccctgggaactgagtctcgatctctgttactcgcacccgagtcagtagcctttttggagacgagtagtggcaacctcacttaaggaggccttggctgcagcatctcaacatcagtgcctccattcggctttatttactacccggaaatagtacttgaggcttataaccccaataaagtctcaacttgatagagttgccagataaaatgcaggatacccagttaaatttgaatttcaggtaaacaatgaatagttttttagtctgtcgttgcttaccagaagttcaaatttatctggaaatctcgtatttttatttgctaagtacggcagctctagagctcgagtgtgggtcgttgggggtggagggcaaatactgagatcgcagtattagcctcagaacgttagaatgtgaaagtcagagaagtaaggtctccgaagacctggaaaaaatagtatctagaatatttagtgagatgcagcgtaacaaagtggttaggaacttggtctttgaagtcagatgggcttgccttggaatcctgagacatccactaacaagctgtgacttggatgacttacttaatgtctctaagtctgtatttcctcatctgtaaaatcgtcttttatagagagtattaaaatgagaaagtatatggagtgtatttattacagcgcctggtgtagactcagtagctcaaaaactggaggttgttatcaatgtgtgaatatattctgagcagtttctaagtctcttgggaaacttgaccttgaaagatgggtaccattaagaatttctgagacctgtataggtgaaatgtgaaatgggtcttcataatctttcagttttcttttctgctcctaatttcttgctgggcagtacagaaggaaaaacaaagatgtcataatatttgagggcaaacatccattgttgagtgtacttatatatcataattaaaaaaaagaacctaatggaaaaatagacaatttagaagaaaaattgtaaatgttcaataaataattaaaatagttccacctcactagtaatgaaagaaatgcaagaaaaaaaaagttaagttacttttttggggggagggtcttagatttataaaacaaaacaacaaatagctgatagcagcctgtgtgcaaaatgggcacctccataaacttcatgagactgtatattgatacagtgtttttacatttaaactatatgtactaaaatgttaagtgcacatattctattcctgagcaatctcacaggtctttagcctagggcagtaataatgcaaataggctagattatgtgtagaagtatcttcagtaggctcttctgatagccaaaaattggcggacaaaatgcctgttagaataatataagtgtagtacatttgtcccttgtagttaaaaagaatgaggttatgtttatatgtacttccatgagatccatattatatagttaagtgaggaagaagtttgcagaacaacatcataacgtgatccccac

SEQ ID NO: 1382 - DNA, 4001 bp, Homo sapiens
cagtgccatctcagctcactgcaacctcctcctcccgggttcaagtgattctcctgcctcagccacctgagtagctggggttacaggtgcccgccaccacacctgactaatttttttttcagtagagatggggtctcgaactcctgaccccaagtgatcctcccacctcagcctcccaaagtgttaagattacaggcgtgagccacagcgcccagcctcctatcccacattctatacaaaaattaactcaaaatggattaaagacctacatgtaagagctaaaactataaaactcttggaagaaaacataggagtaaaccttcatgatcttggatttggcaatggtttcttagatatgacaccaaaagcataagcaacaaaagaaaaatatagataaattggacatcagcaatatttaaaacttttttgcttcagaagacactgtcagccaagtgcggtggctcacaagtgccaaaggtggcaacaacccaaatacccacatactgatgaatggataaacaaaatatgtggtatgtccatacagtggattattcagccacaaaaaggaatgaagtactcatgcatgctaaacatacaccaggcacgatggcatgcacctgatgtcccaaatagttaggcggctgaggcaggaggactagttgagcccaggagctcaagaccaggctggagaagatatcgtatctctattataaaaataatttttaaaaaaattttagaggccaggcacggtggctcacgcctgtaatctcagcactttgggagaccgaggcggatgactcacttgaggtcaggagttcaagaccggcctgaccaacatggtgaaaccccatctctactaaaaatacaaaaattagctgggcgtagtggtgcgtatctataatccccgctcctcgggaagctgaggcagaactccttgaaccctggaggcgggggttgcagtgagccgacaacgcgccattgcactgcagcctgggcaacagggagcgagcctccggctcaaaaaaaaaaaaagataagacttacggacccaaaagtttttagtttggaatacaggggagatggcagtgcactgggatagaagcacttttccaaaagggatctttctcctctttctctttgcactccagagaagcgatgtagtactgttaattccgtaactttaaggaggaagtactattccactcagctcagtcccattctaccttacaaagaacacctgccctgcttactggaccctaaccccagcctctactaatgccacatttctttccaattccgtgcattccttcccacttcttaacgaaacaaattaagttatttattttgcacctactggatacggtacccttgcgtaaaactccgcctcactccctattccaatttccattcagtccatccgtcccactctgaccagcttccttccactcaggacccctctcctaccccgtaaccaacttccactcaggacttcccacaaccctgcaatcagtcccccaagtggtgccttccccacgcgttctctccacgctgccccgggaccggccctcccccgcccagcgcgcacgcgcgatcagagcttgcccgcccggcccgaccctggcagtgcgtgccacagtgcacgccgcactcacgcgccacagtatgtcccgcgacctgccggcgcagggccggctcacggccgtggccatggagatggcggcccctagtctagggcgtacaggagaccgtgcgcccgcccgccaccgcagttcaaaggcaggaaggccccaggaggaccctgctgggtctgcctcaaacgctgcctgagcgaagcccggcccaggctccaacccatccctgcgaggcttcgtctggacaagctcaacaggccaggactgccgcgcagacacgtcccgcaaacgcggctgtaactccaggaaccgccctctggcgaccaaacggtcccttcgaagcagggtccagcggggcgccagaagcaggtggcggcgctgcatgctgggaactgtagtctcgacggccccctgagaggaagtaggaggaatgttgcattctgggactcggagttccaaagtacagaatgctgggagtcaaggtcttcctggaggtgccttgaggcatgctgggaatagtagtcttttataaagccgataacagccacagtattgattgactggaattcttcagttagagctagcaaaatgatctgccctcatttctccctattactttataagtcacctaaaagtgaaaccaaaggatgtggtggtcttctccacaataggtacgcagtaattttactgaaataaaaaaaaaattctctagagatgcctttggtttcataaaatctggtttctacttccagatctgccacttgctaaattgaatatttttatcttctctgagcctccatttcttcaacagtaagataaggatgaaaataaaaatatcctggtgatgttgtgaggatgtaaataatatgctatacaaatgttatcattaatatactgccagtaagaaaaaaggtgtttcaccaacccaagtttcacctaatgaagtcttctcagtgctttagacctcagtgagatctctggatgcatatcgctaacgcctttttatgctcaatcacatgccacagtcaacatgcaatactcaagacagaaatagattcagtgatttactgactaaggaaatgcataggctggtgagaggaattgagatcacacctactgctctgcaacgtttgctaacaatggcttcctgaatgctttaagattatatcctattcacttccaaaatcatgttactatcaatcatgtctaaagcactgtaggacaaactgggaatacaactgatagatcaagtctctgccgtgaagagatctatccggtggtggagaaaacttgtaaagaattagtccaggccaggcacagtggctcacacctgtaatcccagcactttgggaggccaaggcaggaggatcacaagccaggagtttgagaccagcctgggcaacatagtgagacctcatctccacaaaaacaacaacaacaacaacaacaaacttttttttaaattagccgggtgtagtggtgcacacctgtagtccaagctactccatagactgaggcaggagaattgcttgaacctgggaggttcaggctgaagtgagcagtgatggcgccatcacactccagactgggccatagagtgagaccctgtccaaaaaaaaaaaaaatcagtccaaatgcgtgttcataaagacacctcaggttctaaggttcttgtggtagagactactcgttgtctgcctcaatatctattctccccttctttcataataattgaactcccagttttttaactgggcatatagttatatttcccagcctcttttgcagctaggtatggccagctgactgagttcaggccaataaaatataatcaaagtattgcatggtagcttcctagaaacccccttaaaagggagctactgcatgatggtctttgcctcttcttaatcccatcctccattcagctgcctggatttgggatgtgttggctgcagctctagcaccatactggaccacagaaagggggtcacactgtagggaaaatgaagtactgagcctaaaggagacttgattatttatggcaaccatatcagttctaggctacctgcctttacctcctaatttcatttacacaagagagacaattatttattgtttaagccacatctatttttttttttttttgagacagagtctcactcctttgcccaggctggagtgcagtggcatgatctcagctcactgcaacctccgcctctcgggttcaagtgattctcctgcctcagcctcttgagtagctgggattacaggcgcatactaccatgctggctaatttttgtattttttagtagagacggggttttgccatgttggccaggctggtctcaaactcctgacctcaggtgatct

SEQ ID NO: 1383 - DNA, 4001 bp, Homo sapiens
aggcagacagaccaggaagcagagatggtggaattcttcactgcagagaaagaggggaaagccagacttctggcctgggaattgacctaatgggaactgtaccaaagggtggggccagatccttagctgtgggaactgaccaggacctgggctagacaaggcagctgccacagagccagggcagaggtttggtccctctgttgtcctcattccttgctctttccctgggccttctttctattgttgaaacacagcaaatgtggccatggtggtgggggatgggaaggactgcatttatttgccttgatccagcctgggagaagtcaggatagactttgggctgcttggccctggaggcagcttgagctgggactggggtggggggctcctgaggggctgcctaggacactgcagcttttgtgccttctccctgctgccaacacccccacacacactgctgcagccactctaaagccctttgtctttcattgcttagtcaccccctttgtcctcatctcaaataggggagtggaaaggggcagtagagttctctggtgatagctcctcttgcccctgccccttctggtctcccaccctttgtccgactcctctagtcccagccccgttggcttagaaccagggtcaggcaagtggtgggtcaagaggtgggtctggcagtcacaagggggtgggtgatccaggaagtgataggcaccagggcaggtattaccgacctgagcaggaagggagggggaaaggaagtattctgacggatatgatatgcgggggacaggaggtgacaaagcagagtgaataggggaatagaggcaagaggaggtggtccacttctgggaaaggaaagagactgctgactgcactctccttcctggggatttcctggggaaacaagcagccagaggatggggtgagcagaaattgcccctacttctgaacccttccttgccttgagagttcatacccaagacctcttttccgagttccctcctatccaaagccaaaggaataatttgcttcctttccctaacaccacctcttcctccccagccactttccccaccccaggcaatggatttctcccagtaccctaatttccctatatgcacaatgctgtctccaccctctccctgccccagggagaattaaaaagaaaagatgactagatattccaggaaccactgggttctcagagcaaggtggggtggatggtgggagccaggtggggattctcccagattgatactgggtgaatctgggttcctgagagcaagtcttgcctatgctgggggctggctgacttgaggctgggggagggtttagggcagttgggagtgggtaggagcagggccaaaagcctgggggaagctactgggagctgggccagggaaatggggagtcaggaagtggggagggggaaccctggggggaaatggaggcggaatggctgttctgggctttggagggggtgggtagtggtaactcaggaagggggatcctgagggagagaagggacgttagaaaagaggaggtgccaccctggatccgccttctataaaaggaaaagtcgttaacccctcctgccttgtcatctgccgcctctgttatgttcattccaagcaggatcatcctacctttgggcagtcaactccctgatcactgtctccttgcctcccccaatgttctgccttttttactcttcccagctgctcagttctatcctgagccatgtcaagctacctcttttatttgttcttccctcttgatgcctccttacctgttccctaccctcttttctcaggcagctcactcagtcccctcagccctggaaaccagccactagggccaaagggcagcatgagggagccttgagaaaagagaagccatggtaggttagactataagagcaggaattctcccaggaccgtgatcctatctgtgcatgccggccaggccctttccctcactctctgcctctcctggggctctgtcccaccaaaaagggaaagagacagctgagggctgattgtggggtttgggaaaaggctatgtcatcagctggcccagtgcctattatccattcggctgctagagattcccctcccctgggcaagtcccatttttttgggaagcgatgatacacccatctgagtcccaccgacagagctcagctgagtggcttagagatcagccaatcaatcgcagaggctcaccatgcttaaaagagctggcgcggagagaggctggggagaacccacagggagacccacagacacatatgcacgagagagacagaggaggaaagagacagagacaaaggcacagcggaagaaggcagagacagggcaggcacagaagcggcccagacagagtcctacagagggagaggccagagaagctgcagaagacacaggcagggagagacaaagatccaggaaaggagggctcaggaggagagtttggagaagccagacccctgggcacctctcccaagcccaaggactaagttttctccatttcctttaacggtcctcagcccttctgaaaactttgcctctgaccttggcaggagtccaagcccccaggctacagagaggagctttccaaagctagggtgtggaggacttggtgccctagacggcctcagtccctcccagctgcagtaccagtgccatgtcccagacaggctcgcatcccgggaggggcttggcagggcgctggctgtggggagcccaaccctgcctcctgctccccattgtgccgctctcctggctggtgtggctgcttctgctactgctggcctctctcctgccctcagcccggctggccagccccctcccccgggaggaggagatcgtgtttccagagaagctcaacggcagcgtcctgcctggctcgggcgcccctgccaggctgttgtgccgcttgcaggcctttggggagacgctgctactagagctggagcaggactccggtgtgcaggtcgaggggctgacagtgcagtacctgggccaggcgcctgagctgctgggtggagcagagcctggcacctacctgactggcaccatcaatggagatccggagtcggtggcatctctgcactgggatgggggagccctgttaggcgtgttacaatatcggggggctgaactccacctccagcccctggagggaggcacccctaactctgctgggggacctggggctcacatcctacgccggaagagtcctgccagcggtcaaggtcccatgtgcaacgtcaaggctcctcttggaagccccagccccagaccccgaagagccaaggtaggcatctctggagtctgtgtcctgcggtgtcctcccgccatgtctgtcctactgacccctattcaccctctctccacccacttacacttctggccgttctgcttccctcccttctgcctgcctttcctttctccatgagcctcctttcttggtaaggctcaggcctctccccttcacccttctcctagccagacccaccgagggttctcagaggtgggtcacagactctgggctgggaataactgctccctctccccaccccaccccttcctggccatggcatctcctactgacacagtccccagcagtaaaggtctcctaacagccccttggccttggctcttttctctgctccaaatttgattttcatcccccactcccagctataggagtcaggtttgaggccctagggcttggtgtctggcttctgatgctgcctttaaaatcactgtggcaaactgcaaactagggcaggagtggcaagagagggagggtatcccatacctccttctggtcaatccccttcacacactgtggccggactgcgaggctgcctgaggctccatcctttcctccctcccactcctggtctcccccttcttcccttccctcctccctcctccctctctagctttaatccagaccagacgctccctccacaaccgccacgctgagct

SEQ ID NO: 1384 - DNA, 4001 bp, Homo sapiens
gaacctgaaatatattgaacatgggaaaagctggcattaatatttaaattggtagggacttttgggtatttactgggacccattctttattttcttctgcaacatccttcctttccttctctacttcacaaatacctgttgttatcactattatgtctgttgaatttcgtggtgaaagaagcaaacaggataggggctaaaatttgcctaagacagagagctcaagagcacttagaaatcagctggaggccaggcatggtggctcaagcctgtatctcagcactttcggaggctgagttgggaggattacctgaggccaggagtttgaaaccagcctggtcaacatagcaagactctgtctctacaaaaggaaaattttcaaaattagccagttgtggtggcacaggcctgttgttgcggctttctggggaggctgagacagaaggttgccttgagcccagaagttcaaggctacagtgagccactttcgcaccactgcactccagccagggagacagagggaaaccctgtctcaaaaaaagaaaaggaaatcagctgggggcagggatgggtgtgggttgggacagcaactctggtcactcaccattccaaggtggaggcttccagtgggctgtttctttgcttgggtacataacagctcccccaaactgctgtgcccattccacatctggctgccactgccgaacacctctggggagtcaaagacagatcctagacaaagggcctgaacagtgtttggttcctgtgttcccattcactctcaaggggacccaggaaggatgacctgtttttttgttttgttttgttttttgttttttttgagactgggtttcactcttgttgcccatactggagggcaatggtgtgatttcgactcactgaaacctccgcctcccgggttcaagtgattctcctgcttcagcctcccaagtagctgagattacaggcatgcgccaccaaacccggctaattttgtatttttttaaagacgggggtttctccattttggtcaggatggtctcgaactcccgacctcagatgatctgcccgcctaggcctcccaaagtgctgggattacaggtgtgagccaccgcgcccagccaatgtcctggattttttaatgccaagtcactgatctgaagttaatgtagcttcggcaaaacaagctggaactctagaggttccattcctactaacaaattattcctggaataactccacccatcacccctgggcatgcaaggttgggatcctagcttcttcatattttcatcatattgatattatcaaccaggtgaatatgaacgtgagaaaagtgtttgttcaaggtcaacgacagagagacagcgagcattctggctctttggctgagctctactcaggtatgacaggagaggtgcattcaaattactgaagctaaaaagcagagtctcccactccgctgatttcacctcggcacgaacgaactctagaccctctcccctccctcgccagagtgggcgccactgcatcccgtagcccaagaaatcagggatggacaatggggtcacaggcttgggttattattttctgggggagtaaagcgtccccaacctgagaaaccctagccttggagaaagtgtgtcgagagctgccctcgatctcacctgctgggctgaatcggcaatcggactccagccccaggccgcagcacctgggccgcgacgccccggaagccgcacaaagccctcagcgccgccatcttactccggctgcagactgcgggaaggagaaccgggcggaagtaactccagcgcgcctccttcttggcttctcacctattcgcacagtgaagccgccctcttggaagctggcagggtcgtttaccgtcgaactgacaacatccgggtcctgtgactcggcttcacttgcgtttagataacagtgaccgcggtcatctttactgagggcgtttcctcccacagctcctggctggcttttctaggagcgagcaagggaaaattgccgttcctgcgtggggcagatacttcgtgctctctcgccgagcccgcctgcgtatcttggaaacgcgcggcgcttccttccctactcccttccgccttggccgccctcatgctttagtcctgctctcggattgtatctgagccctgcccttatagggtagccccaggctttgccaattactttcccatcactgaatccaaaagacaggagttgggaaagccagctaatttccagatgtcataaattgagattggagaaaggagcctaagtggggctgggcgggtctgagagctcccgccaaaccaaaacaaaaaagaataggatgccaaggccgccggcattggtggtgcggaggggagtgtcggggtgtgtaggagccacctcatcccagatgggggagtggaggtcctctgtgggtgaccctgacatcctccaggcttcccgaacctacagaatcacagacccaggaagcgcccttagagatgcctcacaccccacttccgtcttgcgtcagcctcttttccctaacgtctttctgaccctgctatagccctcctgggtaatggccaacagcacggaaatgtagtagcaccaggagtctgatcacaattctgtatggacaaagattcttccagccttagaggctagttcctgttttctccctctgcctctaagcccaactccagctgggccacccacccgtagagtttgtacaactctccaactctgagcctggaaagaggccttccccagatatcccctagacaggatcccagggacacagcccaccagcagcgcagcagggtgaggcagacagaccaggaagcagagatggtggaattcttcactgcagagaaagaggggaaagccagacttctggcctgggaattgacctaatgggaactgtaccaaagggtggggccagatccttagctgtgggaactgaccaggacctgggctagacaaggcagctgccacagagccagggcagaggtttggtccctctgttgtcctcattccttgctctttccctgggccttctttctattgttgaaacacagcaaatgtggccatggtggtgggggatgggaaggactgcatttatttgccttgatccagcctgggagaagtcaggatagactttgggctgcttggccctggaggcagcttgagctgggactggggtggggggctcctgaggggctgcctaggacactgcagcttttgtgccttctccctgctgccaacacccccacacacactgctgcagccactctaaagccctttgtctttcattgcttagtcaccccctttgtcctcatctcaaataggggagtggaaaggggcagtagagttctctggtgatagctcctcttgcccctgccccttctggtctcccaccctttgtccgactcctctagtcccagccccgttggcttagaaccagggtcaggcaagtggtgggtcaagaggtgggtctggcagtcacaagggggtgggtgatccaggaagtgataggcaccagggcaggtattaccgacctgagcaggaagggagggggaaaggaagtattctgacggatatgatatgcgggggacaggaggtgacaaagcagagtgaataggggaatagaggcaagaggaggtggtccacttctgggaaaggaaagagactgctgactgcactctccttcctggggatttcctggggaaacaagcagccagaggatggggtgagcagaaattgcccctacttctgaacccttccttgccttgagagttcatacccaagacctcttttccgagttccctcctatccaaagccaaaggaataatttgcttcctttccctaacaccacctcttcctccccagccactttccccaccccaggcaatggatttctcccagtaccctaatttccctatatgcacaatgctgtctccaccctctccctgccccagggagaattaaaaaga

SEQ ID NO: 1385 - DNA, 4001 bp, Homo sapiens
cacgcccagctaatttttgtatttttagtagagatggggtttcagcatgttggcgaggctggtcttgaactcctgacctcaggtgatccgcccgccttggcctcccaaagtgctgggattacaggtgtgagccactgcacctggcctaaattttttttttaaatcagccacttgtgggccaggcgcggtggctcatgcctgtaatcccagaactttgggaggccaaggcgggtggattacctgaggtcaggagttcaagaccagcctggccaatatggtgaaatcccgtctctactaaaaatacaaaaaaattagctgggcgtgttggcacatgcctgtaatcccaactattcgggaggctgagacaggagaactgcttgaactggggagacagaggttgcaataagccaagatccgccattgtactccagcctgggcgacagagcgagactctgtctcaaaaaaaaaaaaaaaaaaaaaagaagaagaagaaaaaaagaatttggatcctttggtcaggttctctgtctcaaaaaaaaaaaaaaaaaaaaaaaaaggcacttgtggtggtatgtgcgcctgtagtcccagctactcctaaggctgaggcaggagactgaggccaggagttcaaggcttcagtgagctatgacctggccactgcactccatcctgggcaacaaagcgagatcctgtctcaaaaaaaaaaaaaaaccagagcgaaagaaatgggttaagacttactttgtagactattacagacagtagggaaaaaaatttacatgcaaatacataataatgttaaatgtaaaaacacacacacaaaaacaaaccctgactgcctaaaatgactgaaaggaagcgcgcgcacacccacaaatatcaatataaatgtgtactcatggtagatttaaaggtgaatttagttgggcgcagtggctcacgcctgtaattccagcaccttgggaggccgaggcgggcggatcacctgaggccgcgagttcaagaccagcctgaccaacatggcgaaaccctctctctactaaaaaaatacaaaattagccgggcgtgggggcgcatgcctgtaatcccagctactcgggagtctcagggaggagaatcgcttgaatccgggaggcagaggctgcagtgagccgagatcgcgccactctgcactccagcctgggcaacaagagcgaaactccatctcaacaaaaaggtgaatttaacttcttaagttccttcccatccctcagtcatcatttactgagtagttacgttccaggcactcagatgcgggggaaagcagctccaacgtaagcaccagagacacacactcggaattgcgaatacactgcaaggaacacgagtgggtaagagctcgaaggaggaagcacgaactctgcccggagacttgaaaatgcctttaacatggcttgcgagttcgccaagtgaagatcagtgggcagagtgttccagttgggcaacagcccggagttacagccggaagtgctggctatgtttgggggacaatggagcgcagcgtgcatgacggtgaaaagaatgaaatgagctcaggaggccggcggggccgaaatcacgcagagcctggaaagctgggataaggatcgtagactttaggttaagaaacagaaagccaaaacattagtccggcaaaaacctaaacaaatgtggaaagtggagagagcggcaatctccaggcttcggtgccattagctgtggaggtgaagcggcctgggagggcagggaacacgccctgagttcaggtctgggagaaggggacacacagcaagccaagaggaaatctgttaaagagacctcggaaggaaggtccttaagctaagctgccgcgcggacataagcagcccctacctacccgatgctcgtgcccttgactcttctctggccgccgcttcagaacgactagctagcgacgcggacgcctgccgtaaaggatgacctcagcgagacgtttgcagcgcgacgccggaagccgaccttccctcagccgtctccccacaaaaccatagaaaccgagcccgttggcctggtacggtggctgacgtctgcaatcccagcaccttggaaggctgagggaggaagatcacttcagcccaggagttcgaaaacagcctgggcaacatggcgaaactcccctctctacaaaaaataaaaaattagccgggcgaggtggtgcatgcctgtggttccagctactcaggaggttgaggtgggaggatcccttgagcccaggagattgaggctgtagtgagccatgatcacaccattccattgcattccagccctggcaacagagcaagaccttatctcagggggagagtgagagagagaggatgaagaagagagagaggaggtagagagagagaaaggaaaaaaaacccaaacccatcaattacagagacacagggaaggcctagccattagtgagttcttgctcctttcttgcactctgcctagcatgctcacgacaacactgagtggtgagagacttcaccaaagtcacaggagagaaagaacactggctccctgcctacccactagtggttaagcacatggactatgagcccaaaccaccacgtggggtcaaatgtaggcccccagccgggcgcagtggctcaggcctgtaatcccagcactatgggaggccgaggtgggcggatcacaagctcaggagatcgagaccatcctggccaatatggtgaaaccctgtctctactaaaaatacaaaaattagctgggtgtggcagcgagtgcctgtaatcccagctagtggggggaggccgaggcaggagaatcgcttgaatccgggaggcggaggttgcagtgaggtgagatcgcgccactggactccagcctggcgacagagctagattcagtctcaaaaaaaaaaaaaaaaaaaaaaaaaaaaaaaaaaaaaagtaggcccccaccaatttcgtgtgactctaggaaagtttcttaacttcattgtgcctcagtctcctcgtctgttaagataattatggtattcacaatggaggcttgctatagggattaactgatttatgtataaagcactgaggcggtggctagcacatgggaaacattccaaggcagtcgcagttctttgatgtctcagctttcagtttgtgaatcaactgctaccatgcctgtcatctgttccagaacctccaatgactccctttgactacatcagagactctaaagtgttgtgtgtatgtctttggggggtggaccacagggtgcatgagatattatacattggaggtatgggaggaaaatactagaacatatatatatatatatatatatatatatatatatatatatatataaatatatatatatataattattacttttgagacagattctcactcccattgccccgctggagtgcagtggtgcaatcacagttcactgcagcctcaacctccctgggctctggtgatcctcccacctcagcctcccaaatagctgggaccacatgtgcatgccaccatgtgcctggcagtctttattataattattattttatttgagatagggtctcactccatcacccaggctggagtgcagtagtgctatcatagatcactgcagcctcaaactccagggctcaagcaatcctcctgcttagcctcccaagtagctgggactacagacatgccactgtgcccagctaattctttttttttttttttttttgagacagagcttcactctgtcaccaggctgaaatgcagtggtgcaatcttggctcactgcaacctccacctcccaggttcaagcgattctcctgcctcagcctcctgaatagctgggactacaggtgtgcgccaccactcccagctgatttttgtatttttttttagtagagacgaggtttcaccatattggctaggatggtctagatctgttgacttcgtgatctgcccgcctcagcctcccaaagtgct

SEQ ID NO: 1386 - DNA, 4001 bp, Homo sapiens
tacaggcgtgagccaccacagccagctgttttgactcttttaaagcattaacttcacattttagttctaagaaaaggtcagttaaatccccaaatagcaagaaccgcaggtgtttccaggaggcttttcttagaagtccctatgccagttctcaagaaccctggacgcggctgtcttgagggctgcacaaatgcagattctcaattcacaaatcagcagactcagttcctgttcctcttaccaggcctgagattcaggctaaggagagctccaagacttaagtgcaggcactggtagtttcctctaagctaaaccagccagccctgacaattcataacctcgctctctggggcaccaagaggaaccaaatccatcctactaaagacccaatagggggccgggcgcggtggatcctgcctgtaatcccagcactttgggaggccgaggcgagtggaccacctgaggtagggagttcgagaccagcctgaccaacatggagaaatctcatctctactaaaaacacaaaattagtcgggtgtggtggtgtatggctgtaatcccagctactcgggaggctgaggcaggagaatcgcttgaatccgggaggcggaggttgcagtgagccgagatcgcaccattgcactctagcctggacaacaagagggaaactctgtctcaaaaaaaaaaaaaaaagacccaacaggagatggggctagacgaccatcaatggtttgatggtccaaccacagtttgatgacagaaaacaaatgtattttggttattgttgtttttgtttttatactattttaaaatatgtcatgaatgtaatgttcactaacgcatcttttcaccataagatcagctatgagcccacggtaacacaactggaaagtaacaagaggaaatgtggacgttccatcattcttggggtgcagaccaatcctgtatttccgaaaaacttggacaaccatcgccttcaagagccacccaggcccccgcaaatacgagcactccccaccaccactcagtggcacaaaatagccataggccaggttgtctgtatgaagtgtatcttttttcttttaatatttttcgtcgttttgatagataacgcatacaaagagtagtaaaacgcaaacagcacaaaagggaaaggaagtttccttccaagggcggttcccctcccctagggcagtttcctgtgttcctttgcagagatactcagtatgtttacaagcgtgtgtgtttattcgtctcaggtagagaccagagaaatatagaaggggtcctcccaactgctccaggctgtgatcaagggtgaaattcgtgcgaagggatctgggtaggaaggggtccctgggcttcgaccgtcaccttaaagctccccgggaccggtcctttcagccggctctgggctccctcccctcctctcggggatttccgtctgtgatagggcacctccccgcttaaggcttttcgaggatcccttcaaggccaccggttagcgctgaaagagaagcgtctgtgacatcaccacccccgaccaagtttagggtacccggcagcccaccggggtccctaagcgctagatacggctttaacgccctccccgccgccaggagtcccgtgcgtcgaactgagacgggcgaaactctggatccacctccctgctcgggcctggaactggaagaagcagcagcattagctccccctcgccccaaaactggccagggctgtcctcggttcccgcagtgggtgtgtccgggtggcggagaaagggttaaattggagctagcctggtctggcggtgggtagtcacctgtagccacggttggtagcccgcggagggatgcggtagacgtggacgtcaggcttgacacagagcaccgactcgtacccgctctcctccatcgcgacgcctggagcccaccgaacttccggcgacttccaccgttcctctgtccgacggacggaagcggtgcgactctctgaccaggtttcggctagagcggcagctcgcgggcctcagcaccgcctcgtttgtgcgccctctgctggaaacccggctcaagacacgtggcgggcgacctccggaggcttctccctccctccagaggcttctccttccctccagacaccctccgacgcaaagaaagcgccctgcgcccgccatggacagacccctctgtaacccgtggtctgggtgtggatcatccccatcgcttcagtttcttaggcctggggcccagttgaccgagaggcaaagctgtagcccaccctgcagtatctctgtcctccagcctttgcctcggcgcctcctctgcctgaatatccttccctctcctgactgtaaggctcagctggcacctgacccaccagactaaatagatgccattaccctaccaccctccatgcttcccctaggggaacccacttatatgctcagggccccgtgtggccaaacctcaacaacgagttgtattcaaagaagtaaagtttagtaacacaagtaatttaagaagaattccaggccgggcttggtagctcacgcctgtaatcccagcactttgggaggctgaggcgggcggatcacctgaggtcaggagttcgagaccagcctggccaacatggtgaaaccccgtctctactaaaaatacaaaaattagccgggcttggtggcgtgtgtctgtagtcctagctagttgggagactgaggcactagaatcgcttgaacccggaatgcggaagttgcagtgagctgaaattgtgccactgcacctcagcctgggtgacagagcgggactctgtctcaaaaaaaaaaaaaaagaagaagaagaattccagtcttaacttcgatttctcccagaatattctgggagatacaatgtctaccctagccaaattctcaaaatccctccttccctaccattctctcattgagttgagtgcctgcaatgtgccagcccctatgtgggggtgaagctgatcccaaacttctgattcactgaataccccaaactttccccaccccttctttccttttctctctcactctccttctcctttttacttttttttttttttttcttcagacaaagtctcactctgccgcccaggctggagtgcagtggtgcaatctcggctcactgcaacctccacctcccgggttcaagcgattctcctgcctcagcctcccgagtagctgggattacaggcacccaccaccaagcctggctagtttttgtatttttttggtagagacgggggtttcatctggttggccaagctgatcttgaactcctgacctcaagtgatccgcccacttcggcctcccaagtgctgggattacaggcgtgagccaccacgactggccatttctactcattttttataagctttttattataggattgatctaaccacttacatttttattgtaaaatatacataacataaaatttaccattttaagtgtacaatgctgtgaaattaagtacattcacaatattgtgcaactatatcatgctttccagaacttttcatcatcccaaacagaaactccacacccattagcaataacttcccatttccttctgctccatcccttagtaacctctgttttactttctgtctctatgaatttgccttttctagatacctcttataagtggaatcatacaatattgggcttttgtgtttcttatttcacttagcatcaagttttcaaggttctttcatgtagcatggatcagaatttcattccttttaatggagggataatattccattgcatgtatataccatattttgtttatccattcatctgtcaacaattgggatgttatcaccttttggtattgggaatcgggctactatgagcattggtgttcaaacacttgttctagtcctgttttccattttcttgagtgtatacataggagtgaaactgctgagttatacaataatgctatgtttagtggttttgttttgttttgttttgt

SEQ ID NO: 1387 - DNA, 4001 bp, Homo sapiens
tttttttttactgtgtaatatcaaagatattagttacttttgtatatagtggcatttgttattcaaaacagaaattattaaaaacatatgtattagtgtatattaaaaaatacgatagtattccaaatttgaactcataggcatgttccaaaaggtgtaagtcatataccacacccacatcattaaatttaaatatgttgcatgtttcaaacagaaacatttcccactctctttcaccttagacatgtcatgtacactgatgttgtgcaagccagacttacaagccaactaccacccagtggagaaaaagaagatctttcagggaaatgtgaggtggggtggcagggggagaagggagggtgatgggaaagaaatgaaggaatagggcgtttagctttgtttagatctaagctttgctgatcatccatttatattttcataggaaataaaatattcccagactcccactctgcagtgttgcttaggggtaaaatcagggtatggatgtttattaatgacaaaccacctcagagctcaagctcagaggaaagaagggaaaatgagaaaaataagtaaaagtgaagactgatggagggaggaaggtaggaataaaaaggggatagaaagacacagaaagagaaaaagagagaagcagagacagagtgagagcagcgagtgagacaggcagtgtgtacacatgtgtgagtgacaatgtggaacagagaaggagagtatgccttttaaaaacagtgagagacaatctgaatgtggaagtggttcttacagcatggaagtgccagtgcatgtgaggatgtgagagtatgtgagttagtatgtttatggaaataagatttatgagggtgagtaaatggtactggaggggaacagtgaccatgcctgtgtgtgccacaggggtgggaaacggtatggggagagggatgagaaatgggagtcaaaagagggaagacagggcacaggatagggacattaaggaggaataaaaaaaatagacaaaaagaaaaaagggtaaaagagaggaggaaaggggattaaatgtgaggaacagaaattagagtcgtggagataaaaatgagaaaatatgagaagaaattttaaaaaggagggaaaaaacagaaaatagaaaaggtatgaaaagagatattggagggaaaaagagttacaaggaggtggggaaaatggtataagagaatgaggaaggagaaaagaaagaaaacagaaagcggtaaaaggaaagaaagataaagagcaagaaatcgagcctaagtgtccaagtgagagggaaaataaatgggagcagagaacagcagtttgaaagagtcgcttatgctggagtaaaatagaaacaaacctgataaacttgtcagactctccaggagtaccccatgacagtaaaacagagaccttgtgcattgagtttcaaagtggcacctgcccctccttctaaacctgacagttcactcatccccaggctacttggcgttccggcaaagtgctttagcatcacgagtccagcttgctacctgccccagcataaacgggccggggctccgggaagaatctgcacctggaattcttgggatgtggtctttccatgatgagcaccaccagcattattgcttgtgttataaagaaggcaaagagggttcaaagagagacagaaagatagaccgaaacaagtacgaaaagcacgccgttcttcctacctaagcaccgccgtgtccccttttctgaccatcatgttgtccacggccgcccaggggaagtccacactctgtccagccgggaggcaggagggtagcaggcagcacaggctgaggagcaccgccgccagccactggttcgagcaacaagcaccctgcaccaacagcatcatgtccatccctgctagggctgctcactctccagcagctttcagctcgcactcccccaccccctggtgctggcgagtcttcccgggaaccaggcggcgcgccacaggatttttttttttttttttttttttttttttttttggtgggtgggtgggtttcttttctttctttcttccccccaccccagttgttgggtgttgtttctctctttttgtttttcggtgtttttgcctcccctcctcctcttcgctttccctccctccctcccctccctccccctggcaccacactacacctcctctcggttgcttttggccgcgtccggagtgtgtctaattctcgggcggctcgcacaccatctagcgaggaggcgagcgcgccggcgagtgagggaggaggcgcggcggcgggggaggaggcagggcgagcggcggcggcggcggctgcaatcccagcagcagcagcagcaacagcaacagcagcagcagaagcagcgcggagcgctgcgccggccgccggctcccgggctcgcgcgcgttgccaagcggccgtttccttagcaaccccgccaggggactggggatggagaagggagggggattaaaaaaataataaaaaaagaaagaaaaaagatagcaagaaaaaaaaaagaaaagcaagacaacgaaaaaaaaaataggaggaactgtatcacaattatgcaaactaagggggaaagagaggcaccttagaatgaaggctctccttactgtcgtaagcgctagagggattctttgctagaaaagtctccgtgtcagggctggggtgaagagagctgaggggcgctttgccttccctcaccggtgcgttttacctctcgaggcaccgtaagtttgaagtcctccaagttgtggtcggcgccatcatgacgccggcgactgtgagttgtttttttgtttattttcttctaatcttgcctgggtggctacgctgcagttagcgagcagccaactagttctctctgcgttttctcgggaataggtagggacggtggcggggcgctgcttttttgcggggacacgaggaggtgcaaggccttgcggcagagcagcttgcgtgtttgtggcggtcggcccgtatggattgcaggacgcccctcttttatctgtgggtgttgacactaagttgtgtgtgtgagtaggggattgtttatggtcaacatggagtgtgtgtgtgatagagagcgtgtcgtgcgcgcgggggcctgtgcacgcgcggcacgcaggcgcgctgggagggacggggcgggtcatgctgggatgtagagtcgggaaaagactgcaatcaagtgttttaattgtgtagagcccaggcggtccagttatgtaagaggcagtttaacccatttgagcctatcaggccgaataatcggcgcatccgagtcaaggcagggcagagttaaggggtttaacgagtcgcagggttgtatttcttaacagcctccacaccgcgttaacaggcttgctcctccgcggtgcagagcggtaacctccgcttccccacgcagcagcccctccgcagctcgccgggctgttttcagccctgccctggcccaaggcagaaggagatactaggcgtggggccacccctactcttttttcttctttccttcttgaactcatttccagattcaagatccttaagcttttccgggccatttgcaaatcaatgcgagaaccgaggctgagtcgttagcagttacaccaatcaatcttgttcagcgaggagtttgggaagcagagcggggaagtgaaaatggaaaataagtaattaaaaaataagctccctccccctcacacactttttcccttcctccaccccatccccctttagcagtgtttgaagaagatattctttgccagatcccagttcttcttttggaggaaatgaagcaaaacctcacacgtccgtaactcgttttccataatgctagcagggtcatttggcaaagcgcaccgaagcaagactctctgcaggggtcagcatccggctgcctccgcagactgagctctttacgaggcaggcagggagtcgttttgcttggtggtagcagtgttcagagtgattttt

SEQ ID NO: 1388 - DNA, 4001 bp, Homo sapiens
gtatgaccaccatcacttcgtctgtggcattccttcagggccagagtcaactgagtcatcactcgaagaacaaactcttcatctaagtattgcctaaaaccaaagcagttatacagcatataacttctaaaaaaatcattgccaagatgggatgatataaattatccagtgtacaaatagggaatttatttatttatttatttatattttttgagacagggtcttactctgtcacccaggctggaatgcagtggcacgatcatggctcactgcagcctcgacctcccaggctcaagcaatcctcttgccttagcctcccaagtagcttggactacaggcacatgtcactatacctggctaatttttgtagaaacagggtcccactatgttgcccaggctggtcttgaaatcctgggctcaagtgatcctcccgcatcggcctcccaaagtgttgggattacaggtgtgagccaccacactcagcctataaattgttattttgatataaaatatgggtgttgattcaccaggaattttctaaagtactgtggacctaccaaacaaatacaaatacactcttccatattactgatcctaaaacaagatgcttaaaataaatgaaactagaccaatttcagcttacatttttaaaagattatgcttacctttccttggttccctttgtaattacactagccagatcccctccttcacaatattccattacaatgtacagtgttgtattggtccggtcaataatccgatcatagtaacgaacgatgtttggatgtttcagttcacgaagcaaattcacttcagaaacaagcatctgtttctcagcttctgtcatggagccatagtcaagttctttccaaactaatatctgaaataagaatttccaaggtatgaatgaactcattatgctcaaaaacaaagaatgaaagttccaagatttaacaaattacctcccttttaattatatcctacaatcaaggtcattatctaatttagttcaatgaacttaaggagctgtgagtttacttccataatcttcctccagttctaagcagtaaatgtatgttgtggggagacaaacgggaatgaggcacatgaggactcccccaacccctaccctcagttggttagtgggaagttggctaaaaggtactatagtcaaaattggggtgaaggtggtcaaagtccctgccccattccaccccagtcgtgttttcccaggatgagacaccttggtaaagatccctccatcagcagccaggcagtttcctgtccaatgttactttctgtaaaagttctacctatatacattgggaaatatgaatccaataatcctaataatggatattttgagggagtctgactgcagatacaaagcttcgggttctggtagtcctgcccctttcttgtgcctgagagggccactcttagagctctaaaaacagctcaggaattagttacctgtcaccaatggaaggtccttagcaagccaaagcaggagaaagagagaaatggggagagaaacgggaaaagatggaaatacatatatcaaaagaagcggtctcccatcctttaagccacccaggacaggctgtcagatgcagacccaggaaagacggtttagtcttccgggcacccatttcctcagccctgtcggttcccttcggtggcgcagggcgctcgccccgaggcgacgaaacctaagcaggggcaggcgcagggtaggtcccacgctcaccttgccatcactcttcctccggatcttctggcagcggccgtaggagcctgtgccaatggtgtacaacacttcatagtcctcagcccgggaaggcatggccggccagtcgccagagtcgcgctgcctcacgcaggttgcgccgccaagtgcggagctccagggaccaggaactccagggacctggatggagaagcccccgagcagcactgacccgccacccctgccttgggccccgtttaaccgtcgcgggccctgatctcgcagtctattggcaggcggtgggccgcttcgcctctctcattggctaagaagaacacaacaataccctaggcattttgggaaaagtgtcactaggcaaccgcgtcggcgtctgcttttaacctgtgggagaacccggcgagctaagccaaacggagggcgggagagaggaagcggcagctggcgcctctcggcaactctaaccctctgatagagatcgccaaggtaaccgagatctaaggtcctcccctcaggcttctttgcacaccgcttccaccagatgccttctgacctttgcactctggcccctcacactacctactctccccggcacacgcattcctcgctcaggttccagtaccctgaacctgggtggggtcacgttgaggatatgctgagagctgaatacaaattagaaatacagactcccgggtgggcgcggtgactcacgctcgcccgtaaccctagcactttgggaagccgaggtgggtgggtcgcttgagcccaggagttcagaccagcctgggcaacagggcaaacctcgtctctactgaaaatacgaaaattaggccgggcgctgtggctcacgcctataatcctagcactttgggaggccgaggcgggcggattgctcgaggccaagagttcaagaccagcctggccaacatggcgaaaccccgtctctactaaaaatgaaaaaaaaaaaaaaaaaagtaacagagcatggggttgcaggcctgtaatcccagcttcttgggaggctgaggcatgaggaattgcttgaacctgggaggcagaggttacagtgagccgtgcgccactgcactccagcctgggcgacagagtgacacccagtctccaaaaaaaaaaaaaaaaggagaaatactgtcgctctcctaccaagtactttacacgtcttgtcccgtttatgtgtgccaaatacacaattaaccctatcgacaatacttcattgaacacagattctcttttacgcacccacacaccaacgttctcagcttacccagccaaatgaacagccccatgtttaccagggaaggaggacttagaggcctccatccagggcttgttagaggaatatgtaaattaccagaaagctaataatttggaaatgcatgaacaggccagttttctttaaatatctgttcagcaaaggattaaaagacacctgattttctattaataagaatttaaaagctctttatgtaaaaataagggacttattacatgccctgaatataacataagataattggaattgccaaccaggagaatttttaaattaacattcaagggcactgtcttacctcaggggaataggaccaatttaggtttcaaaagttatgtaaggcactgcaagtggctgtgttaattagcatcatttttttatttttgtgcctcttacagattggtatccatagagcttgctgtggtttgaatgtatcccccaaagttcatgtgttggaaactattcttaatgcaaaagtgttaagaggtgagacctttaaattgattgggttatgagggctacccctcacgaatggattaacgtaatcacaggagtgggttatcttgagagtcggttggttataaaaatgagtttggctttcccttgctgtttctcttaccatgtgatgccttctgctattttatgacccagagaaaaggctgctgccagatgctaccccttgatcttggacttcctagcttccagaaccgtgagccaaataaactattgtttataaattgtccagtctgtggcatcctattatagcaacatgaaactgtataagacagagccctggccgggcacggtggctcacacctgtaatcccagcacgttgggaggtcaaggcgggtggattacgaggtcaggagttcaagatcagcccggccaacatggtgaaccccgtctctactaaaaatacaaaaattagacacaatggcaggcacctgtaatcccagctactcg

SEQ ID NO: 1389 - DNA, 4001 bp, Homo sapiens
ttatttcgcaggccttcctctcaccccatacagttactgcccctttgactcctccgagaggcaaagctttttcaaagctctaacacctctcccctaccccagcaagttccccgtgcgagaccaaatagaggatgccgctgttctaagagtgaagcaagctgtggactggatctcgccgagggagagagaattccttcctctggaaataaaataactgctgagattttaagttagctgtttcaagagcacttggccatcaccaagtgttacaaaccaagaatactcagcggccattcaacaagagttgccacaaagcattagagggttaactgtatctcctgttttactgttcaccgttttcagggtttgaccggttgtcccaaacatactgtagcttttgagtgcaaggactatgccattcttcgaccacaccaccagcagctcaaggtcctgaacagaacatatttataatacacatactctgtactttaattctctaatgcaacctgacaagacatactgctgtcgcctggagggagtgtgcatagccttgaaactgtaaattccttggaggaggaactagaaacagtggttcccattatgatgggtacattaggctctacaaactatggaaatgtggtgttttcaattgcatccttgagctcagtaacctcaaaggagaataatcattttatttctgtgtatttctgattttcagttcagtcaccagaattgcgcaaggacagtaacatgtatcttactgtaaactaagtatattttttagcatttctccccagtgaggactacagcaaggtgagaacacgatacatcatctctccgcgaccccagtacgctcccagtgcaagactaaatagaggatgctgcggttttaggagtgaaggcctacagtgtaacagaggcaacagaagttctttagctctcaaggcagcatcctctaggttgtgctcgcttccttacactgttctgcggtcatacggtcttgtcacttttctctgttttcctttggctacccttctctgactttggcctcagttttcaatttcttttccattgccaccatcaccagcaatgttcgctattgcctcgcaatccctctctccgacattttgtaatcccgagtctctcccaagttcattctccgacagacctctcacgctccctgtacttctgaagccacttcggattctcccctatctgccggctcccaccacccactctctcccagcgcacttcactttcctaagtcgggctgctgccgaatcctgacagacggacttcaccaatccgcgagagataaataaccgacgtcgccaatgagcatccgccggaaggcgggacttcgcttaagttcctcgggtcccgaaaccaaagacctgttgccgccgccgccgtggccacggagtttcttagttaccgcggcgcccttggcggcctcgggcctctagagccggggccaggtatgaagtttcctgccgccccctcccaccgctgccaacgaacaagaccgaaacccccatccgcctcgagcgcagcgcgccccgccccacctaccccgagcgagggtatcccggaggccgccccgcgcggtcccgacctccctctcccggcccgactcccgcaggcggcccctcccggcaggagctgcccggtccgggcgcctgaaccctgggcagcgactcaccaggaagttgggagttttccgttctcccgcccgcgagagaccttgggcgggcgggtggctcggcgcggcgccgccgtcggaaagcgcgctgggccgggggctgaggctgcgaggcccggagcctgtcggccacctcccgccgcgccgccccggcggacgctgcaggcgcggggcacccaccctgcgcactgcgaggcgcgtccggagtgcgagcctagcggcggcccatcctcccgcgactcccgatcctcctcctgctgccgccgctgtcaggagtgtaaacatcccggcatccccgaggagaggggcggggcgggcgccggccccaccccgcgtcgtgagtccaggccggctgcccgatggaggcttcccgcctgcgtccccggcgctccctggagctgggggagcctcggcggtttccctactggagccgaagtcgctctggaggagcccctcctggcccctctcttccggttgtcaggcctagcgtggtgcggggcaccgcgtccggtcccctgagccctcttccccggctgctttttaagaacccagggtcggctgctttttaagaacttgttttttcttcatttatatgtaagtgcccccacttgcaagcggtgaaccgacttactgatgttcccttctggaccacagcgtttgtgatcccatcttcttttaccaggtgatttaaactacctctgtgtttaatgtggagtgcagggaaatgagaaaaaaaaaaaaaggcgttttcctgagtctggctaagcaaacgttgcatgaaagtgtcccagcatagaggacaggggcttcaacaacattccagaaggtaaactccctggtgtggtacggaggatctttgaaataaatatgtgcaaaatcacccagaaccctagtacacgaaactgcaaaaggaatgctttgacaccagcagcttcacgacttaagttaacagggcatgaactactcgaggagacggctaggaggcagtatggagtcggccataccttaattgtcgtctcaactcagtgattaattttgtgacctggctgcaagttatttaacctctccaagtctcagtaactctctgtaaaaggagattagttgtaataccaacctctaggaccatagttagaattaagtgagataaagcaaagtgcttaaccacaaagcttggcatataagacgtgctcattaaattgttgctgttgttcataggtctctcactagtttaacttccctgacaaaaagattagagccaagaatgagtagattatacctcaaacatttaaaatgttaaagccatgaaattaagatctggaaagtttatttttaaaaagaaaaatggccgggcgcagtggctcatggctgtaagcctagcattttgggaggccaagtgggggggggggtgatcacctgaggtcaggagttcgagaccagcctggccaacatggcgaaaccctgtctctactaaaaatacaaaaactagccgagcgtggtggcaggagtctataatcccagctactggggaggctgaggcaaaagaatcgcttgaacccgaggcggggaggaggttgcagtgagcagagatcgcgttacttcactccagcgtgggtgaaagagcgaaaatccgtctcaaaaaaataaataaataaatgaaaacgttcacgatctcaaaaggaggccttgattcatgtggctcaacaaatattcataaatgggctaggcaatgttctaaggaatgaggatacaacagctcaccgagatatacagtgcctgctgtcatagagcttatattgtagtcggaaaggccaaaaaaaaaaaaaagccaataaatacctactatgccagatggtgagtcatagaaaaataaagcagggtagggagacatggggagggaggatgctattttaaatatgtttgtctgggaatgcctctctgacatttgagcagagaactaaggaagtgagaaattagccatttggctacccagggttagaatattttacacagaaggatcagcaaatgcaaagaccctaagtggaagtgggcttggcatgtttgagaaataggcaggaggtcagtgtaggctagaattcagtgagcggtgggaaagcagctgactaaatcagaagagggagtagggtacaagaagggtatagttgtagaatcttgtaacctttaaaatttattctgaatgaaaaggagagccattggaggagtgaccaaatctgatttgggttgggagagaagagctgcactgtggagaacagattgagcctaagagcaactagatgttaga

SEQ ID NO: 1390 - DNA, 4001 bp, Homo sapiens
caaggtcctctctctctcagttaaatttcaatctataacatcaacatcaaaaaaccaagggtcttttctcagtcctcatcttgcagttctggcactcttgctgtaacctcagtggtgaactctctctttccttagattcttgtgccagtggtcccaaagatcatcgggtcagttggagagtccctagaaggaagattccaagaacccagcatatagttctactcacagctgggaaggaaaaacacagagggagaatctaggggaatctatgtgcaggtttcctatgctctctccctcccatgaggaagagcacactcttcccccagcaacaaaacttgacagtatgtgccattcttctggcagaacattcctctgctagagatgcccattagactcagcacccaaggttttcactgggggctggtcacatggggcaccctctgcctagcatatacagtgttcaatactaaccacaccatctgtatatacggcctaggcaagtgagtccaccgttattgggtagggaagggtgagaaatccagacactagacaagtcccacccttgcaagtaggcttttctaaggagagcaggcctgccatgttaattcttttctgcacggatgcctggactctgaaccatctggttccctctgctaccggcaaaaaggcatcccttaacatcctcacatcccagccatgtctccctccctcggtgtcctcactgactcatggttctaaatggccccttcacaaatgatgcccaaactggcatcactgactaagggccaggtttctgatacccccatgcaatcctagtccatataaggccaattaactcaggaattagcgagaccaggccagagggttttgaaaaacatcaggcctcttcctgctctaccactaacaggtggcaggcctcagtttccttatgtgtaaaagcaggagatgggttcctgccagctctgaaatactatggtactatgacctccccccaatgccgttcccccgctccacatctaatatcagccccctgttggtccttgtcgtgcggctccagtcccaaccaacccaggtgggcaggtggttgtgagttttctggacgcctctagactattgacgtgtgtgggtgtgtgtgggcgggggggtctctattgacgtgtggcgggggggttgtgggggtctctaacctccagtccaccctctgcgctcacttccagctttggctgagccccaggggtacatgacctaaaagtgggtttgaggagtccgatgcagaggcctgggatacaggggcaggaaaaggaagtgcaggcaaagactggcttatcccaggacctgtctcaattcccacctaacccagggagcaggctctgcttccctccctccgtcccccgccactccccactatgcgtgggcacagtaaacgcctcggctgatgctaacatgaaaaccaaaaagttctgaggtctgtacgcagatcatcaacgaaaaggcggctagaggggaaatctcccggggaccgagggagaagttcagggtggggtgtgcgggcaaagcggagcgctccgactgttgaggactcgtcctcacccctcggccatccttcggggcctagagagaggaggccccccgccggcccagggcgcccgccgcgggccgcgcgtcccccagagcttcctgggccgccggcgcctcctgggtccccgctcggctcgccgcagatcggacgccaccccgggtccctcggcccgcgacacccccgcctacctcctccccgccatagcgggccagctcctcctcggtgaaaagccgcactgggggcccccgctcggcagggcgcggtgtctgcccggcccgggctgtgggcagccccggggccagcgccaggaccagggccagcgctgccagcggccgcagccgccgccgcggcgcggggcccaccatggtgagcgcgcagcgcaaggcaaggccgggccagggcggcggggccctagcacgcccgcccagcgtcccggagtcccgccccgcgcccagagcctccccgagggcggggacccgagaactcccgcccttcgcgcgcctcctgcgccccggggtggggctggccgggctactcgggccacgcagctggaacctggaaattaggattggaatcctgaactcctaaatccaaactacagactggaagttaccaaaaaatgtcacagtggttccttgatcaggtagaaagatgacagagcccaacataccagaacctagaaaggtatatttctaaaataagaccccaactgtcttaattcgcttttatttttggctgattttttttcttcctggttgtgtttaagtttctggttcccaaggagatttttgcaaagggtagggtgctgttaccgatacgccctgaaataataatagctaacatttgtgccaaactttgctcattactttatgcaacaaatatttttgagtacctccatgtaccaggtcactggggactcaccactgaacaagacagatccacgcccacgtgaagcttacattgtgtgggcagatagacaataagatgctaagtagtatgttagatggtggtaaatactagggagaaaaagtagggcaaagagatagggagcactgggatggacattttattttattttattgttatgtatttatttatttttgagacggagtctgtcgcctacgctggagtgcagtggcgccatctcggcccactgcaacctccaccttccgggttcaagtgattctcctgcctcagccaccagagtagttgggattacaggcacccaccaccacgcctggctaattttttttttttttaatttttagtcgagatgaggtttcactatatgctggccaggctggtctcgaactcctggcctcaagtgaaccatccacctcatccacccaaagtgctgggattacaggtgtgaggaacggtgcccggttatggggatggtcattttaaataggcaggttagggaaggcctcactgagaacagggtatttgcataaaaatctacaggaggcgaaggaggcggtctagagggaagagcactttggtcaaaggatcaggtgcataaatgcggaggaatgaggatgcccggcttgctggaggatcaagggaaggtaagaggggtaggtgaagtcaggaaggaagcgggtaagggagtgggggtggatcttgggggcttcacaggttattttcaagactggcttttactttcaagactggaatagaggaattaacagaaaaagggtctcattccagacccaagagcaggttcttagacgtccacggcaaagaatcagggcaagtcgcagagcatagtagttaaaatagttcattagaaactactccatttctaataatagtactactgtgtttctgagtagtatccttgctttgaagtagtactaagcaagtattgtttatataggagcacctctgccttcaatgtaatgcttgcttttatagggctaaaactagcgtacttcattacaaaagcctatgatcagcttgttacagactattagtattgttattctcttgtgtaactattgacttcagggagaatttatgggtgtactgttatctttaaagtgaaactcatttttaaactaagaatgcctttttccattatctcatttcctcaaccataaacatcttgtgaagagtgcctatcttcctgggaaagtcgcccagcaggtttggctttatctgacctttattcaagatggaatcactctggttaggacacttctgacataattccctcctcctttttacaaggagacctttaatcctaaggggtgcagggggacagagatccatcttcagtaacttcaagctgaacagaagcgatgatattcctgcctaaccattaggatccctttgcccaaagtagagagctagccagtcagaaagcatctgtatagtgaggaccaatcatacataattctaagtcccagaaaaaggtgaa

SEQ ID NO: 1391 - DNA, 4001 bp, Homo sapiens
cctgcctcctgcccgctgccgctgcccgggaagcacctcctgctccctggctgacttatctgtgtagcagacccccgcctcccctaccctattccctgcccagagagccccctctggatcagccaagatgagcccagggcccctgtcagcactctcagctctctcccatggcctgctcctcctctgaggatgctgattaaatggtagcacatgttgctcagaacacagctcccacaggaaggggaggtgagggaggagacgagatgggttatggagagagaagagggggaaaaaaaagcgaaagcagaaggaaaaacgattaatcaagatgcctggagcctgcaggactggaaggcaaacagcccccgtcccccgttggtcccatctcccacaactgtctcctgctcctcacagcaggctctcacccccgccccacccccatttcccacatgttctggattctgtctcctctgagaggagggatggggaggtggccatggcacctctgtgtggcccaggcaagaagctgttttctcagctgctggtcacatctgtgccctgtgagaaggagcagctgttatgggcctctggaatgtgctccagggagccgagaagccatgacatgggagggggctggtagccattcattcacggcccctcactcctcccctcaggagaaggagggctgtgaggaacttggtgattctgagtggccaggccaccagattcagcgcagaggcgacagtgctgggtgtcctcctagtaataccagagcctgggaagggacccggagccccggtcatcatcagagccagaaggtgccatccagagagtggcggggctgctgcaacgggtcttgggcctgactgcccacccgggatgtgcttcgagaagccccaccattcgcatcctacactagacgggctgtaaaagtctaggacttgtggcaccaggtttctgagaactggctcctgattcagcagccagctagccccactcccttcccagaaggtctctgagcttcataagggactttctggagctttctgggactttctctcacccaggccctcaacctcctcacctggaacttttcagtagcccgcagccgctcctgccagcggccctccaacctctgttccaacgctgccctgcgctccaggaggcctccgcgctcagcctggagctgctgcagctccaggcggccctcgcgggcaccctgcaccgcccggcccagccgctcgcgggcctggcccagcgacgtctccatgtgtgccacgcgctcctggtagccgcgcactgccccgcgccacgcctcgcccagtcgccttgccagctcctctacctccggggccggcgcgggaggcccgcggggcggcgcggggcagcggggggcacaggcagcctgcgcgttcaggccgacgcgctcctcctcgtgcgccacgcgtagagcctctagctcgcgctccagctctgccacctggctactcagccaggcccgggcgcatttctctgcctcgacggcgcgccggttgcgggctacctcctccgtcgtccgctcccgggccagccgcagctgctggcatcggcctgccacgccctccagctcttcagccaggttgtcgcgcgccacctcggccgcgtgcttctcccgccagcgttggtcaacgagggcccgcagggccgccagctcgtcgtcggcatgcgcccgccaggaggtgtccgcggattgtgcccggagccccccgagctccgcgctgagcagctcattctgctcctccagcgccttgacccgggccaggtaggcctccaggcgccgattgagctcccacatctgaaacgactcctcccccatgcagccctccatcctgctcgtctgacccactgaggatggacagacgcggggcaccgggagaagggagcggctcgcagagcttttaggacggaagagaaaagagaccgacggggacaatgacggggcggggcggggtgggagtagcctgagcgactgagagtcgggagtgggagcgaggctattcatactcccgccaggcgggcgggaagaggggcgggacccaggccttaaccccttagaggtcagagagtggcagcagcctctgttcctgcttccccagggtgctggagagtggaaccaaagaagaagctgtaccatggagaatcggatctgatggtggtggctttctgagggaggaggctgtgaagaagggtcacaatccccgaaaaaggcagataatgcacagaactgagcctgtgggggtgggagtaccaggacgttccagcctgggagggagtgcagtctcagttactcaacacatccgagagaggtatcacttactgaattcctctaagactcagtttcctcatccataaaatgtgagcaatgatggaaatcgcatggctgctgaaaaaaatggatgtggccaggtttttgtttttcgtttttgaaatagcaaatgctcctcctcctgaaatactggagagagtactacagcattgcagaaagaagctagagagacgctgcctggaaaacaagaacaaatgtctgatattaggacacacggatacacacacacacacacacacacacacacacgcacacacgctattgcctgagtctccatcagaaaagggagcgaccaggttaagggccgtcatgggcttaagaacgtttgtccatccttcctacaagtcttctgtataactgcgaggttcaaacatccgctttaggaagttctgttcttggggaagggccccttctcccgcaccccctgccagggaatgttgggtagtggacgccctctggcggctttcagaagtggaagcagcaggaagaggccattcttttccttcctaacgactagcccaagtttatccagcctttatgatgtgcccagtcgtgttccaatattttacttccatgatctgacttaatcttcaaaacaaccttttaaagattctacagtttatgaagtagagagctcaccaagggtgagagtagtagggaaggctttctggacggagtgcatccttgagctgggaggtaaaggacaggtgggatttgggggatttacagtgaaggagaagtagggctggggaggagatgcagggataatgagacggaggggatctttggggaaggcgtttctgatcaagctgctaaatccaatttagctcaagtgttaattgagtacctactatgtgtcagcaccaaagagattgcaggaactctgtcccagccctggaaatgcttatagtttggtgatgtgaggtcaacagtgatgggcactcatagtctgttggtggaggtaaacataaaaagatgactacaatacttaatcagcctccaaggtgctggggacagagccaggcagcacagaggatggagagggttttctgagtagagggtacagccgggtcaataaccaggaagtcatccctccaatatcccctccccttgaggagtctctcaaggaccccatccctgtccccaggccaatggggctttggaattcaccaccaatatgtagaatagaggccagggaggggttagtgacaggacattgactgagagtcagtgcaggccgggaggctgaggatctgggatgcccaggctccttcaaccttgcattacctcataaatcctgctgtttggtttgggctgagggctccccagagttgtggccagcagagcttgcttggaatctcctcctctctttcttttatttttatttttatctttgagagggagtcttgctctgttgcccaggctggagtgcagtgatgtgatctcggctcactgcaaccttcgcctccccggttcaagtgattctcctgcctcagcctcccaagtagctgggatttcagatgcctgccaccatgccaggctaatttttgtatttttagtagagatggggtttcaccatgttggccaggctggtttgaactcctgacttcaggtgatccacccgccttggcctcct

SEQ ID NO: 1392 - DNA, 4001 bp, Homo sapiens
atatagtcatctcaagatgacatacattttgacaatgatcagccttacatgtcaaattttcaaaaatagcacaaattccattttaaggtgagcaggaacaattgctattcattacatttcaattgaaaatggattttaaaatatgaatcttttattaaaactggattacattgtaactatgatgaggaaaactggatttaaaataattttgttgtggttttagcttagaattctttaagggaattgcagataaactacataattgcatgcatttttctttaaattgttcctcagaagcattagtcaaaatataaaatatctgcaaaaatacggtgttaattgtaaggaagaagaaacttaaacagctacattggttaatcaaagtttacttatacaaattatacctccccccaaaaaacctttctctcatttgattaattatgcattttttcttaacaataccccaaactcaaaagaatttgagacaaagttttctaactgcagcagtttaacctgtaaaggataatgtttagcgggggaaattatgtggtccactcaataacgtgtgactaagatataaataacgtgtgactaagatatgaacttaagtataaatacttaagtttatttaatcacattacctaagacatagttatgttgtgactcgaaggccaatgggccgctgctacatgaattcattaacaaaatttaacgatgaatgatattcccgttgttttggtcagggaactaatttctttattatggcttcttttctctacctgtgtcttcaccaaggacattttgttaggacatatccttatgctatttttaccttgttatctctctgccaacttggttcacgttgtgctttaataactataaaatgagcatctctaagtcactgcagtaaccaactataacctctcaacttcgtcattttctttataaatgccaatgctaatgcatttgtagaacgtttcacaatttacaaacagctggaatggtttggcgttttcaaaagcatataggcaaagggagttctcaagaggtgactacattcttcactcacttaaactacgtaaacttcgtaaacttccagccctagttgctcaacccccagcatcccacctcgggcagaatcacgaaaaaaaaaaaaaaaagggttggagacaggagtggggggatatgcgggggtgtggggggggagtaataggctgttaaatcatatttctccccatcttccacagagaccgatcagaaaggatttcttaactggcactgctggcagagacggagaccgcggctggggcaagtggtgggggacggcactgaacttccctaaggaccccaagggttcagccgagggatcggcacccactccgctcacagagggctccctccctacagtagggaacgcacccgaaactcagccgacaaggcgcaggggagcagggcaaagacattgcaaccagaagcccaaggccggccgacactttcagaccctggggcagcccctggtaggcaccccgccgagcccgcaggatgcggctccaaggcagggttcgcccgggccggggccagcgcggaccacagctgtatggcgcccggcgccctccggagctgcagcggagcacggccagaagccgcagaccccgagcgcctctctgcagccgccgttcccgcccccgcccccaccaggggacccgacacctccgtctccactccccccagcccacgttcccccaactcttctcaccctgcaggagccggtgaccggcgaaggtacttctttccgcgtggagggactgtgcgcgtcccgcctggctgtgggtaggggtctgggagctctggccgctaacacttctgctccagccgctgggagtcctctggctgccgctgccgccgccgccgccgccgtctccagcagcaagtttccataaaagtcctggtgtgcagcctgttcccgcattccaggcgggcccagcgccggctgcagctgttccaaaacacaaggccagttcccccaaccccccacctccgccgttatcacccggagtgggggtggagagttgaggagaaaagcaggggagggggaccgtggctgccaactttccgccagaatttgtctgtctcccggccctaggtgcgcgagctgaccccctaactttgggcctgcctccacctccagccaggcctggggaaggaaggctgcctccgccatgggaaaggaatgaggctgaaatgggcttcattaccgggctgaagctggctccccctacccgcaaccagtttgctctggggcccacttctctcagctactctacccgtcctagtttccagtcaagaagccaagccactacatatcttctactaccctaagcattgacctttggccaagttttcctttattacaaagagcgtggggcagcaatccgggaacacttcatctgtctattgctcccctgttcttagctccagtctttaactctaaaaggagagttaaaaaagaagaagaagaagaagaagaagaagaagaagaagaagaagaagaagaagaagaagaagaagaagaagaagaagaagaagaagaagaagaagaagaaagttgaaggcagaggaggaggaggagaagaaaagaaggaatatatttatataagtacaaatatctttatattccacctttttcttaattgaaggcaaaccatatctggtctttctaaagcttcataaaggcatctttgactattagacacccacagacctttttcaacttggaccgccagcctgtcaaacccatcagacaataccatattaaaacccgaaatgcacactcggagtatttttggtggacgagatctttaattcttcactgcacttgaaaaaaaaatcgaaatgacatccagataaagaataaaggtaaccacttccaccttcaggccctaagcagacagcggtgctcaggttatatttcagggatgttgaaaaggccttctgggctgggcgcggtggctcatgcctgtgatccccgcactttgggaggccgaggcgggtggatcacttgaggtcaggaattcaagaccagcctgaccaacatggcaaaaggccgtctttactaaaaatacaaaaaattagcctagtgtggaggcacacacctgtaatctgagttactcaggaggctgaggcaggagaatcacttgaagccaggaggcggaggttgcagtgagcagagatcatcccactgcactccagtctgggtgacaaaatgagactctgtctccaaaaaaaaaaaaaaaggccgggcgcggtggctcctgcctgtaatcccagcactttgggaggccaaggcgggtggatcacctgaggtcaggagtttgcgaccagcctggccaacatggtgaaactctatctctactaaaaatgcaaaaaattagccgggcgtggtgacgtgcgcctgtgatcccagctacctgggaggctgaggttgaagaacccacttcgcttgaacccgggaggctgaggttgctgtgagctgagatggcgccattgcactccagcgtgagcaacaagagtgaaactccctctctctctctgtttctctctctctcacacccgtacacacaaaaggccttctactcaaatataactctgttccccagtcccatccccacagtatttactcaggatggaaacttttctaaggagggtaagccattcattcctcgattacagaaaagttcaaaattggtaattaaaattatttaaatgtaccgaactacggatagtgataggtggtcttggtagtcttgcttgtgcccttgctctctttgatgccatcaccttggccttcttcagttcatgaaactttctatgggcagtctggctgcagggcctttgtataagttgttccctgcatgaaatcctttctcccactttccccttcacctaacttcaacatatcctcccgatctcttcttaaatgctgcttcctcggagaaggcttc

SEQ ID NO: 1393 - DNA, 4001 bp, Homo sapiens
cacacatcacacaacacacacacacatcacaacacacacacacatcacaacacacacacacatcacaacacacacaacacaccccttcagttgaatccaaagacaaggggagaaattactccctccgaagtgccagctcagtcaagacaaaaggtgaaatgtattagctgcgtagcaggcccccatctccttcaattcttcctgcaatgcaattccaccacatccaatcatccccaaaccagaaggaggatagatctctgcctgccttcctccactgcccccacctcacagctggtatggcccctatccccagaggcttccactcttcacacacattttccctgggctattctcctattgctttaagttctgtgggctctgaggctggctttggctccacacaaacaattaaactcctgtccaaccaggtctcaaagccctgtggcttgcccttgccttgctggagatttgactgaggcccagcagggcccagcacatttccaagggtagatgagacgcactaggccctcatgccagggacacaggcaggcagaaaaggggtattgttgtcctctcccccacactgagggatgaggcatctctgctcaacacacacacacacacacacacacacacacacacacacaccccatgccaaaatgccaaggaaggagtcaggagcagaacctggctcaggacaggatgggggctgccatggggaccagattctaggtgattcagcactctgcccactcttggcccagcccatgggccacactcatgacagctccagatgccaaagtgctgacttggaggctgaagcagaatcttttctaaaatccaaaattatccagccctccagcagggctcctcatccaggcctttacatcagggctcaggccaagccccaggaggagtctgctcagtcattcccctggaccctgccccttccccatcctagtttcccaatgcctagcaccccctcccccaatccatctaggaaacaaacctgaacagctagaggagtagagtggctgcatggctggagaggaacataagagagaggcctactaacccccagcattcttccccaagccacaaataggatcgaacatgcagaaaggggttatattccacaaccaagatccccacccagggaaggggggtccagaggccactgagggagggctgggtacaggctgtatggctccacacagcaccaggaagggcagctagggaaggtgacgggtgtcaggccagctaacagccaaaggggggagaaggcggggttcttgagagggactgtgatgcaggaggacaccaagaggcagctgggaaggggctgggacagggcgtgcaagggggaaccaggggaggacagaaactgagggagcaaatggagagacaggacaccaactggtaggggcatgagatggggaagagaataggggaggcaagaaggggctgatgtgtgcggtaggaaatacaggaggcatggggtcatccaaagtggggtgtcgaggtaaacagaagtacaagggcaggcagggctcacggatgaggcggggacagagaggaaagggaaagggttgaggatgcgggaagggggaggggacgcggccaacgagatagaaagggtgttggggtgggcagggggctgggagctggacggggacggggtgggcatacgaacagaatcggatggattcggggcaggtgacagtgtggagaggggaagggatgggaatgtggacggagggggagggggcaggtcaggggatggagacagacgagggcgggaacaagggggtgtcgctaggtgggtttccatgactctctacccccatctctccggtgttcgcgctcgcctacctccaagggctcgggctccggccctgggcgctgtccgagctgtccgctgccggcgccgccacttcccccgcgtcccctgcagcgcctctcgccgccagccgccgcattagggcagagaccagcccgtgcgcgtccccgggcggccggcgcgcccccgacaccctgcgtgcgcgcccccgcgcccctcccttcgcgctcctagcggccgctgagcggggaccaggacagaggcggagggaaggatgctccggacgcagccccgcctggcgcgctggggagcggtgcgcagagccagggccggaaaaaaaaatcctcctttctcttttcacctgaggcctctttgcgggcttgcctggagagtgataactagtctccccgtttccgttcgctgagcacctactacgtgcaaagcacacaggaggaagtaccctgaagccccaacaggatcgcttgtttgcacctccaccatagactgtgactttagggagcaggaagttgccggacagcttgtgttctcagggcctagcacagagacttgtttgtggtaaactctccagcaacatttgttgattggcaagtcgttggatcctgattcagggatgtgagagaggttgtgactgctatgaacagtgcggggctttcttttagaaatgggagatttcctctgccctagggggactcaggcctcagtcgtggctggagaactatctgacatgatagcaagacatttatctgtggacatcagtttccacaactgaaccatgaaaagttgattgggtggtcgcccaaggtctcttctagctctgacacgaagactgcattaggttctgtgcacaggatctgagctcagaattatcacctgaaacagtggaaagatcccagttagggaatcatagaatctttgtcttggaagagcacttggaagcttctagttcagctcctcatccaaaactacagtcccctgcagcatccctctgtggccccattcaagggctactttctctgtgctcatagctcctaccctggcaccactgtcttttattctggatgagaacaccaaagttcaaggaacctgcccaagtaataattcaaagcccagatgcatctgacagtgcctagttaaaactactttgctattttaagatgggccctacaagttttagatttcaccaatactagaatcttctaatatggtcaagttgaaggatcacaggatttgccaagaaagtcctggcttaccagcagggtaaacttgggcagttcacttaacctctctaagtcttctttttcccatctgtaaaatgggcatagagtgagcatcaatgagataaggtactgaaccaaactgttctttacaaatgttaattattgttcagccttccctcccctttcttcattacttttaaacagcaaatacacgaaggtctagagagatggaccccacacagtggtttggtggttgaaactgaactgggactcaagtttcatggccttagtataaagaaattaagtgtgggcctaaagggagcatggtgacccccagaggccctgagggtgaaggtgtttccttggcctcggtggtgtcccagagctgcaggcaagtcctgatggagggagaggcaccccctgctggtgatggactctggggactaagaagagcctacgcaccttgcaggctgttctgctgctgtgtcaggaacagactcactcaggaccgagggcagaaagtggttgctctttttctttcctgacatttatctggccttcctgcttctttttcttccctgggtttgcacctctagttctggctggaaccctcagcaagcatggactttcaacccagacctgaaacctcactcactgtgtcctctgtcatggtgaatggcaagtcacaggattttcacattccctagtgtttcattcctcccaatgaaattccataagccctgcctcatcctgggctcagaccaagagaaagccccaggtatgagtctcgggcacttgaagccatcctcttccacactggtccctaggaagtgtggggaaactggcagattcgtgcatcattggtggaggtttaacttggtatggcctttttgggagagcaatacagcagtaccatcaagact

SEQ ID NO: 1394 - DNA, 4001 bp, Homo sapiens
ttgtttccaccaaccatttgctgtgtgactctaagctagcaaaggcttgagtttccgcgaacacaacgtggggtgggggtcgtcccagggacactggaatggggagatggtggggagatcagggcactctcagctctaccctacaggtggggctttggagagcctgactgcttggggtgtctgctgtgtctccgtttcctgtagagctttagaattccagattcttaagatagacaccaaagccatctatttataggctcaccttgcagggacccctcacccactggccctggggatcaaagcagcaggtgagtgagagaggagaagtggcagaagagaaatgagccttcaccacttccctgataacccaatttcctctgcacaccctccctccggggacttggccttaccaggctccttattagactgtctgcctgggactgttaatgagaaactctcctcgagccagcctcgcagacagttaccatgggaacaggtcctttcacaactctcctctcctccctccctccctccctgtgcacatgcacacgtgtgtgggcatgcatacatatgcacacatacattcaagtccacatgcctgggggtattgggagggcagcaggggctttgcccatcttacctctgggtctgacttacagttactactggtgttctatcatccaaaaagtcccctcctctggggcaggggcagctattatgggtgaagtagagtgccaggagggctgagatacctccaactcttctccaaactgtggtaactccaggaccaggggtctggctttggagagctcagggacgactttttagagtttgtattactctcctgcccccctccccagacatctgttaactggagagagcccaagccaatgttggtgtcatgtgggtcccctctgttccttgacacaaggaacaggggtcagagatggcatgctcacatcctagcctggggatgctaagacattttgccagaagtgtcagagttgtggtaaaggtggcacacacctaaaggcagggccgaggagcttggctgccaatacatgggccattgatgaacgcagcaacagatatggttggtggagacatggctgttagatttgcattttaagccccttactttatgattctgatggtcaaataatgccccctctatgagaaacagaatgacagcgattttactttttatctttactgcaggaaagttgaaaacaatgagaaggaatccatgcctggttctcccatgcggcatgataatggggctctattttaatgtctcatttagccatgtcttttgcaaagataattctgctcccagcccttcccaggcctgtgtcctcctgattactccagccaagagggcccgaagggtgtggatttgaatatatcagacattagaaaggcaagtaagaactgctccaccacacttgaccctggactgctttcatgggcaagtcaagaccacagaggacctggagaggtgagcagagggaaaaacccaagtggcactcagaatcccaaactccgccacctctagtcccactcagctggctccaggcaccccaagcatcagctcagccacagccctgagaaactggctctgcaacatacagtctcaaacttccaaacatgagcctgtgtcaattctttggagagaaacccagctctgaatctcagaatccactgcgtcccctctcctcaatctccttggattatctgaactttcctctgaccttccctcccctcccacccctctgcccaaaatcaggaaaaaaaagagaagagaatggggcaggactcacgatccataggaatttcgatggctccgccaagactgaggaggcagaggaggaaggctgcatggacccagggcggcggtggctgcctggccatcctcggcacctggccctgctccctgctccccagcactcggggtcttgtcacctcgagccgctttaactgggcctcctggacagcactcagctgtggaaagaaacataagagcaagtgagtttttcatgaacttgtggtttgctctagcaatcctacagggctttggaggaccgaagagcccccttggtcacagagtaatgttctagatagagcagagtttcttaacctcaacactactgacacgtgggactgaacaattcttggcctggggaactgtcctgggtattgtaagatgtttagcagcatctctgacctctacccgatagaagccagtacagcccacccccttcaccactaccaatcagaaatgtctccagacattggcaattgttccctggagggcaaaactcccagctgaaaaccactgttagagaaggaagggcaactctgcaaagaacagtcatgaaaacaaacattggcctattggcctgcaggcccagcaaccagaagatgccatgcaccgatctggtaagaaatgcaccaatctcacagcctctctgaaccacatgtgctgagtgtgcctggggttgagcatatttgcggtagaggcacagagatgagatcgcactgatgtcctttgatcccaggacgaagggggcagggtgacattggcaggactggggatcatgggttagataagtgaagacttggcgcacaaaggactttttgtcatttttgtagaaaaatgaatgatttctgcaagtattttgtgcagctaaggtacagtggtccctgatattgtccttttatagataacggcagtggtgagacaatgaccaggaagaagcgggcttcaggtggttggtagagtaaacagcatgtatgatgattcagtgttcatcctcaagcacaagaaatcattccagggcttacagggatggtgttaaaaatggttgtccaaggaacctagaatggatccttagagacaaacctttcttctcctcctctagaaagagaagagcaagaatggcctacagctgagactcaaatagagtgctttaagattgcctgaggttctgaaacatacactttaaaaaattggtccagtttgttattctactgtggtggcaagtcaaagaggaaggcaggaggtggcttctccagaattcctccagttttcctagattcatagctacctatcagatggacacatcattctcctgctcctattttattcggcagcaaattgaagcccactctcaattgtgcacatgcaccatctcctatccaccctgactgagggtgcagaagataagaacaggactccagtgcctgctctctgagggggcgagagatcctgggagacaaggccatccttctggagacctggagcaaaaagcaggtcactgattattgcaataggacaagggacttcccttgtgccaggatatggggcaaactaaaggattcttattcacatttttgcagtttctttcccagaagctgggcccagcaccaaacctcaactttgtgtatatttctggactcctccacttgcctcctttcccactgccaccaccgtggttttgatcaccaacatttcatgccagagttactgcaacagcttcctaagtggtctctccaggtccacttttcccccctgtggtttgttttttactttattatttttaattgacacataataattgtacgcatttatgggatgcagtgtgatatgcccctctgatttactctccactcataaccaaagctgttatttctaaaggcaaacagaaatgtgctactcccctagtgcaactctcaatagctcactgctgcttgggagttaaaggtagtgtccttgacatggctcagaggccctgcataatgcatcccctctgctagctcactgctcatctctcccttgcatcctgtgttccagccaagactgctcttctaccagctccctcggtacatcatgcttggtcttgcttactgacttttgcaccattaagctctggtctagaacactctgtgtctgccctctctcgttagtatttgccaggtatgacatacgtgtccttcatctg

SEQ ID NO: 1395 - DNA, 4001 bp, Homo sapiens
agcgacaacaccataactctgtagttcttaccaaaactaactttattaactggcatttttcaacattttttcttctctggtttttgacctgctggtcacttctgtgcagatttttcttatgtgcatataatcctaaattgaatcatgttgctgaagtgagtgtccaagtgaattcttacatcaaatttccaagccagatttgactggaaggcctaaagccttgggaaatagctcgatgggaatttaatccaaagaagggaaagagcccatattattttccattcacttcccaacagaattgggtgtctacgctgctcagagaggaggagatggagatattttagtcagaggctgccagttactgtctccaagacaagctactgcagttggtttccactggatttgtatcaagcacttgtccaagaggccagactccaactaacagttagcaagtcagcgatcttccatacactctccacgggggttgttgtggtaacaaggagaaacgtgaacttggccagtcttaacgtcctatttcctactgaccatatacttaaaaagcagaattcaagaatagccaagaaaaaacactcccctaatttctttcaagtgtgtaagacagctgctagtccacatgtgaaacattctctcctttaaaactgttgtttagagttcaagaagagaggtttacctattaatttcaaagtacttgaaatgccaaagcttctaagataatcagagtaagaagttttgtaatgctgaatacgcaatatattacttcccaaagctcactacagtcccacaattcaggcaagatttaagccacacgtttcttaaagttgaacttcacattccacaagttaccagcttccctgagcataaaaataatagctaatgcaaagttaataacaatacaaagttatttctctagcagaatgtttctttttccaaaagacaaggaagaaggcacacgattcatgcaaaactcccccgatcagcttttttttttttcttaaacgcgaaaattctttcctattgtgcttgctaaatccggaagcgcttgtagctttgacagcttgaaccacaccatccccttcagagctgcagagaacttcagatctcctctgccccgccccctctggctattgagaactattgtacacccaagcttccttatgattggataaagcttttgtcaatctcccaagttgtcccattgattagaggatcaaatcgtcaattattctccgggtccagacatttcttttcgggttaggttgactgctgaggccagacgtcttttacagaacagagcacgtacaggatttccccccacccctttctggaaccgagcaagcgctaggaggaaaaaaaaatctgtcaagctcagcaattttttcaaatcccgaaaaaaaaaaaaaagaaaaagaaaacccggtctctgatgcacatagcaaaaacaccatcaacaaagctacatctttaaaacaaaaccatcacaatagacatttacccagcaatcacttaagtgcatatgcgagctagagaaattttagtcttagccattaaacaaaatcattctaccattgtttataaaacgcatatcatataaatgcaaaatagaaagtttaagatgtaccacgtaccattgcaatgtaaaaagagtacgtgagaaactttaaaatgctcagacgaattgcttcatttgttgtccccttttttttgcatttaaaaaatatctaaataaacttggaaccgttgaaaacccggaagagattttttaaaaagctgttggccaattgcaggcttcttggagaattttttttttaactccaaatcagaaggcttttgcaattgcaaggcgcgctctctccctctctcactgtctcgctctcgctcgctcgctcgctcgctctcactctctcttttgaaagcgatccaacccgggctggctggttctcagattcgctctggttttgccttgcgtgctttggattgtacgagactttgcagaagttgcaatcgattcggcagtccctctctcctctcccaactcccttgtttatttccgcaatcgctgcaatttgcatagtaaccacgcacgaggtaccggcggcagcctgcggcggagggggcagggagggggcagggaaaaggccttgcccccttctcccctcctccagtctgtctccccgccagtcgtctcctcccctacggcgcgtggccaataggagcccctacattcggcgcaagctccggtctggacaccgttctgaagaaaagcccctgtgttactaggcccggctctcggaatcgttctgttggcgcagtacaagttcccctgcttgcgcacctcgcagccggtactgggcaacgtgaggataaagtacctttgcctgcggttgtgcgggttttgcaccttttaatcaagtctgcacacctgctctctcggtttctttttccagggcctctcgtgagttattaggctagttcatgatggttagtgagagatttaacctttatttgcactagtgtagaccaagagttaaagatcctctttggtgcattaaatcaagagagtgcaaaatgtcacagggaacttgcagtgaaataaagcgtctaccctaggttaggaaagaaaaagacagtggctctattctctgcagatgactgaacataaaattgttaggtgggctccctcaagaataaagctgttcttttaaggcaggagatacggtgaaattctaatttaattgccaagcatctaatttgtcaatatccttacaaaacctgggttccacaaaattaaaggagacccctccccttcctactcccctaagagaagagctgtaagagttttgacatttaaaaggggggttttaaaagataattattggaacattaagtccttcatctcactgactcaccttatttcattaacccagactctttaagaccatgtagtctggatatttcaatgtcaacagtttaagtgtttgttttaaacaacaaaatagccattggtgcagagcaaggaaataagactctgaagggagggagttatctctttaaatggaaagcacacaaccaggctactgcggttttcgttgttgtttttaaaaatgtgattgctggctgggcacggtcgctcacgcctgtaatcccaacactttgggaggccgaggtgggcggatcacaaggtcaggagatcgagaccatcctgcccaacatggtgaaaccccgtctctaccaaaattacaaaaattagccgggtgtggtggcgcgtgcctgtaatcccagttacttgggaggctgaggcacgagaatcgcttgaacccagcaggcggaggttgcagtgagccaagatcacaccactgcactccagcctggtgacagagcgagactctgtctcaaaaaaaaaaaattgtgtttgctttgagtcagttaaggagcataggacattttgctgaataacttagaggaaaacgtgtgcttacctggcttgattaaaagtatccagtaagaagtcaagagtaataggaagcaacctggcagttgtctgattttcttaactgtccttggtgaaggtacctaattaattaataacaggaccttgcatagttaaattggaggttagagaaacctcatattttatgttgaatcacattttttgcttcggtcttgctctctacaactagtcgactgatgtagccgtactgtggctggccttggcattagctttgctgttctggtctgcccctcatagatgcagatatgctcttggctgtagcaagcctgtggcatttaatcctagcctcctccactgagcatccatttccacttggtgtactactctcacctagaaatacacttgatgtgatgtagcggcttcagtttaaataaaaaataatactttgggaggccgaggcaggtggatcaccaggtcaggatctcgagaccagcctggccaacatggtgaaaccccgtctctactaaaaata

SEQ ID NO: 1396 - DNA, 4001 bp, Homo sapiens
cccatgctctgagttgagtcggaggggaaaagttgcccccgtcctgcgcgcggagcggccggagtcgcgcggtggcggtggtggtggtggcggcggcggcggcggggggagccgtgtccggcccgggccgccgctccggctcccggctaggagcccaactctgcccggcgctacccggcccgcggcccgcggcctccggcgttcggcgccctgcacaacgtgggctcgtctcggccccgaaactttcactccgggagagccaacgggccaccggcgcgcggcgaggacgcaggctccacccggccggcgcgggggaacgcgcgtccacgtagccccgctcagccgagggctagccgcagcctgcccgcgtccgaggggcgctgtccgggccggggccgggacgggagcccgcgtcctttccgcggccggaccccgaaggctgacaaacaataaacaaaagtaagagttcgggaagacggcggggggctgcggcagcgcaggctgcggggagcgggccgttgggcgcaggcacccgaggtctccccgcacccgaggactgcagccggcccgagcgtgcggggtgagcggtgggctccgtcggcggccccctccccgggcgctgcggcactacggaatccctgctcccggcagcagaaacgctgagccagatttctgcgtgtcatggactgcaaccccgccgaaacacgtgcggggtgtccgaaaacactgctgttccgcagtccgtcgccccgatattaattaacgcattaataagagggcgccattagccatgtgcccacacaaatggccgtgcaagaggaatgcacccgcatggaaacaaagttactttctttaagcgggatccccccccccacccgcgggcacacgcgcgcacacacacagaaacacgcgcagacacagacacacaccgagacgcacgccctgggcccggccggagcgacggccccggtgccccccacccagccccagccctgcccccggcgccccggcccccaagccctccgcatccacgccgcggcttacctgggtgagacagagcggagaatacataactgccgggcgctggggtatgcgtgtgcgtctgggtgtgcggtttggaggtgtgcgtgagtgtgggtgagagaggagaaagagggagagaggaagagagagagagagagagagagagaaggggggagaaaaaaaaatcaagcctgcttcttgcgttcacatttccaagtcggctcaactgcagccagccagccagcgctattgccgctccatgagctgaactttaaccccgcctagagtttccctacactccactatacatgcctactgtacgcgggtgttaaaggcatagcgcaccctttcccgctcccgcgccggcccggccgggtgcccgcgagctgcccgcgcgcccgcctccgcctccgctctgcaccgcaccgcacagccgccgcccgctcgcgccgccgccgcgggggggagggggtgtgggggagggggcggctgcggcgccgcgcggccagccgggtcccgagcctccgcggccgctcgcgctcgcaggctggctcgctcgctccccggctctctccgtggctcgctccttgctcgctcgcttgctcgctctcccgctcgctccccggcccccccgccccctcccccgatcagcgcattactgggtaacgcagtgaggagcagttacagtctgtactcccgggcagctataggctgccacaggatgtgcttaagcaaacaaaactacttttcctcgtccccatccccccacccccgctgcagacctccgcggacctcggtggaggacttgggcaactttgccaggttgccccgcaccccccgggccaccgcgtgggcacgtagagaaccgaggaggaggccgggcggcacatttgcatgtatgcaaatttctttgaaaaatcagacctcctaggtaactttttttcccccactgaaatgcggtaaggctcaaagcattgtaatctctccagcgaagctttctgtgggaatagattcgtcggcagaggtaattatgcacacaatcctgcaaactttgtgcagcttcggtcctgtggcattcagaagcgggggtggtgaggaatcagtgcccacagaagattcaccggatttggggggcgggggtctggagaaaagaaggcggagattaatgagcgttatccctcccaggactgtgaaactagtgggtttgaacacagacgccatagaaaaagttctatcacgttcagaaacaacagtggtttagctgtgacatcttttactttttaggaggaaaaaaatatgtgaaagggatgtccccttagggaagggagatattctgatccacaaacgcgtgcccagaactggacataggctatcattaccgtcccagtttctgggacacctctggaagggtgccttttaagaatcccttttttccctcccccaggtaatagttcttaaaatggaaaagagcttcctgcaattattttaggtttgctaaagtattgttttggcagaaaagaggggggtggtttttagggtttggcaagttgccagtaagcctgcttttccagttttttttttttaacctcatattttctctctaggctctcctctctcggaggggggaaagcctacctgcctcttctaagcccccatcccttattttacttctcttcctcatgatggtttgcaaaatgctgcatttgacaacccttctcaaaattccaaaaggaaagaggtaggtatcatgttgaaagacactggcacacaggggaatctgcccttcggtggaggtgacataaccagagagtctctaaagaggggacattcctgtaggaaagtgagggtaagtgatgtgttaacaagtgagggtgagtgatgtgttaaggccactctcattcagacttcttttcaaagcaaggggcaggaaatactgtactggagaaagagcaaaagagaacctctgaaataattctgcatctgtctaaagttattttatgcttgtactttagttactttattgccaaaataattcccgaatgctcaagaaccattctctctcccaccctccctcctgaacatccttggaaatctctcaagattatttactaaggagtgaggagaaataatgatttcagcctttaatgagagagtccattttcccaaacttaacccactgcttttccttggttcctctcagattttagtaggggaggaatgtcctaaaagccaagctgtgttacagagacaacatccctggccacgagaacctttgctgggatctataacttcaatgcgctccaagtttcctcgatagaagtttctggctgacggtcccaacatgtaactgaggcacagtgaaaagttattgttcagagtgtgtactcgggaagctctcttccagagcagattaaaatctttcttttggtgtattaaaagatacacttcacatctgcctattttcaaaacggcaaagattcttacttttgagtctcaaggaaaaaaaagattttttttaaaaaggactggcatgtcgccctgttttttttttttaatgggggaagtaatttaatgctgatatttctactttaaaaacttcttttgttgcagcagtggatgtgccccgcgatttccagctttctgcggttagcaatattatcttaagtaacttttggcgcccttcgtaagacttttggatatgggacgattgtttgcgccctctaggcaagggctggatccaagttcagcaccaaagcccttcacatccgctcctgctttctctcctatctccgccagctcccgctccctcccccgcggagggagggggggaggcgggggaacactacaaagcacagttccaactacagcctttggaaacaagactgagaaaaatacagtagaagagttacagttacagaaaggcttctggtaactttctctccaacaggcataaatttaaacacacgcacaaagaaaca

SEQ ID NO: 1397 - DNA, 4001 bp, Homo sapiens
tattattactgttagatattgcaataagaagggatgtcatgtgggaaataaatccagaatctagagaggagagcgaaaactactgatactttttagccttccagaaactattccggttaaaccgttatctcctactaaatgaaggcaagaagtggtaggttttttaagggagaggtgaataaacattttatgtgaagcatataacttcatgtaggtgattaatggtcagatcctaatgtaccaaagcagtatgaaatctcacgcttaaaaaaaaaatagcgcaaaaccactttgacttcaagccttttagtcaaggaaaacaaataacatattcaaaggggaccggatttgaagtctcgaagtagcaatattttgcctgggggtgggtagacaagggaggaatggacaggggggcacggaaaggagaggcggtggggcgcaagagccccatgctctgagttgagtcggaggggaaaagttgcccccgtcctgcgcgcggagcggccggagtcgcgcggtggcggtggtggtggtggcggcggcggcggcggggggagccgtgtccggcccgggccgccgctccggctcccggctaggagcccaactctgcccggcgctacccggcccgcggcccgcggcctccggcgttcggcgccctgcacaacgtgggctcgtctcggccccgaaactttcactccgggagagccaacgggccaccggcgcgcggcgaggacgcaggctccacccggccggcgcgggggaacgcgcgtccacgtagccccgctcagccgagggctagccgcagcctgcccgcgtccgaggggcgctgtccgggccggggccgggacgggagcccgcgtcctttccgcggccggaccccgaaggctgacaaacaataaacaaaagtaagagttcgggaagacggcggggggctgcggcagcgcaggctgcggggagcgggccgttgggcgcaggcacccgaggtctccccgcacccgaggactgcagccggcccgagcgtgcggggtgagcggtgggctccgtcggcggccccctccccgggcgctgcggcactacggaatccctgctcccggcagcagaaacgctgagccagatttctgcgtgtcatggactgcaaccccgccgaaacacgtgcggggtgtccgaaaacactgctgttccgcagtccgtcgccccgatattaattaacgcattaataagagggcgccattagccatgtgcccacacaaatggccgtgcaagaggaatgcacccgcatggaaacaaagttactttctttaagcgggatccccccccccacccgcgggcacacgcgcgcacacacacagaaacacgcgcagacacagacacacaccgagacgcacgccctgggcccggccggagcgacggccccggtgccccccacccagccccagccctgcccccggcgccccggcccccaagccctccgcatccacgccgcggcttacctgggtgagacagagcggagaatacataactgccgggcgctggggtatgcgtgtgcgtctgggtgtgcggtttggaggtgtgcgtgagtgtgggtgagagaggagaaagagggagagaggaagagagagagagagagagagagagaaggggggagaaaaaaaaatcaagcctgcttcttgcgttcacatttccaagtcggctcaactgcagccagccagccagcgctattgccgctccatgagctgaactttaaccccgcctagagtttccctacactccactatacatgcctactgtacgcgggtgttaaaggcatagcgcaccctttcccgctcccgcgccggcccggccgggtgcccgcgagctgcccgcgcgcccgcctccgcctccgctctgcaccgcaccgcacagccgccgcccgctcgcgccgccgccgcgggggggagggggtgtgggggagggggcggctgcggcgccgcgcggccagccgggtcccgagcctccgcggccgctcgcgctcgcaggctggctcgctcgctccccggctctctccgtggctcgctccttgctcgctcgcttgctcgctctcccgctcgctccccggcccccccgccccctcccccgatcagcgcattactgggtaacgcagtgaggagcagttacagtctgtactcccgggcagctataggctgccacaggatgtgcttaagcaaacaaaactacttttcctcgtccccatccccccacccccgctgcagacctccgcggacctcggtggaggacttgggcaactttgccaggttgccccgcaccccccgggccaccgcgtgggcacgtagagaaccgaggaggaggccgggcggcacatttgcatgtatgcaaatttctttgaaaaatcagacctcctaggtaactttttttcccccactgaaatgcggtaaggctcaaagcattgtaatctctccagcgaagctttctgtgggaatagattcgtcggcagaggtaattatgcacacaatcctgcaaactttgtgcagcttcggtcctgtggcattcagaagcgggggtggtgaggaatcagtgcccacagaagattcaccggatttggggggcgggggtctggagaaaagaaggcggagattaatgagcgttatccctcccaggactgtgaaactagtgggtttgaacacagacgccatagaaaaagttctatcacgttcagaaacaacagtggtttagctgtgacatcttttactttttaggaggaaaaaaatatgtgaaagggatgtccccttagggaagggagatattctgatccacaaacgcgtgcccagaactggacataggctatcattaccgtcccagtttctgggacacctctggaagggtgccttttaagaatcccttttttccctcccccaggtaatagttcttaaaatggaaaagagcttcctgcaattattttaggtttgctaaagtattgttttggcagaaaagaggggggtggtttttagggtttggcaagttgccagtaagcctgcttttccagttttttttttttaacctcatattttctctctaggctctcctctctcggaggggggaaagcctacctgcctcttctaagcccccatcccttattttacttctcttcctcatgatggtttgcaaaatgctgcatttgacaacccttctcaaaattccaaaaggaaagaggtaggtatcatgttgaaagacactggcacacaggggaatctgcccttcggtggaggtgacataaccagagagtctctaaagaggggacattcctgtaggaaagtgagggtaagtgatgtgttaacaagtgagggtgagtgatgtgttaaggccactctcattcagacttcttttcaaagcaaggggcaggaaatactgtactggagaaagagcaaaagagaacctctgaaataattctgcatctgtctaaagttattttatgcttgtactttagttactttattgccaaaataattcccgaatgctcaagaaccattctctctcccaccctccctcctgaacatccttggaaatctctcaagattatttactaaggagtgaggagaaataatgatttcagcctttaatgagagagtccattttcccaaacttaacccactgcttttccttggttcctctcagattttagtaggggaggaatgtcctaaaagccaagctgtgttacagagacaacatccctggccacgagaacctttgctgggatctataacttcaatgcgctccaagtttcctcgatagaagtttctggctgacggtcccaacatgtaactgaggcacagtgaaaagttattgttcagagtgtgtactcgggaagctctcttccagagcagattaaaatctttcttttggtgtattaaaagatacacttcacatctgcctattttcaaaacggcaaagattcttacttttgagtctcaaggaaaaaaaagattttttttaaaaaggactggcat

SEQ ID NO: 1398 - DNA, 4001 bp, Homo sapiens
gcaattctcttcctctgctacttatcaattcccttctccagaaaatgtagttgcattcacataaaactaaatttgaaaaccctaggagtttcttgaaattggtatgaaaacagaagagtaccatctaaagctaaaaaggactacctaacaaaaacaaggaaaaacaaattaggaaaacacagatgtttaacataaatgtgtttccatggccctcacacactgggacgagcaaatgtaaagcaatacaagtaactacgattcagattcagtggaaaagaacatattcccaacaagttgactggaacgactctggattggaataaaaactttttgaatatgaaccagaaagtgttgacaagtcctgttccttaagaagctatgcatgggcttttttttggtttggagctgcttatttgaaaaaacaaacaaaaaattcaaagtacacatgggaatgggtatactttttaggcacatatacaaggaaataaaccaagaccgaaaatttctggctagctccctttcccttaaaggggaacctaacaatatttactcaacaaataactaccaactacctaatatttgctaatgtggctttggaaactcagccatgacctgtatccttcctagagcagcaaatttcatatacaacatctcaaaactacttgtatggtcctgagactcaataatgtataactgttctattaatacacttcccaagtccgaaaatgtcccctaaaatgcttcctatatcagattttgtcactttaaatctgatactacttaatgctgtgcttcctaggctcggacagagcacacttctcaatagcattcctctctcggtttacttgctcctcacatcacatcccaggtccgttgactctggactccagggctccaccaaaacctcagtgtttgaatgcttgcactctccagcaaaatccctgatccgattctaccgttcagctatgcccctagccctgatgcctttcttcctacaccatacactcacaccgtggacttcagggccacttccaaactgggtcacattagcaaccctggatctcgaagactctcagcctgtcacttgggtttcggtgtttccaagcctggaaccctgagggcctgcacaccccaatcttgggccatgcatgtaccaggaaaagcacctctgaaagtgagtgtcccccattcccaggccatggcctaagctacccccaaagtacctgccaggccatcaccctctcttcccccttaaagcctctaggctcgccctctcgccgcaaccccacgcctgcgccgcagggggtcattgccccagccgccctagcccaagacgcgcgcatccccgcagcctcagattccttcatcaccccctagaccggagctggcgcgtccaataaggtgccaggtccgcggcctccccgccaccgaccaatcacgagcgagcccccccgccgtcgccttccgccaatgggagaaagcccgcgggccgggccgacgaggcacacggaccccacgagcgcggcggcggcgacagcagcgggccaggcaagagcacaacatggcggcgggcaggacggaccgagctacagcagcggccgcgcgaggaagtgaggtctctggcgaaggcgggaagcgctgcccctccccccgccgccgcttccctatcaccctcgcacagaaactcccgcacactcacacacctctgctcaggagtccaggaagagcaggagccgcccccgcgctcctacggagtcgggcaatgcagaggcccaggcgcggcggaggggagggggaagtgtgcgtcacggagaacggagcgcgcgcgaagcgggggcacaagcaagatggcggccacgccgtttgcaccgtttccccttttcccttccccctcccttggcgcctggactcccagtatcgtgcggtgcgcagaagctgtgctccttgaggtctcgcgagaattgggaaggggcgacgacagagggaggcggaatgagatctgagagttttaaccccgccccctttcgggagctcgagatctgagttttgaccccgccccctttcgggggatccggaggcgctgcccagtgacctccaccaccctgcctatccttgtggatctccttggtgcgagcttgaattttaggaaataagtaggtgtgtgcgcgtgcccttgagttttaggaactaagtaggggcgtgtgtgtgtatttgtgtttttaatttggggagaaagaactgggggatgaaggtcgacatggcgttccagattaagcatgccgttcaagtagacagctactggcaccttaaattcataaaagagcatttagcaccaaactgtaaagtgatgtcctctagaataaagaacagtacttaccaagaatagttagcttgtaaccttacgtcgacatagttgttcttatttgaatgcagattttaaagttttatcacgcagttggaaaccacagctactatgagcatggattttttcatacttatctctttcatttccgtgaccacttggtccaaaggcatcaggattgtatccattttacaaatgataaaactgaagctcaaaaaggttaagtaacttgatctaagtccccacagctagtaagtgtcaaaaccccatccgaataacttcaaaacctgtaggtatagtcatcaaatgtgtcttgaatggaattacctacagtgagagttagtgcattaggtaacaagcgcagagaggaatgactgcctctgctgatggtaaccttgaattttacaaatgacactggagcctttctgagactagtgttgcatgggtcctcaataaaatcacactgttgttactcacttcctttgggtttataaccctggtgataaagtaattgagaatagtggagtaaaccctcgacttgaattcaggaaaattgttttcaaatccagtttcaataaatctcacatcaggcactctatttgatgaatgaatgaacaaaacctaactataagacacttgacttcagggagtctcaattccttcatctgtaaaaagatctaattcctaacttttggtaatgttggggagagtgaatgaaataatgtgagagtgcttcgtaaattgcaaaagtgttataaagaagttactggtaagagctacgagtgtctcgctgcactctagcatgggcgacagtgcgaggccctgtctcagaaaaaaaaaaagttacttataatgacattttcagacatgagaaatggcataaaattaaaaacagattcaagagaatagtatgttgagattgtagagacagatgtagctaatggaaaaaagctaaataagtctctctacagatgtttattgagtacttattgcatatactatgcttgccaaaaaatgtaaaagtgtacatttagttacaatgaagcagcacaagttattattagtgattattgttataattaagtattgatcacacttaggggctgcagtctatttccttccaagagcctggaagttgggttgccctcagaaataaataaaaatctacatagaggaaattagctaagagtgatattaagtatatttaacaacaagtagtgctcaagcatagatgaagcagaattagaaatgcagctaggatcctggaggtatacgtctgtgctaggtgttaacccttcagttgctggtttgtgaataggaggtcccaagggatcccaggggaagggagtggtcaggaggtttgggacagcagctatttaccaggtagtactagagtatttcagtattttaatagtcaatgttataactgataacagtcaattgatacatataagcctaatattagtccttgctatagtctttattatcaatagcctccgcccttccctttctaaagccgttgctatctggcctgtccctaggagattagggtgaaagacttctcaccctaatgtcgtcaagcttggccttgttttgaccaatgaaatatgagtagaaatggcatgaaccggccgggcac

SEQ ID NO: 1399 - DNA, 4001 bp, Homo sapiens
ggaaaaaatgcagcaatttacttggtaaatcttccctttcacaatagaagccaagggatatgatttgaatacctagctgaagaacccatattctctatggttacaattctgtggtctgaatccttaagcagcacaagaaattcttaagaattatagtcttccattttatacactctaaacacccagaaatcaaagtagatgatccacttggaaatacaaaattatctggaagtttcattagtcaggtttatgttgatagctgatgtagcagataaaattacaggctttggcatcaggcaaccagggtttgaattctagctcaaccacttactgagtgacaccagacaagctacttaaactctctgatcctcagtttcctcatctgcaatatggggacgataatgcctacctattggagttaaaatatgccccaaaatagcaattctcttcctctgctacttatcaattcccttctccagaaaatgtagttgcattcacataaaactaaatttgaaaaccctaggagtttcttgaaattggtatgaaaacagaagagtaccatctaaagctaaaaaggactacctaacaaaaacaaggaaaaacaaattaggaaaacacagatgtttaacataaatgtgtttccatggccctcacacactgggacgagcaaatgtaaagcaatacaagtaactacgattcagattcagtggaaaagaacatattcccaacaagttgactggaacgactctggattggaataaaaactttttgaatatgaaccagaaagtgttgacaagtcctgttccttaagaagctatgcatgggcttttttttggtttggagctgcttatttgaaaaaacaaacaaaaaattcaaagtacacatgggaatgggtatactttttaggcacatatacaaggaaataaaccaagaccgaaaatttctggctagctccctttcccttaaaggggaacctaacaatatttactcaacaaataactaccaactacctaatatttgctaatgtggctttggaaactcagccatgacctgtatccttcctagagcagcaaatttcatatacaacatctcaaaactacttgtatggtcctgagactcaataatgtataactgttctattaatacacttcccaagtccgaaaatgtcccctaaaatgcttcctatatcagattttgtcactttaaatctgatactacttaatgctgtgcttcctaggctcggacagagcacacttctcaatagcattcctctctcggtttacttgctcctcacatcacatcccaggtccgttgactctggactccagggctccaccaaaacctcagtgtttgaatgcttgcactctccagcaaaatccctgatccgattctaccgttcagctatgcccctagccctgatgcctttcttcctacaccatacactcacaccgtggacttcagggccacttccaaactgggtcacattagcaaccctggatctcgaagactctcagcctgtcacttgggtttcggtgtttccaagcctggaaccctgagggcctgcacaccccaatcttgggccatgcatgtaccaggaaaagcacctctgaaagtgagtgtcccccattcccaggccatggcctaagctacccccaaagtacctgccaggccatcaccctctcttcccccttaaagcctctaggctcgccctctcgccgcaaccccacgcctgcgccgcagggggtcattgccccagccgccctagcccaagacgcgcgcatccccgcagcctcagattccttcatcaccccctagaccggagctggcgcgtccaataaggtgccaggtccgcggcctccccgccaccgaccaatcacgagcgagcccccccgccgtcgccttccgccaatgggagaaagcccgcgggccgggccgacgaggcacacggaccccacgagcgcggcggcggcgacagcagcgggccaggcaagagcacaacatggcggcgggcaggacggaccgagctacagcagcggccgcgcgaggaagtgaggtctctggcgaaggcgggaagcgctgcccctccccccgccgccgcttccctatcaccctcgcacagaaactcccgcacactcacacacctctgctcaggagtccaggaagagcaggagccgcccccgcgctcctacggagtcgggcaatgcagaggcccaggcgcggcggaggggagggggaagtgtgcgtcacggagaacggagcgcgcgcgaagcgggggcacaagcaagatggcggccacgccgtttgcaccgtttccccttttcccttccccctcccttggcgcctggactcccagtatcgtgcggtgcgcagaagctgtgctccttgaggtctcgcgagaattgggaaggggcgacgacagagggaggcggaatgagatctgagagttttaaccccgccccctttcgggagctcgagatctgagttttgaccccgccccctttcgggggatccggaggcgctgcccagtgacctccaccaccctgcctatccttgtggatctccttggtgcgagcttgaattttaggaaataagtaggtgtgtgcgcgtgcccttgagttttaggaactaagtaggggcgtgtgtgtgtatttgtgtttttaatttggggagaaagaactgggggatgaaggtcgacatggcgttccagattaagcatgccgttcaagtagacagctactggcaccttaaattcataaaagagcatttagcaccaaactgtaaagtgatgtcctctagaataaagaacagtacttaccaagaatagttagcttgtaaccttacgtcgacatagttgttcttatttgaatgcagattttaaagttttatcacgcagttggaaaccacagctactatgagcatggattttttcatacttatctctttcatttccgtgaccacttggtccaaaggcatcaggattgtatccattttacaaatgataaaactgaagctcaaaaaggttaagtaacttgatctaagtccccacagctagtaagtgtcaaaaccccatccgaataacttcaaaacctgtaggtatagtcatcaaatgtgtcttgaatggaattacctacagtgagagttagtgcattaggtaacaagcgcagagaggaatgactgcctctgctgatggtaaccttgaattttacaaatgacactggagcctttctgagactagtgttgcatgggtcctcaataaaatcacactgttgttactcacttcctttgggtttataaccctggtgataaagtaattgagaatagtggagtaaaccctcgacttgaattcaggaaaattgttttcaaatccagtttcaataaatctcacatcaggcactctatttgatgaatgaatgaacaaaacctaactataagacacttgacttcagggagtctcaattccttcatctgtaaaaagatctaattcctaacttttggtaatgttggggagagtgaatgaaataatgtgagagtgcttcgtaaattgcaaaagtgttataaagaagttactggtaagagctacgagtgtctcgctgcactctagcatgggcgacagtgcgaggccctgtctcagaaaaaaaaaaagttacttataatgacattttcagacatgagaaatggcataaaattaaaaacagattcaagagaatagtatgttgagattgtagagacagatgtagctaatggaaaaaagctaaataagtctctctacagatgtttattgagtacttattgcatatactatgcttgccaaaaaatgtaaaagtgtacatttagttacaatgaagcagcacaagttattattagtgattattgttataattaagtattgatcacacttaggggctgcagtctatttccttccaagagcctggaagttgggttgccctcagaaataaataaaaatctacatagaggaaattagctaagagtgatattaagta

SEQ ID NO: 1400 - DNA, 4001 bp, Homo sapiens
tgttggaaatgcagtggtgccagcagctggttctaaaatcctctgaggtgctcctatacttctgtcaaattagtgttctcatgccccagtgatcttggcttcccatttttggtgcttcctttttcccttcacctgcataaagatgttggggaaagagtggggtaggagtttggcaacatgtggcattaaccctatcccccttcaacaagaggaatgttcactttctgtgtgagtcaattccagctaggccagtctcagcccccagacccgcctgtctcctctgaccctctggaaacactgcccatcatgaattgacatttgggttgctcaggttgacgtatgacttattcaacaaaagagacccatcaggtttgatacagcctttcttctttcttctgtgactctgcagagggagaaagtttcagacattcaggaggaaactgtaaacacaggataagaagggctggcaggggccaatggctgctgcccttctgcactgcctcgagaaggggaaagattcccttccagcagacttaactgacggcttcaagagtttgaggaccctggagagaagttactgatggggtctccactgtcatttctgcatttgcagagtgcagctggctgtgcatggattggggaggaggggactggcactggcagtgggtgtgcccagaggatggagccagaacaattaatcaagtgacttttctacaggatttccattggccttggatgacagatggggcagaggcacccaggagagcactattttggtttccagctgggaacgtgcactaagttttccttaatacccacagcacccaaaaggctttgctgtaatacactttaatgcatgaaacactcataaattatccttcgaactgttacaacttccaacctggaacaacttggaaaaaccagcctagcaagcaggctcttttttaatctctcaaatcacaagagaagaaaaagttcaagcacgaaacaccttccttaagaatctcgaaattttttttgttttgtttttgttttttttttttttttttttttttttttttttttttttagaaggaggtttgtaattagagggagctaagctgcttgtttctgctggctcaaagttgcagctccctgacccctgagtcctctctccctcccctagatcctcctcgcctgaactcaaggcgctccccgccctaaccttccacgcccgcttctcccacacctggcagcagacagctggagatgaagcgtgtgacccaagtggcagggctgaaccttggcgacctctacctgaggttgtccaacgcggctccgtggagggccccggtacgccggacggaccccggcgttggctcgcagacttcctgcgttaacccccggggccctcagtcacgactcccagcccttccgagacgcgctgagggaactgccccaggtctagcgcgccccgttccgctcctccccctacctgggggccgcgcagcactttccctactcggcgctcacctcagccagcgcgctctgcgctccccccgcggtgctggccgccactcctcccgccctggcgcgccagctgccggcgcatccctctccgcgcccattcgctctccctcacttgcgcgttatccacttctagccctcgagctagaccctggcatggccgtgggcttctgcaggcgccagggctgctccctggactgcaggccatcctgggactagggactccacgaccagaactaacgctgttccctcggtccgactcgtcctcccgcgagggtcccgcgcccccacacccactcgggacatttctcagggctgctcttcggcctgcgggagcctcgggggtaaccagagagctcgccagaccggtatccttgcaaactctcccgcgaagcccagccacccctgcccgcgcccgcgctgcgcccctctcgggatcggctcggggcagcctgactcaccgctgcgctcccctccggctcccagcgctctctgctgtgccggagcgccgagctgctctcacacaggcttcttgaattcttagcccctcctcccgtactcctgagtcacacgctccaaatcctggcccccatccctcccctccccaccaccagccccgcacctgctgtggctgggctgtggtgcccggctggagggggtcctggggactacagacggatcgctcctggagggctggccagacccagccagagaaggactttaaaccttcagaggtcaaagggaaacccactggggtctgaggggccgcgcgcgcaaagccgggagggggagtttctggggcaccggcaggggtcgttgggccgactggctggggctgggcggagttgctcgcagcttccctcacctctccgccctgcccccgcgcgttgcccttcgccagtgcctccctggtctgcccggcgtcgccctcggtgccccaggcatcggctgctccttttcttcggggcgcctttccttatcccaggataggtgagcacccagggggagctccgcgaggggcaggtgcccaagctcctctgacaagggaaggcggctgcagaaccagctagaaggcccccaggcccggcaagtccagcatggggacaaggggcagaggacttcaggagtcaggagctagagccgggaccttaacttaaggccctgggttccaggaacttcccggagtccttggcccctctgaaactgtaggctgatttgcgcgactgtgtgcaatgctaatattcttttctgagctgaaggtccgcagctttcatcagttttgcaaggggtctgtgaccccagactgatatagccagcaaaccctaggcccccatgcccccctctccacactccaggccccacacaaattcttcctgacccttcaaaatttcttgagttccctcgattcagcctgacaggagagcttgcctgactttcccctgcccctctgccagggctgttcccaccccagcataaaatgagcaagggagaaatacccctgaagtcaaatttgtcaccaaatgtgcatcattaattgtagcattccaggggattcgtagctctttggaaatttacagccccactccctcccgtgttgagcttgtctgtgccttcgcttcttcctatagcaaaggtgggttggacccctaccctgtatggatgccacagaggagaagtaggtgtgaggagagtaacagggagggaaggtggggcacagaatctccctattgctggtaacaccagccagtgcaacttagcagaagggcaccctccagggaactgggatttagtgaagcagatgattcctgtcctaagtctgggggtggtcatttacccttaatggatggcacttgagcaagatgaagccctgactaggcatttccaactcccttgattcagattagtcttgaggtcttacttctttctattttcacgtttgctcccataagaaagttcattccatttacacatgctctgagaaggatgaaataggcaaaaagccctggaattggaagtcagccttagctttggtgtgaccttgttgtttcccagccttaggcttgtccacttctgacttgttcagatacaggctggtgtatgaacacactttggaagtgagggcaagaggccagggaacactgtgaatggccctttctacaaaagtagtatcatagtcgaggtgatccattaggaaatttatcatcgtcaattaaacaaaagaatttccagataacaggatgaattcatccatcaatcatgtcatgtataaacttgtttggaaagcactagccccaagccttacataatagctgcctgagaatttgggtatgaaattaaacttttagaataacagagaatttggttgttgaatgcagagcatttgtatgtgttcttgtggcatcattcagaaggacaaaaggatttgggacacttgtggttcttttccatgtggtatgtaagggggaaactttaagtgatgtaagcagattataagt

SEQ ID NO: 1401 - DNA, 4001 bp, Homo sapiens
attatacatttgcaggatgaaaaattgctagagatctgtttcacaacaatgtgaatatactgaacactactgaattgtacacttaaaaatggttaagattataaattgtatgctgttttttatctaaatgaataaataaaaggaggaaaaaatctgagcaagactgcagccacagccccaagagaagttagctatgactctagatgcttcccagttgtgaggggagaatacaagccttggccctgtggtcccctccctctcagggcccctctccacccttgctgcctgaggtggaggagcggataaacacacagattgcccattgtagaatagactaggacatatggagctctgcgcagctgccccagctctgcacagctcccctcccagttccccaaaccttcccagcagaaccattgtagatatgagatcctgtccactaaaaccaggggaagatatctcttctcaccaccaccccactgtgcacaaccagcctcttcctccacctctgtcttcgaaattttcagcccttgccattccctggcccttttggaggctgggcaaggaagattggggaaagggaacataatcaaccttctacccccatactctcccatagcccaaggaaggttcagacacggcctgcagaggacacagacagatttttggagctacccttatgggactcagctaaggtttgcttgtcctaggaccagaggagatcagggcaaggcagcacaaacatggcctgggaaaagctggggaaagggctttgcttgtgtgcagtgttaaaggggaacagtgggccactcaccatcagctcaactaagaatgattagaaacagaagcaccaaggtgcctgcaccatcactatctccccttcctccccagccctggctttcctgtctgatagatactctcaaaggggttaggatcctcccaagccttgccccaccccaccacacagaagataggttcaagtcaagccaacaaacagctatgaagctctggagggatgcaaagtcatccacatctgatgacaagtacacacacaatcttaacaggaaacagaaggtggttagtgctgaaattgagaacacattccatattctggggttcaaatgaactatggggggatggcaatagtgtgggaggccccaaagtcagcacctcccagtacatgtttagtgcccccaactccccaccccccatgctggggctgggagcaggagttcagctgcggagttcccaacacatttatcacatctatcacaggctaattctctctgcccggtccctatgttccttcatccctcatcactttgccatgcccttccttcccctctccgtgctccccatctggccccagtctcatctccacctggccccattgtcctccccagttccagtcccggcagcagcttctatttacccatcaagtcctcacccccaaatccacttctggtctcaaagttccagggtccaaggatcaggggagcagcaattccaagcctgcaggacaggacttcccaccccacttctgccagccctaacccaactgaggatagataggcacaaagagtcgaaggggaggagtggagaagagggacacgcggagacagggagagacacagcgcacaagggagagaactagagggaggctctaggaaggggcttgagccagagaatgggagggacacgcccatccctccccgcccatggtttcccctttacctagaaggaccctgtcaggggatccaagccggcaggacaaggggcagcgttgacagccccagtctcctctgggtgctcaaggctcatccgtctgcaaagttagtgaccagctttctagactctcaggggtagcgtggcatggctgtacaggctccagggcagataagaggggtacacattgtgggggtgtagggcccaggtggaagtggtgggcttggccaggtactggggccagccacactcacacacacaccctcagacacacacacctgagctggcccagccctatgtatatatatggagatacacacacacacccccagctctccattggctggcccaggcccacccccccctcatcaatattaaacagccaggccaggcagccattggcagagggatctgggaacccctcgggagctgggggcgggggctggccctgggtgggggcggggagcgggggagcagggacatctgttctccatgcatatttcataagcaagaaatggagagctggggaaggggtggggctggggcgagagccagggcaggaccacagatgaaccccctcagtctcccacaccagaggcagcagggcagaggctcccagcaagctatggttaagtgccatggccccattcggagtcccagcgtgacttggacagccccttcctggtgtctcttttttcctgagagggagactcttcaaggtactaacagggaaaccgagaaaagagcaagtgggtagcactaaaatgcagaagaggaccctagggtcctggccctcaagctcttatccttcataaagctggtacccactgcttgccagcctgcctgtagcaactgttcaggcccctaccctcatcaccctgggactcaatcacccccataccctcttaccccacccgctatcttcctacctaacccatcaccaaggggaggagcaggatcaaatttgggacacagaccccacaaggagtttttctaggctggccagcccaacctgacccactgggaattagagggctcttaggaagaaagaggtaagggctaaaaggagaggagtggaggagtgccaagacaggaagaaccaggattggaaggacactgggagaggagggcagggcagcctaggcaggctctgagtgtgttttgagggcatcaaatcagcaataagaaaaccagacacaaaattatatgcaaatgggcactgattaagctcccatcaatagctcagcagcctccagcatgtatatgcaagtgtgtgtgaatgtgaatgtaagtgtgagtgtgtgtgtgtatgtgtgtgttgccgagtggcaggattgaggaggggcagcacagggaccagagtgcatagagagacagtgcatagagggtttcagtgtctgaagttctctccccactcagctgttggatgtcttctctgaacctttgagagtattcaaaagaaccatgactggagaggactccagaggtagtgtggtacagtgaaaaaggctctgtcagctgtgtgaccttggacaaataacaaccttttgagcctggacctcttttcctgtaaaatggggttgattatagctgcttcttaggttgccatggaaattaagggagataatatgtgtagtgggcctagagcttagtaggagcacatcccaccttcaggctggagggacttgccatttccctgttgctggtcaaccttttctgggctttctccagggtgaagcattccctaagggggtcccataattcctccccaagctcccccacctgcccccatccctgagtctgggaggtgccaactcccacctgggcaggcccagacaggtgcccaggcgccagcagatgggctgagctggaggggaaaggaggcttgaggaggggggctggggggcaggggatcaggtggcatctcagttcttgcatcatcattgccatggtgctgattaaaaaccaatctccacctaatgagcccccagcaacaacaattctacctcctccactctcctgccctccaccccatccaagaaattgggagaccaagagactcaggagagagtgccatgggggagatgagagatacagaaagaaggggagatgaacagagacaggggaagcggagggaaacgacgagaaagacacgggaagataccgagactcagggagagaaaaaaatgagaaaccagagtcattgggtaacagacatgggaaagacatagggaaatgggaagacacagtctcatggggagattgagacacaaagg

SEQ ID NO: 1402 - DNA, 4001 bp, Homo sapiens
cacgcagacagccacacacataggggacctagggacacggcgacgtgggatcagacaatgcgcccggcagtctggcgaccaccttgcgggaaaatgccggcagccgggccgctgagggaggagaggatgcagagggaagggaagagaagggaagggcccggggcggggcaggcggggactagcgggtgcagcgcgtgttgtcccggcgggagctgcatctctgccggcaaagttcgggcgctcccggaaccggagctcggcaggctgcagctgtccccgggtggcctggccaagtccgggcatgtcggtgcttagccttcctctaacttaactgtgccctcttggaaacgccacctggccaggcttctctggggcgcctggagcactggcccggactgtgcgccttctgggagggggccgctcagaaccgctgggcttccgggtaattcgggcttcgagaaagggcccggcaggaggagaaaggcccctgcaggggctgcacgcaccgcccctgggcgtcgggagtgaggaccaggctgagaactcggggccccggcgtgggcagcctccacgacgctcggcacgggagaaatccgcgtcggcgacgtataggagcgtttgcttctagagaaacaaaagcaaggggatgggtgatcggttcccagcaccgcacttgcagaggagcgaattgggccaaaacagctttaatttccctgcgaggaaatcaggtcctctacggcaaaataaaaacaaatgctcccagagagctgcatgtgactccctacgggcttttctcgggtacgtttatgagtagaacaacttgcacctacacagtcagcttgaaagggcagaaataaatagacgagtaatggaaaatcacaataagccactaaatagttgtagttctggtaaaaagttcctgggttgccctcaaagcacattaaattctcctctagatctttaaaaatattcataaatagtatgccgtgtatgcgttttatctctttatggaatgaactgcatctatagatacagtatgaataatctaacttatttcaagctgaaaaaaattatttaaaggagtcttaccttgcaaaagcctttttgataatctgttctccaatctttagagttaaaattccaaggaatagcgaggggagattccggaaaatattaaaagcagcaaatatttattacattcaaaaatgaaaaagcagctgtcatctcgctggtgtccgcagcgagggacaataatatctcaggatgtagacgatatgaatgattgttcacttagttgatagattttttaaaaaacgctttttccttttaattgttctcaaacattgcaagaaattcgttgatgatttttttaaacgatgtgttgaaaagtctcgtgccttttttcctcttctaggtctctaaaaataacaaaagagatgcagagataaacacaatcacatcaaagggctgattcctccactttctaatagcggaataatcaataagaaagatggttaagataagattccgctcctatcgtatgcctttcttttccttaatacggctgagcagaaactgggaagtgcaggacagagatgtgatcttgctcagaagtgattttttttttttttttgagataaggctttgttcagctgatatctccccagttcccaggaacacaatactgtaactaggagctaaggttgcctcttcctcttccctcacttacttgtatgttgtataaatagacacctattttccagtttcaaagtctttcaaggtttggctatatcccccgtccccagcccctcttctctttaccttgtagcaaaatatatatagtcagtggcttggagatgcttggagaaaggttggtgaaaagtgaacgtctcctggagtaacagtgacaaggaagcagagaaagacgggaagagggtgggagagccagagcaaagaggcagagatgcgtgtgtggcttctgggctctcctggtaccaattgattcagcctggagatggtggaagagataaaggcttaggaagggggatggaatttttttcccctaaattgatatttaatgggaaatcctattggacagaaacctggacatgagtcacttaattggacttgacatctgtcacagtgtgggagttttcacagcccaaatattttagcagatcagattcccactgaatctgtgccataaaatataacaattgaaaagcagttcatgatagaaatcttagcctctaaacagtatctagccgtagtcaggctatttctcttttccagattattgatgaaatatttaagtacaaataaacaatatattgactatcaaagaattcccctggcatattacaaagccaccactttcccttaatatttagaaaaatatttgtgtccagaacatggaaatatatactatataagatgctgcaataaagtatttagacatgcaacagccaacatttattagagatcatttacattttaaaagatacttcagtaaggtttgattaagcatattaacatttttgagaaatgatctgctatgagactaacttatcaatagatggtaagaacctttcaatagattaagccattggtggaactagaaagagaatccacatattcacggaccacgacatgagataattctacttttctgtatgtttgtttttctctccacccactcattcattcaagctgaaatatgacatgctacatgtgttgattattgcacttcattcttgcccatcttaacatgctaatatattgtactgcgtggcagtgcttgtgccaagatgtaaacacaaattaccagtgtgtcccagtacataatgcctttgccttacatgatcccatggccctgaatttgtataccttataataaaaaataaaatctagttcaattattttgccactttatgaagatactcatagttaatatcaataacatattatttgtgattattttagcttgttttgatcatacaagcttaaagaaataaaagagcattacagccttactcccaccccgccagttcctaggggaacatttgtggagagaggagtcctcacttgtcttccttaattttgccctaaaagcagattttatcaccaggggaggcacattgagcagcccacccctgggagtgaccctccgggtttttcatggcttccacaagtactatttgcctttgcccacatttttgctcctttgagagattcctggaccacaatggggcaggggtcggggaaaggagggagtgcctccaacaaataagggcaccaacactccccagccttgcttctgcctaaccccagcacagaggtatattttagatatccccagaacgttaaagtgaagatggaagccggtcccatacaggtggcaatggaaatgggtgagtggataaacaccccaaggtggtgacaatgaagggagaagggaggttttctcactctagttaggaacagccaatgctaagcattcacacacaaccagaagtgtgcacacagatgcacacccacagacacctgtacctcctcccccttcatcatacaagctggctggctctattagaccaccacacatccatactgatggattgaaaaaaactggtgggtctaatcaccatagctctagagtgggcagctgctacagtgggaaaggaccagcatctctggttcccctggtgttggggagtcatgacagggtgtgcctatcagggcaggtccaattctgctatggtgtgtgtgataccagacaaattcccttttatgttcaggcttactcattctataccagcagccagcatacacaaaaattaatgcttacagaagtaagcctgtataaacaggtacacactcagatccatacttagtgatgcctagccacactgtcatagacacagacatggattcacattcacacacacacattctttcttccatcaaagcctccccctcccccacccctttgccttttctaagac

SEQ ID NO: 1403 - DNA, 4001 bp, Homo sapiens
tgtgcctcttccggccaaatgccaaccgcgctattcctcctccctcccttcgtccccttcccggacaaacgagcgatttcgaacaacgaatacatctgggttttcacgggggcggggagacgcggggtgcacttctcgccccgagggcctccggcgaagcaacccggcagccgcggcgcccgagggcctggcgctggtctggggctgcgccgggggcgcctggctctggggtgcggccggtcaggaatccccatcctggagcgcaggcggagagccagtggctgggggcgggaaggcttcttggacccctcgcgcttctccgaaatcgtaaagaaatgactaaacaaacgtgggggagcctttaaaaagaaaattgactccgatgccctcgcaggctcccggagcaccatctgtcacgcagacagccacacacataggggacctagggacacggcgacgtgggatcagacaatgcgcccggcagtctggcgaccaccttgcgggaaaatgccggcagccgggccgctgagggaggagaggatgcagagggaagggaagagaagggaagggcccggggcggggcaggcggggactagcgggtgcagcgcgtgttgtcccggcgggagctgcatctctgccggcaaagttcgggcgctcccggaaccggagctcggcaggctgcagctgtccccgggtggcctggccaagtccgggcatgtcggtgcttagccttcctctaacttaactgtgccctcttggaaacgccacctggccaggcttctctggggcgcctggagcactggcccggactgtgcgccttctgggagggggccgctcagaaccgctgggcttccgggtaattcgggcttcgagaaagggcccggcaggaggagaaaggcccctgcaggggctgcacgcaccgcccctgggcgtcgggagtgaggaccaggctgagaactcggggccccggcgtgggcagcctccacgacgctcggcacgggagaaatccgcgtcggcgacgtataggagcgtttgcttctagagaaacaaaagcaaggggatgggtgatcggttcccagcaccgcacttgcagaggagcgaattgggccaaaacagctttaatttccctgcgaggaaatcaggtcctctacggcaaaataaaaacaaatgctcccagagagctgcatgtgactccctacgggcttttctcgggtacgtttatgagtagaacaacttgcacctacacagtcagcttgaaagggcagaaataaatagacgagtaatggaaaatcacaataagccactaaatagttgtagttctggtaaaaagttcctgggttgccctcaaagcacattaaattctcctctagatctttaaaaatattcataaatagtatgccgtgtatgcgttttatctctttatggaatgaactgcatctatagatacagtatgaataatctaacttatttcaagctgaaaaaaattatttaaaggagtcttaccttgcaaaagcctttttgataatctgttctccaatctttagagttaaaattccaaggaatagcgaggggagattccggaaaatattaaaagcagcaaatatttattacattcaaaaatgaaaaagcagctgtcatctcgctggtgtccgcagcgagggacaataatatctcaggatgtagacgatatgaatgattgttcacttagttgatagattttttaaaaaacgctttttccttttaattgttctcaaacattgcaagaaattcgttgatgatttttttaaacgatgtgttgaaaagtctcgtgccttttttcctcttctaggtctctaaaaataacaaaagagatgcagagataaacacaatcacatcaaagggctgattcctccactttctaatagcggaataatcaataagaaagatggttaagataagattccgctcctatcgtatgcctttcttttccttaatacggctgagcagaaactgggaagtgcaggacagagatgtgatcttgctcagaagtgattttttttttttttttgagataaggctttgttcagctgatatctccccagttcccaggaacacaatactgtaactaggagctaaggttgcctcttcctcttccctcacttacttgtatgttgtataaatagacacctattttccagtttcaaagtctttcaaggtttggctatatcccccgtccccagcccctcttctctttaccttgtagcaaaatatatatagtcagtggcttggagatgcttggagaaaggttggtgaaaagtgaacgtctcctggagtaacagtgacaaggaagcagagaaagacgggaagagggtgggagagccagagcaaagaggcagagatgcgtgtgtggcttctgggctctcctggtaccaattgattcagcctggagatggtggaagagataaaggcttaggaagggggatggaatttttttcccctaaattgatatttaatgggaaatcctattggacagaaacctggacatgagtcacttaattggacttgacatctgtcacagtgtgggagttttcacagcccaaatattttagcagatcagattcccactgaatctgtgccataaaatataacaattgaaaagcagttcatgatagaaatcttagcctctaaacagtatctagccgtagtcaggctatttctcttttccagattattgatgaaatatttaagtacaaataaacaatatattgactatcaaagaattcccctggcatattacaaagccaccactttcccttaatatttagaaaaatatttgtgtccagaacatggaaatatatactatataagatgctgcaataaagtatttagacatgcaacagccaacatttattagagatcatttacattttaaaagatacttcagtaaggtttgattaagcatattaacatttttgagaaatgatctgctatgagactaacttatcaatagatggtaagaacctttcaatagattaagccattggtggaactagaaagagaatccacatattcacggaccacgacatgagataattctacttttctgtatgtttgtttttctctccacccactcattcattcaagctgaaatatgacatgctacatgtgttgattattgcacttcattcttgcccatcttaacatgctaatatattgtactgcgtggcagtgcttgtgccaagatgtaaacacaaattaccagtgtgtcccagtacataatgcctttgccttacatgatcccatggccctgaatttgtataccttataataaaaaataaaatctagttcaattattttgccactttatgaagatactcatagttaatatcaataacatattatttgtgattattttagcttgttttgatcatacaagcttaaagaaataaaagagcattacagccttactcccaccccgccagttcctaggggaacatttgtggagagaggagtcctcacttgtcttccttaattttgccctaaaagcagattttatcaccaggggaggcacattgagcagcccacccctgggagtgaccctccgggtttttcatggcttccacaagtactatttgcctttgcccacatttttgctcctttgagagattcctggaccacaatggggcaggggtcggggaaaggagggagtgcctccaacaaataagggcaccaacactccccagccttgcttctgcctaaccccagcacagaggtatattttagatatccccagaacgttaaagtgaagatggaagccggtcccatacaggtggcaatggaaatgggtgagtggataaacaccccaaggtggtgacaatgaagggagaagggaggttttctcactctagttaggaacagccaatgctaagcattcacacacaaccagaagtgtgcacacagatgcacacccacagacacctgtacctcctcccccttcatcatacaagctggctggctctatt

SEQ ID NO: 1404 - DNA, 4001 bp, Homo sapiens
atatattgggccaggcatggtggctcatgcctgtaatcccagcactttgggaagctgaggtgggcagatcatctgaggtcaggagttcaagactagcctggccaacatggtgaaaccatgtctctacttaaaatacaaaaattagccaagtgtggtggcagtcatctgtaatcccagctactcaggaggctgaggcaggagaatcatttgaacccaggaggtggaggttgcagtgagctgagattgtgccactaaactccaggctgggggatagagagagactctgtctcaaaaaaaaaaataaataaataaataaataaataaagtaagcatataagcatatatagtacataagagcataagatgtgtgtttttttaatattttgatctgtatttcaacataattgccttccttggtcatcttgtggattttattttatgcatttaaaactttatactgcccagcatggtgacactcgcctgtggtcccagctactcaggaggctgaggccagaggacagcttgagccaaggagttggaggctgcagtgacccaagatcgcaccgctgcacccagcctgggcaacagagcaagacctcgtctctctaaaaactaaaataaaagcgttatactgaaaagggatccacaggcttcaccagtgtgcaaaggggccagggcagtcaaccaacatgggggagggctctttgtggatccagacttgaagggctcattcgttttaggcaaagcctacaagttccacgtgagtgttgtctaaggcgcagtgttcccaggccagaccgggagcacagccatttcacgggcaggacaggctgcagccgctgcgtttgcagttccaacccccttcccccggccaaccccccacacttctggaatgcacacaagccttatatgaaatccacatggtgggcggccgaggaaggcagcggcacgaaaggacttcaacaagttgacagcgaccccaggcccggccagtcacggggaggatccagggagctgtaggtcatctggtcccgctcctcgtttggggcctccgtggtgacaatgcctggccacaggaaatgggatcactgggagccctgtgtttcccgctctggactctggactctgaaacgagcccaactggaaagcagcatcactgccaagacacatccggagtccacacacaaatacaggaggctgccggcgaaactctcccgcagccacaagagtcccggggcccgcgcgcagactgcgatccagctccggctcttgccctgcggaggctccgcgcgagaacctggctccacccgggaccggccaggtcctagccccgaagggactggacagccgagggacgcggactgacctccctgcggcgatgcagcccacagccgccggggaggaagctccgcggggtccatgggtgccggggtcacggcccggggcgcgcggagccacccagaccccgcgacccgctcttcggatagcagggaccgggtcgggaagaccttcgcggaccctgcagaggcgggagaccctgcgccgtgcccggtgccccggcggccagcgggtccgggtccccgcctgctacgcccaagtccgtccggctccacgggcgcccccggcccgccgcgccctgcagcccctcgcccgccctcccggggctcactcacgtagactgcgtcgatgtcggatctgtcgtagaagcggagcgccccactcagctccagggcaggagagacgaagtcatccccgtcctccagctccaggtccccctgtccggggccgaagggaaagagctcctggcggctcaggcagcccacaggccccgccagcagcagcggcagcagcagcgcccgcgtccacgcagcccggatccggctgctcgaggccaacatgttcccgaactgcggtcccgcaaacccggtcccgcggccaggacagaggaaggcggggatgtaaccggacgcccctggcagccccctctcctcccgcctcccggcgttcccaccccgggaaataggggaggggagcggaggggagagcggagggccccgccccgtccagcgggcgcgccgcggggcagcccaatggccgcgagggggagggcgaggggcgaagccgaacctcccgccttgggcgccggtgcctgcgattctcgaaaccagcccgactcccagcgaacggcgcctccgggagggggagcagagcgcgggacccgcaccgtggtcctctgattagggttgggtcgtggagagccggcgacgtggaaacgctccggattcaggaacggcgcccaccccattgccgctcggccgcgtccggggtccaattcgcttgaccctggtaggaagacggggtgggagctgggaatcagccaagggacagagccaccaacacgttcatgggctcatccacccattcattgcgcgttttttgagtgcctgatcctgtgctccctattgtggaggttcgccaggaaacggggtctcaccctccgaggcaaagtcaccagtgtacaacacaagccagtgtcagatgggggccccaagtcatcaaagacattagggctggaaaaactggcggggaaagctgcaggtgggacggcgggaatcaacccgggtgctctggaaggaatgggatgtcatcaggcggcagagaagggaggtggaggaccgagctgggtttattcagggcaccatcccccagcagaggatgtggggagggaccggttgaagtacagccttgaatcacaaatttaggaatttgaattcgctctgtcactcggagaagaaactattgaaagttcttgacaaagggagataagcgatttaagtggtatcctgaataatcggttgatcgttactttggcactagggtgaaagtagagacaggtaagttattagaggaccaagtctaaaacattgaaatgaaagaaggagcaaatcctgattataagattggcattgaagaggagaagaaacgaagttaaaattgagttcaagggtttgcacttggaggactggaaaaccagtactgccttttgacgtcagggaagaggatctgggacagctggagttggatatgtttgatgtcagacctatcagcggtcaacaggacgtccccgtttcctgtcagcagctaaaagtaacgaccttgaacctagtttataataatttttcagaaaacagcaaattctgtataaaatttagggggcatgagttctgaaccagcaaagacaggaagaaaaagcaaaggaaacatgccttctaagcaaaacacttttgatttactcatgagaacttgtctttttcttttgaattcattcgccatcagaaataacatttattacccatcagagacagcatgtgttctacaagtattcattcattttgcactcacagtaaccctaggaaacagaccttccctgttttacagagaaggggcatagaggcccagagaggttaagtcatgttgctaaggtcatgcagctgggagccggtaagtgaccctaggtgttccagctgcaaggaccccacttataaccactgcattaagtgccctctgtttactaccttttactgcagcctgcagtctgttgtcaaatatggtgcttttccttcagttccctcccaacaatacagcactgtgagcccccagcctgctccccagaagcacttctgactctactctatgccatctgtgtttctgactatttctgggcttctgggccccagcactgcctgtttcagctgctacaggatctctgtatggagattcttctctatcttcacccgcacgtgacacgggccccacgacttccccatgccctgtggttgagggaaaccccaagctcagtaggccttttttggcctgtgccttcaacactcctccttcaaaaaaccccaccccagcctctgtcacacatcagagctgtctctgaagctgtagtctgtgcctggaatgctcttacccttctcacgaattctctccctttttgg

SEQ ID NO: 1405 - DNA, 4001 bp, Homo sapiens
aacaccatgtccagtcctgggatacaacaaatgcaggtttagcatagggacagctacagaaaccatttggcttggtttcactttgtcagagggcctcaggatgaaattattgctactacctgcagacgaggttatatatccaatatacagacatgagatgtaagcattcaccgggtaactttatcaggtaattcacatcccatagctagacttccctgcctgtaaaaccctatgaatatgtgtttgcaatcttgtggaaagcataattgttcactatactttcacgtacatgtgaaaagcattattgtgttacatttctgtaaaaatgttttagcatttgtaataatcataagagccttaagagtggctcagggttctttctacctctgagaggccccgggaagcattcaaccatgaagcagtcatggagttgaggagcgcaaactccagtgaggtgtttgcggaataccctgttcagttgctcccagctgagatctagcccagagcctgacagtgacttctatacataccaaccaactgactaaatgagatctagcccagagcctgacagtgacttgtatacataccaaccgactgactaaatgcaggctggttaagcactgggtgcactgtggccccttcgcagtcaagaatgcctttctaaggcctaatcaaccacaactccagagcttcaacaagcagatatactcagccccacccacaggaggtcagagaaagccaacagaccttagcgacatgtcaatcaagggagtggtgggaacccaggcctcctaacatccttcagagtagtttgcccaagtgcttttctggttttgcttttgtttgtggtggttggcattgctgtggtttaatttttcttttaaaaagcagcttccctctctgcctcaggaactcgcaggcctctgaagcatcgcctgcaaagattgaaggctctccctcagctgggtgggagtccggactgaaagcctggaggaaccctttgcaagctgtactcccttataagacacatacttttcacctggtgactctcttttcctgatttcgaagcatttcttcaggacctacatatgcccgagaggcaagcagtcacctctgcgttgtcaaccaccccacaattagagcacgtggtcactgacccaaggaaggaatgagaattcactaggtgctctgcttccattcccaccccgtttatctcgatgacggatttcaccaatcccacagagcacgttttacaaatgagacagccgtggctcatagcgtctgtattcgaatttgcctctttctgaacaaatcaataaaacacgctctttcccaccacccgacgatctggcttctggaggtgagcgccagttccctgccaagcttcccgttcctcggctttggctcacgagaaggttacattcttccgtcccgtcccactgagctggaaacttacaactcgaggagacagcacctctgttccagaagcgggcttagaccaagaacgcctcccctcatcccacctgctaactccaccatctgctgccgccaggaagcccgagccgctcggcacgaagaggagaaattctggcaaagttaactccatgtcacttcctggtttggtagagcctggcatcacctttagtaaggtagcccatgcccccgctcctcttggcctcgatgcaaaactggaaagaacattccaaggcaacgggacccaggttggcgaggctggtgacagtaagaaggaagggtatgtacactaggggacgttaggtgacttcgctttttccagaaaaaaacgaaggttaaattcaattccccttcctcccggtgttaatcactactcaccggcggcgtctcctctaaggcccacctatcaaaaccttctgagaaatgactcggactcttcgtgcaacccggaggcacagcctccttcatcccttcccaattcagagctgccaagatgctgcagtgttttgctttcaaaggtcgcgatttgatttgccagactgcctgccagtcagaagttggcaggcatttcgcgcaggcaagtggctgcgaggacggggagtaggcgggacagcccctggcaattggctgcgctgcaaagcttgcttgaagcataagggagcgacctggggctagagcttggcgctcacctggagcggggaccccctagcggccacaggaagaatggtgcggcgactcccctgccccctctcccgctgtcccagagagcttaggtggttgctcgcctccacctgcccggcaggtgggcctggttttagcagcctgccaggtgtcctcccttcttatcctcatagccaccttccgggctttgctcctgctgttcccctacccgacgctctcaccaagtattcaaatccaaaacgtccttgaagacccagcgctccccagagccctcgcgagacttgggaccaaacatatctctcctttcctgccctcctggaacacctgtcggataccaagcctcccagcaatactgaaggtcctgaaacgagcccagcgcttggttaatgtttctataatgtacataattatcacggccatgataattaacatgcgcatggagttttacagatgacaagcttctcatcgctcacacgttgtcatatacacgcatttgctttcagatcgtcacagccatgagtgagacttgaagcccgttttacgtatgaagaaatgtcatttgggcctagacatcaacaatgagaaagaggcagttctagtctcagatcgtggggcagagaaagctccttgggaacatgggagaggaacgagttggtgcattgtagaaactgcccgaaggccagcagggctggtgagagatttttctgggggcgtggttgggcctgcgatctgagggacgggccagggacagtttataaataacatatttgggggccggcgcggtggctcacacctgtaatctcaggactttgggaggccaggaggatcacttaagcccaggagtttgagaccagcctggacaatatagtgggaccccatctctacaaaaaaatttaaaaattagccgggcgtggtggcgagcgcccgtggtcccagctactcaggaggctgaggcgggaggatcgcttgaactcgggaggcggaggttgcagcgagtcgagatcgcgccactgcactccagctgggcgacagagcaagaccctgtcaaaaaaaaaaaaaaaaaaaaaaaagcttggatttcaccctaaatttaaaggcgagccattggaggactttaagcaggggagtgacaaggtcgctgagaccgccctgccctgaagcgtgtgaagaggggctcctggaatactaagtggctgcccttgtatagtcgcccatgtcaatttttttttttttcttctgttagaaacagggcttggggccgggcgtggtggctcacgcctgtaatcccaacactttgggaggccgaggcgggtggatcacctgaggtcaggagttcgagaccagcctggccaacgtggtgaaaccctgtctctactaaaaatacaaaaagaatagcctggcgtggtggcgagcgccggtaatcccagctactcaggaggctgaagcaggagcatcgcttgaacctggagggcggaggttgcagtgagccaagattgcgccactgcactacagcctgctcgacaaagcgagactctgtctcaaaaaaaaaagaaacagggcttggatgaatgttaattcttttaggtatattccttgaagcaggatttttgagtgagcaaaattctgaggcttttggtttatcacaagatttttgaagcatggcctagataaacctcttattagttccccaccccgctacaggccctgatgtaattaacctaagccctaaaattcggccggcttctctgcggactttgaaacgcctctaatgattggtcaacaacttttcacgttaaagaaacagaggatgccattggctggagttacctcgcggacggcggaaggtg

SEQ ID NO: 1406 - DNA, 4001 bp, Homo sapiens
agctagaccaatctggaatgaaaaacagcctacttagtagtcttcctgctctgtttgtcacagcatctagtcatatttccattaccccctctcttagggctttctatcctctactgccagttcaaagtattcctgttcccctccctcatcctttcacaactcctaccttgcctgctggtgtgctgacaggtgactcaagactgggcccaggcatggtagagttgctttcacacataggcccctgccctggaatctctacgtcacacagatgtgtcttcctgtaagtggccactactgcccctacagtaagaaagaaggaatatcagtgctggtgttctagaagccttgcttactcctcccaaggaggagatagtttataggctaggaactgaagtaggaccacccctaaatccttgggtcaaggaaataagagttgagaaacaattctggagaatctaggtagaagagcatgggaagaggcaggctaaagggttataaagtctcacctttgctgttcagcagcacgtgacaattgtagattttctgagtctgctcccagtcttggccacgctcatggaaaccacccaaggacagccagagtccacattccctggggggaagggacactgacaactcttcactgacttctcaaggctctaccctcatatctggcaacccagggacactgtccaacaaagattctacctctccctcgctatttccctgatacctggcaagctgggtgtattcttccaaaagtttcccacccagtggttcagacaggtgtagcgtctctgcagggtcccgtgcaatgaagtcaaatgcctcaggcaggaaagccaggcaggcacccagtctggcagcctctcgaaccagctcagcacatgttttaaagttctgttgcttgtctggcgtcgatgttacctggcacacagccaccaggggcagttcgcaggaggaagaggagatagccatggctctgggcctgtgaacagcataggcaggattctcagatttcatagcacagggaagcaaatttaatgctaaggggtgcaagtggagaggcaggaaagctggacttccttttgatcatgctcttacagggcacgttgacccagggctagtagggctcaccaatcaaatgtgtggatagttgacactcctgtgtctcccactatccatttaacaaactgagcatctaagtgccaggcactgaggacacaacaaaacgtgttacctgggctgagcacaaagtactgagagttgaggtatccggagtccaggacacagaagggacaggaatctgtgaggaggcctggtgatgaagcccagcctgaggaaggtgagatatgaggacaccaaccccttcttcaagcaataaatttctaggattctctgacttctctctttatactgtgagcctgaatcagggccctgccagtaaaaacctagtcttcaaaacgctctttataagaaattataggctaagggacaagaccatacagtgggaagatggagaaaggggctctgctcgccgcctgaatagttcaacttccaatgatctcacattaaactgaagcctctttcctctgacaaacgtttccgcagtccaaaagtcatctccgggaactatccttggttttcccaagactctctccttgactgtgcacttgcgcagctttactgactcgaagcatatttcccctttcaccagaatctcgcaggggaaagttcaccctctctcgtctcccacccctccctggtgggcaaggggcaaaggaacccaggccccaagccgcgccccgccctccaccctcccgccgcccgctccagttggcccgtccctccccgcctctcccagaggcagcatctctgttacacaagttaaagcaccgcaggtgggattcaccgcggccgacgggatagggagtaggtcctacatgaagatatagccaaaaccattcgcagggtccgatccggagggcggtctggagccagaagcgccgcagcgagtgggcggtaactcgcaggccggacgtgacgcaaggcgggggctgagctgcgccggccggaaacccagcaggcggcgaagatggcggagaacagcggtcgcgccggcaagagcagcgggagcggcgcggggaagggggcggtgtccgcagagcaggtgaggagtggctaacgcgaagcagggtacccacctgggtctggaatactagcgagaagggggagcctgtggcttgtgcaggcctttactccagcaccacatgtgcgtggcacctagagagggaagggtccccggaaaagctagccgaaccccttcggagaggtagacgggtgggtaggtgagagccacgcctccgtgaggtggtgggtgagcctgagcaaggggaaagccctgacatgtagggtctgggaagatgcacaggtctgaggggagatggtttgctgctttctctatctctcctcagcctctccaaacaggttatggctgggcaagacagctcgaaactaaccctagagaattagttaacgggctggctgtgtagtctgttacgtgatcctgaacccacgttgacaatcgccgtcacgctgcagagccacgtgactctcatactcgaacagcctagtgttctatatactattttaattcgggagttcattactagatcgaatttctttagagaccagaaacccctttctaatccgagtttgcattttccccagtgcctagcatcgggaagcgtttgataagttaattagaaaaccctttgtggcttgggaaccgtgttttgctaagtggaaaaataggagtgggaggaaagctacacaatagaaatgaaaacagttaacagctactttattattatcgtttttttttgagacggagtctcgctctgtcgcccaggctggagtgcatgcagtggcgcgatctcgccttactgcaatccgcctcgtggttcattcaagctattcttctgcctcagcctcccgagtagctgggactacaggcgcgcgccgccacacctggctaatttttgtatttttagtagagacggggtttcaccatattggccaggctggtctccaactcctgacctaatgatccgcacgcctcggcctcccaaagtactgggattacaggcgtgagccaccgctcccggcctacagctgtcttaattataggttcagtttttgttgaacaattaatacaagcagatgtatcagcataaagatttttatttttattgttttttgagacagagtttcgctctgtcatccaggctggagtacagttgcgggatgtcggctcaccacagcctccacctcccgggttcaagcatttctgccttagcctcccgagtagctgggattacatgcccgcaccaccacgcccagttaatttttgtagaggcaggatttcaccatgttgcccatgctggtctcgaagagcatagtctagtggggtaaataagagaagcaaaatgctcatatgaggcagaagataagtgtcctaagagaagtataaagtgctatggaatatggtttctgacttggggtgggggaagggaaaaggaacctaatgctttttaatacttttttgttgttgagacggagtctctgttgccgaggctggagtgcagtggcgtgatctcggctgactgcaacctctgcctcccaggttcaagagattctggtgcctcagcctcccgagtagctgggattacaggtgcaccaccatacctggctaattgttgtctttttggtagagacggggtttcaccatgttggccaagctggtctcgaactcctgacctcaagtgatccgcctgccttggcctcccagagtggtgggattacaggcatgagccacagtacttttttttttagagacagagtttcacttcgttgctcaggctgagtgcaatggcgtgatgatagcccgctgcagccttgaaatccctgggtgatcaagccatcctcctgactcagcctcctga

SEQ ID NO: 1407 - DNA, 4001 bp, Homo sapiens
gctagaccaatctggaatgaaaaacagcctacttagtagtcttcctgctctgtttgtcacagcatctagtcatatttccattaccccctctcttagggctttctatcctctactgccagttcaaagtattcctgttcccctccctcatcctttcacaactcctaccttgcctgctggtgtgctgacaggtgactcaagactgggcccaggcatggtagagttgctttcacacataggcccctgccctggaatctctacgtcacacagatgtgtcttcctgtaagtggccactactgcccctacagtaagaaagaaggaatatcagtgctggtgttctagaagccttgcttactcctcccaaggaggagatagtttataggctaggaactgaagtaggaccacccctaaatccttgggtcaaggaaataagagttgagaaacaattctggagaatctaggtagaagagcatgggaagaggcaggctaaagggttataaagtctcacctttgctgttcagcagcacgtgacaattgtagattttctgagtctgctcccagtcttggccacgctcatggaaaccacccaaggacagccagagtccacattccctggggggaagggacactgacaactcttcactgacttctcaaggctctaccctcatatctggcaacccagggacactgtccaacaaagattctacctctccctcgctatttccctgatacctggcaagctgggtgtattcttccaaaagtttcccacccagtggttcagacaggtgtagcgtctctgcagggtcccgtgcaatgaagtcaaatgcctcaggcaggaaagccaggcaggcacccagtctggcagcctctcgaaccagctcagcacatgttttaaagttctgttgcttgtctggcgtcgatgttacctggcacacagccaccaggggcagttcgcaggaggaagaggagatagccatggctctgggcctgtgaacagcataggcaggattctcagatttcatagcacagggaagcaaatttaatgctaaggggtgcaagtggagaggcaggaaagctggacttccttttgatcatgctcttacagggcacgttgacccagggctagtagggctcaccaatcaaatgtgtggatagttgacactcctgtgtctcccactatccatttaacaaactgagcatctaagtgccaggcactgaggacacaacaaaacgtgttacctgggctgagcacaaagtactgagagttgaggtatccggagtccaggacacagaagggacaggaatctgtgaggaggcctggtgatgaagcccagcctgaggaaggtgagatatgaggacaccaaccccttcttcaagcaataaatttctaggattctctgacttctctctttatactgtgagcctgaatcagggccctgccagtaaaaacctagtcttcaaaacgctctttataagaaattataggctaagggacaagaccatacagtgggaagatggagaaaggggctctgctcgccgcctgaatagttcaacttccaatgatctcacattaaactgaagcctctttcctctgacaaacgtttccgcagtccaaaagtcatctccgggaactatccttggttttcccaagactctctccttgactgtgcacttgcgcagctttactgactcgaagcatatttcccctttcaccagaatctcgcaggggaaagttcaccctctctcgtctcccacccctccctggtgggcaaggggcaaaggaacccaggccccaagccgcgccccgccctccaccctcccgccgcccgctccagttggcccgtccctccccgcctctcccagaggcagcatctctgttacacaagttaaagcaccgcaggtgggattcaccgcggccgacgggatagggagtaggtcctacatgaagatatagccaaaaccattcgcagggtccgatccggagggcggtctggagccagaagcgccgcagcgagtgggcggtaactcgcaggccggacgtgacgcaaggcgggggctgagctgcgccggccggaaacccagcaggcggcgaagatggcggagaacagcggtcgcgccggcaagagcagcgggagcggcgcggggaagggggcggtgtccgcagagcaggtgaggagtggctaacgcgaagcagggtacccacctgggtctggaatactagcgagaagggggagcctgtggcttgtgcaggcctttactccagcaccacatgtgcgtggcacctagagagggaagggtccccggaaaagctagccgaaccccttcggagaggtagacgggtgggtaggtgagagccacgcctccgtgaggtggtgggtgagcctgagcaaggggaaagccctgacatgtagggtctgggaagatgcacaggtctgaggggagatggtttgctgctttctctatctctcctcagcctctccaaacaggttatggctgggcaagacagctcgaaactaaccctagagaattagttaacgggctggctgtgtagtctgttacgtgatcctgaacccacgttgacaatcgccgtcacgctgcagagccacgtgactctcatactcgaacagcctagtgttctatatactattttaattcgggagttcattactagatcgaatttctttagagaccagaaacccctttctaatccgagtttgcattttccccagtgcctagcatcgggaagcgtttgataagttaattagaaaaccctttgtggcttgggaaccgtgttttgctaagtggaaaaataggagtgggaggaaagctacacaatagaaatgaaaacagttaacagctactttattattatcgtttttttttgagacggagtctcgctctgtcgcccaggctggagtgcatgcagtggcgcgatctcgccttactgcaatccgcctcgtggttcattcaagctattcttctgcctcagcctcccgagtagctgggactacaggcgcgcgccgccacacctggctaatttttgtatttttagtagagacggggtttcaccatattggccaggctggtctccaactcctgacctaatgatccgcacgcctcggcctcccaaagtactgggattacaggcgtgagccaccgctcccggcctacagctgtcttaattataggttcagtttttgttgaacaattaatacaagcagatgtatcagcataaagatttttatttttattgttttttgagacagagtttcgctctgtcatccaggctggagtacagttgcgggatgtcggctcaccacagcctccacctcccgggttcaagcatttctgccttagcctcccgagtagctgggattacatgcccgcaccaccacgcccagttaatttttgtagaggcaggatttcaccatgttgcccatgctggtctcgaagagcatagtctagtggggtaaataagagaagcaaaatgctcatatgaggcagaagataagtgtcctaagagaagtataaagtgctatggaatatggtttctgacttggggtgggggaagggaaaaggaacctaatgctttttaatacttttttgttgttgagacggagtctctgttgccgaggctggagtgcagtggcgtgatctcggctgactgcaacctctgcctcccaggttcaagagattctggtgcctcagcctcccgagtagctgggattacaggtgcaccaccatacctggctaattgttgtctttttggtagagacggggtttcaccatgttggccaagctggtctcgaactcctgacctcaagtgatccgcctgccttggcctcccagagtggtgggattacaggcatgagccacagtacttttttttttagagacagagtttcacttcgttgctcaggctgagtgcaatggcgtgatgatagcccgctgcagccttgaaatccctgggtgatcaagccatcctcctgactcagcctcctgag

SEQ ID NO: 1408 - DNA, 4001 bp, Homo sapiens
tgctctgtttgtcacagcatctagtcatatttccattaccccctctcttagggctttctatcctctactgccagttcaaagtattcctgttcccctccctcatcctttcacaactcctaccttgcctgctggtgtgctgacaggtgactcaagactgggcccaggcatggtagagttgctttcacacataggcccctgccctggaatctctacgtcacacagatgtgtcttcctgtaagtggccactactgcccctacagtaagaaagaaggaatatcagtgctggtgttctagaagccttgcttactcctcccaaggaggagatagtttataggctaggaactgaagtaggaccacccctaaatccttgggtcaaggaaataagagttgagaaacaattctggagaatctaggtagaagagcatgggaagaggcaggctaaagggttataaagtctcacctttgctgttcagcagcacgtgacaattgtagattttctgagtctgctcccagtcttggccacgctcatggaaaccacccaaggacagccagagtccacattccctggggggaagggacactgacaactcttcactgacttctcaaggctctaccctcatatctggcaacccagggacactgtccaacaaagattctacctctccctcgctatttccctgatacctggcaagctgggtgtattcttccaaaagtttcccacccagtggttcagacaggtgtagcgtctctgcagggtcccgtgcaatgaagtcaaatgcctcaggcaggaaagccaggcaggcacccagtctggcagcctctcgaaccagctcagcacatgttttaaagttctgttgcttgtctggcgtcgatgttacctggcacacagccaccaggggcagttcgcaggaggaagaggagatagccatggctctgggcctgtgaacagcataggcaggattctcagatttcatagcacagggaagcaaatttaatgctaaggggtgcaagtggagaggcaggaaagctggacttccttttgatcatgctcttacagggcacgttgacccagggctagtagggctcaccaatcaaatgtgtggatagttgacactcctgtgtctcccactatccatttaacaaactgagcatctaagtgccaggcactgaggacacaacaaaacgtgttacctgggctgagcacaaagtactgagagttgaggtatccggagtccaggacacagaagggacaggaatctgtgaggaggcctggtgatgaagcccagcctgaggaaggtgagatatgaggacaccaaccccttcttcaagcaataaatttctaggattctctgacttctctctttatactgtgagcctgaatcagggccctgccagtaaaaacctagtcttcaaaacgctctttataagaaattataggctaagggacaagaccatacagtgggaagatggagaaaggggctctgctcgccgcctgaatagttcaacttccaatgatctcacattaaactgaagcctctttcctctgacaaacgtttccgcagtccaaaagtcatctccgggaactatccttggttttcccaagactctctccttgactgtgcacttgcgcagctttactgactcgaagcatatttcccctttcaccagaatctcgcaggggaaagttcaccctctctcgtctcccacccctccctggtgggcaaggggcaaaggaacccaggccccaagccgcgccccgccctccaccctcccgccgcccgctccagttggcccgtccctccccgcctctcccagaggcagcatctctgttacacaagttaaagcaccgcaggtgggattcaccgcggccgacgggatagggagtaggtcctacatgaagatatagccaaaaccattcgcagggtccgatccggagggcggtctggagccagaagcgccgcagcgagtgggcggtaactcgcaggccggacgtgacgcaaggcgggggctgagctgcgccggccggaaacccagcaggcggcgaagatggcggagaacagcggtcgcgccggcaagagcagcgggagcggcgcggggaagggggcggtgtccgcagagcaggtgaggagtggctaacgcgaagcagggtacccacctgggtctggaatactagcgagaagggggagcctgtggcttgtgcaggcctttactccagcaccacatgtgcgtggcacctagagagggaagggtccccggaaaagctagccgaaccccttcggagaggtagacgggtgggtaggtgagagccacgcctccgtgaggtggtgggtgagcctgagcaaggggaaagccctgacatgtagggtctgggaagatgcacaggtctgaggggagatggtttgctgctttctctatctctcctcagcctctccaaacaggttatggctgggcaagacagctcgaaactaaccctagagaattagttaacgggctggctgtgtagtctgttacgtgatcctgaacccacgttgacaatcgccgtcacgctgcagagccacgtgactctcatactcgaacagcctagtgttctatatactattttaattcgggagttcattactagatcgaatttctttagagaccagaaacccctttctaatccgagtttgcattttccccagtgcctagcatcgggaagcgtttgataagttaattagaaaaccctttgtggcttgggaaccgtgttttgctaagtggaaaaataggagtgggaggaaagctacacaatagaaatgaaaacagttaacagctactttattattatcgtttttttttgagacggagtctcgctctgtcgcccaggctggagtgcatgcagtggcgcgatctcgccttactgcaatccgcctcgtggttcattcaagctattcttctgcctcagcctcccgagtagctgggactacaggcgcgcgccgccacacctggctaatttttgtatttttagtagagacggggtttcaccatattggccaggctggtctccaactcctgacctaatgatccgcacgcctcggcctcccaaagtactgggattacaggcgtgagccaccgctcccggcctacagctgtcttaattataggttcagtttttgttgaacaattaatacaagcagatgtatcagcataaagatttttatttttattgttttttgagacagagtttcgctctgtcatccaggctggagtacagttgcgggatgtcggctcaccacagcctccacctcccgggttcaagcatttctgccttagcctcccgagtagctgggattacatgcccgcaccaccacgcccagttaatttttgtagaggcaggatttcaccatgttgcccatgctggtctcgaagagcatagtctagtggggtaaataagagaagcaaaatgctcatatgaggcagaagataagtgtcctaagagaagtataaagtgctatggaatatggtttctgacttggggtgggggaagggaaaaggaacctaatgctttttaatacttttttgttgttgagacggagtctctgttgccgaggctggagtgcagtggcgtgatctcggctgactgcaacctctgcctcccaggttcaagagattctggtgcctcagcctcccgagtagctgggattacaggtgcaccaccatacctggctaattgttgtctttttggtagagacggggtttcaccatgttggccaagctggtctcgaactcctgacctcaagtgatccgcctgccttggcctcccagagtggtgggattacaggcatgagccacagtacttttttttttagagacagagtttcacttcgttgctcaggctgagtgcaatggcgtgatgatagcccgctgcagccttgaaatccctgggtgatcaagccatcctcctgactcagcctcctgagtagctgggactataggcataagccatttgaatggctaattaaaaa

SEQ ID NO: 1409 - DNA, 4001 bp, Homo sapiens
acccctagtttaaaattaaaaaattaacaaacacagaagaatcctctgaaaggtttaaacatttcttggcatttcatgttcctcaaagtagataaagaaaaacagacaatctctgcccttctggagttcccattccacctgatcttaattaattccctctgcaatcctcagggataatcattttacagataagaagactgaggccggccagtggggggaagtcacttgtccagtctcccacagctgggagcagggctacaatctccagagctagggctgtttccaccactgcccaggccaggtctgtggatggcatgtttgaagctggtgtccccaggaggagagaagcaagacgaatgaggaggtctgcatgtccaggctcaaaacttcactctacattatcattggctcctgtggtggggagggcgtgatggatgcaggcaagagtggaaacccagaacaaggagtccagcatgaggggggctcaggctcctcgctgcccactctcagacctgggttcggcgatggaggtccccatgcacctctgcctagaggagaagcacagcttcaacctccctagttgttcaatctcagctctagggtaggtaggagacccctgcctctccttaaccaccctcccaaattcccctgccagggcctgatttgaagggcagtgctgtttcttctagtccactacagtcactcctccctgagacaagaacctgagttccctatgctggggctaggcacagtgtcctcagatgctctggtcctccctagggcacccaagtgtccccatccccactgttgctggccccggcagaggagctgctctggtgggtggaactgatgactgatggaacccccatggccacagcggccagaccaaagcaggaagtgtggtccaggctgggtcaggctggcccaggatctggcagctcctggtgaccctctccagggaggtggctctcctttcccaggactgcccggtcaggaaggtgaagggaggcagaaacaacacaaaggattggagggttcttggagtctaagatcccagaacacagatgaacatgggccagaaatggtcagcgatttagagacacaccaaagagaaaccctgagagacacacgccggagcagagactttgtgagaaacgctcacacaggggtggtgatcagaggcagagacccagaggaagggagagacccatgcaaacgagggatctagagggaaacacacagcaggacctcaacggatccacagatcagcctcagacacacccccagtcccagcaagccaccgtcccacagcgcatcccccaacaggaggccacttgtacagtgcgggcgggccggggactcgcgcacaggacgcacttggggaccggaggagcgccgggcacagcagcgagaagcgcacacaaagagacagcccggccagcgggagcaggctccgcccgaccgctccgagactccagaccaccccccgcccgggcacacgcaccagacacacacacagagacacacgcaaccccacccgcacgccctgggaccgcgccccgccgcgccccaccctgccccgactgcctgggcacgcgacgcttaccagctgcaggcagcagaaggcgaccagcgtgcagcgcccgctgcacttgcccatggctccgggggctgcgcgggccgcacgccgcggcgcccttcttgctccgcggccgccgcctgctcgcgccgcgcgggctccacgtcctccccgctgggcgcgccgggcggcggggccgggcgcctagggccgggcccgggagtgtccggtccccaaggctggggccggccgcccgcgctccgagtccatggtccgtccgtccgcgcgctggccccgccgagccgcgcctcctttgtctagcgggccgtccgtcaggcgcgcctcctgccccggggcggctggcggggagcgcggagcaaggagagcgagccccgagcgcggcgcagcgcagagcagcactgcccagctggggcagtcgcccgggctctcgtcggccgcggcttcccggccccaccacgtggctccgccgccgccaccgacagggagggagttggggggaacggcagaggggtggggcgggggagccgccggaggggaggggagagggatagggaggtggagggttggagaggcagggagtgaagtggaagagtgcgtgcgggcttaggggacaacagccctgagtcaaatccagactttgctgctcactcgctgtgtgaccttgggcaaatcacgtcacctctctggacctgttttctcatgaacaaagtaggaataattatgcctctttagtgtagatatgaagatgaaatgcagtcatgtgaataaagcgcttagccctgtgcctggcctcctggcttggaacacttttttgtccaccctgtctctagggctccagggttccaacttggacttctagttctatttacgttcccagatctgctcctcaccccagcctctcccctgagtgtctggccacatttttcgccttccttctttccgtctactggcatttattgagccctgactgcatacacacccctgggggccctgcgagccagagatgagacctgcaacactgttccaaatcccgtagagctgcaccgcccagggaacagataggctcccaagagcacgccagtgagatgggtgatggcagagatctgcccaggtggaggtagggagcccctaccctgggctgcagtagggacagagtcagaagtttcccagcagaagattgccttctccaagccacccccaaaagccctcgaactggacacatctcaaatccacataatcattcctgtcccactcctaacttcctatattcaccttggcaattagcatcacccaagtggaatttcctaggtcatcctccaggcttccctacaattacatctgatctgtcactacattctataaactgtactttccaactaacatttatgaaatacccactatgtgccaggttctctgctggggataagggaacaaaacccgacaaaatctctgccctcattgagcacacagtctagtgagggattgtcattaaaacaaggaaatatacaaataaatacgcaaagttctgatgaatactctaaagaatattaaagaagaaacgtggcacggtggctcacacctgtaatttcagcactttgggaggctgaatcagctcactgcaacctccacctgagtggagatcggcctcccaaaagtgagtggatcacctgagttcaggagttcgagaccagcctggccaacgtggtgaaaccccatctctactaaaaatacaaaaattaggcagggatggtatcaggcacctgtaatcccagctactcaggaggttgaggcaggagaatcgcttgaacccgggaggtggaggttgcagtgagccaagaccatgctattgcactttagcctaggcgacaaaagcgaaactctgtcaaaataaataaataataaataaaatactaagggagaaaagagagaatgagaggggcataatttaggtttggggaccaggaaacacctctttgaggaaacgaaactgatactgagacgacaataggaaggaaggagaggcaggggagtgaagagtgttctggtggaagaaacagaaggttcttattctttcccttcctctccactctcactagccctcttgattcgagagacaggaagtatggtaagatgtaggttaggacccgtggttttggacccaaacggcctgggtcccggttccagcactgtcacttgtttgctgctcacatagtaagcatgcaaataaatgtgtcactgttttcttccaggactggctacatagtttggggggcccagcacaaaatgaagatgcagcacttcttgttaaaaaattaagaatttcggccagacgcagtggctcatgcctataatcccagcacttgggaggcctggccagatgacaaggtcaggcgttcgagac

SEQ ID NO: 1410 - DNA, 4001 bp, Homo sapiens
aaattggaacccttgtgtgctgttggtgggaaatggtgcagatggtatctaaaacagtagagcagttcttcaaaatatttaacagaattaccgtatgattcagaaatttcacttctgagtatataccccagagaattcaaagcagggtcttgaagagatatttgtgcaccaacactcataacagcattaacaataacaaaaaggtagaagtaatccaggtgttcatcaacagataactaaacaaaatttggtatatggtaccatggagtatttatacagtcttttttaaaggaagggaattccgacacatgctacaacatagttgaacccggaggacattatgctgagtgaaataaactactcataaaggaaaaaatgctgtatgtttccacttatatgaggtacccagagtagtaagattcacagagatggcaaatagaatggtggttaccagggctgggagaatgaggcaatgaggagttatcattcaatgggtgaggagtttcagttttgcaagatgaaaacagttctggagactggttgcacaatgtgagtgtacctaacactactgaactgtacatttaaaaattattacggccgggcgcggtggctcacacctgtaattccagcactttgcgaggccgaggcgggtggatcacctgaggtcgggagtttgagaccaacctgaccaacatggagaaaccccatctctactaaaaatacaaaattagccgggcgtggaggtgcaatgcctgtaatcccagctacttgggaggctgaggcaggaaaatcgcttgaacccgggaggtggaggttgcagtgagccaagatctcaccattgcactccagcctgggcaacaagagcaactccgtctcaaaaaaaaatatatatatatatatatataaagatggaaaattgtacactatgtgcacttggccacaattttttttaaaagtcttccttccactcaccccacttcggctcatctctttttgctttctcataaaggtctctcctgttgatcgcagcgaagatccacacggccatggcccacgccttctcctccccattgaagtcgatcattagcgtggctagatccacatggtctgccttctctgtctgacccctcgggagggggatgcagcccttctggggaggatagtcctctaagtgcatcttaaatttcttcaagtccacatcctccaggtcctccaggtacctggccagcttgcagcgggtgcttgccatcttcatctgcagctgttttcagggtccttaggcttcggtccacactaagataccaggcagtgaacacggcacacggatgagtcttttttaaagtctccactttgagagatataaattatcaaaaactcagcaaacagaaagaaaaaaatgtcacatgactgtaacaagtcaaaatctttaattttgaaaagttagccaaggccgggcacagtggctcacgcctgtaatcccagcactttgagaggccaaggcaggcagatcacctgagctgaggaattcaagaccagcctggccaacatggcaaaactgtgtctctactaaaagtacaaaaatgagccgggtgtggtggcgggcgcctgtaatcccagctactcaggaagttgaggtaggagaattgattgaacccgggaagtggaggctgcagtgagccaagatcacgccactgcactccagcctaggcgacacagcaagactccatctcaaaaaaaaaaaagttagccaaatgcttaccagaaagttctcctgttggctcgatccaggagtgtgtcctgagccatggaagaaaggtttccctatggagggaaaaatatgcaaacaaatccataaacaggattgtattacagtttacggtgaacaaccacttcacgatgccatcttgacccatcagcaagaaaatttttgtcccgttgattacggggctatgacattggacaaactcttcactattcctcaacttcagtttcctcatctacaaaatgagaaagcagaagagaatgttttcagttcctccaaactgaaggctctggctctttgcttctgtttttgtgagggaagagggatgagagacaatagaaggagaaggccaggaggtgagtaagtgtgttgataacagaacaggacgtggctagggagagaggagagagaacataaaagcttgcagaggaggggacagtctttgactgcacttctatcaaccagtggattgaagtgagatgaagctgggagtgcataatggagaataataaaaacatacatccctgtaatcccagcactttgggaggccgaggtgggcggatcacctgaggtcaggagttggagaccaggctcaccaaacaacagggagaaatcccgtctctactaaaaatacaaaaattaaccgggcatggtaccaggcacctgtaatcccagctactcgggaggctgaggcaggagaatcgcttgaacccaggaggcggaggttgcgatgagccaagatcacaccactgcactccagcctgggcaataagagcaaaactccatctcaaaaaataaaatagaataaaataaaataaataaaaacatacatcctttaatgtctccttgcaaaattcgcaattgttatcattataattcacattaatttagagctttccacaggctaggcactcactgatgtttttccccatctaacctgcacagagctctatgaggtgcacctattcctagccccattttatagatgcataaactgagtcttagggggactaggaagcctgccgaggggtttagaaccaggaaggaacagagccaggattttgaccagagatatgagaccatgtcttccatcacttgtttcagtcagacaaagacaaagacaacaaaatagatgactaaaagacacacttccccagcatttatcacaggtgtatcactgcagcattcaccaacatagtcttcccaactagactgtgagttccacaaaaactagcaatcacctgctgtatctttagatcttccatatctcctagagtccggatggatgaacaagttggctttgtttggaattgttccctccttgatcccttgattatactctatttggcaaagcacctcaacctaaagccataaataacactcaagggaggcagagagcctggaaaacggtggagctctccaaattggaatttctgtgactgcagttcaatgtcaagatgcctcagactcactcatctctcccgtcccatctccattcctgcctatctactcctcgcctcctgagccctgcaaacccagccctgtgcatcctgaggtgactgctctccagacagccctattagctccgcataccctcccagctcctgcccatcctgaggtgactgctctccagacagccctattagctccgcataccctcccagctcctgccccatcagtccttccatctgcatcaggattctgcctttcttctgtgctccttccaccctaacaccagcacaaaaatctgctgccctttggtctttaaggaggtttgtttccttctgtatatcccatccatcttctcccctgggagggatactgggcaaatctgctgaagtcgtgggtgtaaactatggttgctgccgctgtcctccccgcttccccccgccacatacacacacacgaacttgcacacgtagagcccaaataatgataaaagaacattccagaaatgttgttgaagcacaaccttggagacgccagaagaaattcctagtgcattaaccaggacaagttctgccctctgaacacaatctcccccactgctctcccggtcctgtcgcccacactgccccgcggagctggacttacccagatgccagcctcaggaacagctagagaggaaatgcaatgaatttatagcagtcgcagccccagaaggggcaggaaggatgtggtctccacttacatcagagcagaggcagagagactaatggttaatcacatagctggattt

SEQ ID NO: 1411 - DNA, 4001 bp, Homo sapiens
acgatgccatcttgacccatcagcaagaaaatttttgtcccgttgattacggggctatgacattggacaaactcttcactattcctcaacttcagtttcctcatctacaaaatgagaaagcagaagagaatgttttcagttcctccaaactgaaggctctggctctttgcttctgtttttgtgagggaagagggatgagagacaatagaaggagaaggccaggaggtgagtaagtgtgttgataacagaacaggacgtggctagggagagaggagagagaacataaaagcttgcagaggaggggacagtctttgactgcacttctatcaaccagtggattgaagtgagatgaagctgggagtgcataatggagaataataaaaacatacatccctgtaatcccagcactttgggaggccgaggtgggcggatcacctgaggtcaggagttggagaccaggctcaccaaacaacagggagaaatcccgtctctactaaaaatacaaaaattaaccgggcatggtaccaggcacctgtaatcccagctactcgggaggctgaggcaggagaatcgcttgaacccaggaggcggaggttgcgatgagccaagatcacaccactgcactccagcctgggcaataagagcaaaactccatctcaaaaaataaaatagaataaaataaaataaataaaaacatacatcctttaatgtctccttgcaaaattcgcaattgttatcattataattcacattaatttagagctttccacaggctaggcactcactgatgtttttccccatctaacctgcacagagctctatgaggtgcacctattcctagccccattttatagatgcataaactgagtcttagggggactaggaagcctgccgaggggtttagaaccaggaaggaacagagccaggattttgaccagagatatgagaccatgtcttccatcacttgtttcagtcagacaaagacaaagacaacaaaatagatgactaaaagacacacttccccagcatttatcacaggtgtatcactgcagcattcaccaacatagtcttcccaactagactgtgagttccacaaaaactagcaatcacctgctgtatctttagatcttccatatctcctagagtccggatggatgaacaagttggctttgtttggaattgttccctccttgatcccttgattatactctatttggcaaagcacctcaacctaaagccataaataacactcaagggaggcagagagcctggaaaacggtggagctctccaaattggaatttctgtgactgcagttcaatgtcaagatgcctcagactcactcatctctcccgtcccatctccattcctgcctatctactcctcgcctcctgagccctgcaaacccagccctgtgcatcctgaggtgactgctctccagacagccctattagctccgcataccctcccagctcctgcccatcctgaggtgactgctctccagacagccctattagctccgcataccctcccagctcctgccccatcagtccttccatctgcatcaggattctgcctttcttctgtgctccttccaccctaacaccagcacaaaaatctgctgccctttggtctttaaggaggtttgtttccttctgtatatcccatccatcttctcccctgggagggatactgggcaaatctgctgaagtcgtgggtgtaaactatggttgctgccgctgtcctccccgcttccccccgccacatacacacacacgaacttgcacacgtagagcccaaataatgataaaagaacattccagaaatgttgttgaagcacaaccttggagacgccagaagaaattcctagtgcattaaccaggacaagttctgccctctgaacacaatctcccccactgctctcccggtcctgtcgcccacactgccccgcggagctggacttacccagatgccagcctcaggaacagctagagaggaaatgcaatgaatttatagcagtcgcagccccagaaggggcaggaaggatgtggtctccacttacatcagagcagaggcagagagactaatggttaatcacatagctggattttccaaatgggatcaacagtgttgtcaaaaccgtgtctcggttccatactggggttcaccttgctctcctctgaggcaccccacagaagcagggtgggaggccagtatgagatggggctgggggtcaaatcggcagtgctaaatggatgttgcctctgacactgcccgctgcaacggctccactgagagtgagggaagtgaaactaaggacatgccatgcgagtgagtaaagaatccagagcatgacctgacccagccttcaaactccagagtccatgccctgtcctctcacagcaagatggctggaaggcagtacaggttctctccgacatgttctacttttaaagcacaaattttactccctgactcattgactcacctgttccactaacactcacggaatggctggtatgtggcaggcatgcacacaaagcctcagcttgagtagcttgaggagagacacacacagacctactctgcagctcatgagacggccgcaggaccacagaccggcaaaggcacaagttcaacagagcttggtgggtgagaggcactcgctcagcctctgggtgagtgaaaaggacgagcacccagttcagtggagggatgtcagcaaatgactgggtctgtctgtgcctcatacctgtaaaagggtgacaataattgcctgctacttctttagatcttccaaatctcctagactcaggatggatgaacaagtggttttgcttggaattgccccctccttgatcccttcattatactgcatttgaccaagcactacatcaacccaaataacggtacctatcctagaaggctgtcagaaaacactgagtgaatggctaaacgtgaggcctttaaaacagagcctggcacagagaagctagaataagcagttggttccgatgactaccacctttctacagaactgcagagagaatgctctacaacatgagagaggcatctagtcctgcttaggggcatgacagcagacctgagtctccatgaaccaggtgaaaggtgtcattcggggctggagctgaggcaggagcagcaaaaacttcaggtgctgaagctagagagaaagcagaccaaatatgctccaaaagaaaggagctcagcctgggtgcagtggctcatgcctgtaatcccagcactttgagaggccaaggcaggcagatcacaaggtcaggagtttgagaccagcctggccaacatgacgaaaccccatctctactaaaaatataaaaaaaaatagctgggtgtggtggcgggcacctgtaatcccagctactcaggaagctgaggcaagagaatcacttgaacctgggaggtggaggctgcagtgagctgagattgtgccactgcactccagcctgggtgacaagagcaagactccatttcaaaaaaaaaaaaaggagctcattggctgaacctgggatctttttgtttttgtttgtttagtcaagttaatttaggtataattcagccgggcgcagtggctcacgcctgtaatcccagctctcagggaggcaagaggcgggaggatagcttgagcccaggagttcgagacctgcctgggcaatatagtgagaccccattctccagaaaaaggaaaaaaaaaagacaaatttaggtataattcatatgcagtaaaaatccatgcctttataaaaacagacccatagaccagtggaacagaaataaactcaagtatatgcagtcaactaattctttgacaaggtcaccaagaagacacaatggagaaaggacaatctcttcaataaagatgttggctatagaagtgtgaaaaaaaaatcaagaaaaatataagattttgaaaaattaagcttttggtgaaactggatttccacacgcaaaagaataaaacttg

SEQ ID NO: 1412 - DNA, 4001 bp, Homo sapiens
agttcagttttggtcatattaagtttgaaggacatttgagacagatgtgtccgggaagcaactgagttaggcattagtagatctgagaggaaaattgaaatttagaagcaaaatcaaaggtgttagtagaatccatgtgagtggacaaaatcacccaaggaaaatgtctagactaagaaatgaaagtaatcaaggagttaattccaaagaatgacattcaaaaaccaggcacagccagtaaaaggaattaatgactatgaacctcagttgtcacaaagagactaagtaatgtaaattttgagaagtaattactgtatttggtatttaaaaggccattagaaacttaagcaagaacaactttcttgaagccattaaagaagccagacagaagacttttgtctgtttgatataagtaaaaataatatcctttcaagaagtttactgatagataggaggactaggaaataactggataaacacaggatggaggacatggttttgctttatttaattttcataagatgtgtgacttgagcactgaagagaagaaactggagaggaaaaggctgaacgcacaggaaagaaaaaaacaactggaagcgaaatgtaacagatggaagcaaatgagatcaagagcaaagatggatggattatcctttaatatccctttctctacactagaaatacaagactaaaggctcggcaaaaatatagagcaatgtgtaggttgggggcatgaggttgaagaaatggcctgttatactccatcatgtttagaaaggagaaatgaagagggcaaaagacagggtttgtaaagggaaggtttgaaaatgtcttcacagagaatgggtcaggggaaaactggggtaaccaaaaggattgctgagtagtatgaagaaacaaggggtggtgggtgagggctctgtttctaaattcatagctataactatctaaagatctttctatcctccagtccgttatccataagtgcttaaaagatatggtagttaagtgaattaactagaaccctctcaaacataggggtgaattaaaataacctataggcttatttaaaatgcaaataccgagctccattcctttcattcagaatttccaggggtgaagcccaaacagtgaattccagaagctctccaagcaatcccaggagaaatttctgtttaaaaaaaaaagaagaagaaagaaaagaaaagagaaaagaaaagcaagcacagacctagaaggtaaccaactggatagaagagcgctgatccaacatacacctgttaatggccctcgtgggggcgtggggcagtgctctgccactcagaaaagcaaaaagactccaagatctagggagattcagatcagtgttgagacagtcacatacacaccaccccatactcttaataaagcgcgttaatgtgaatctgtgaacatgaaaaatgccatgatgaacaatgcaaacacataatgtttgttcaaaacaggttattagactcgatgccttaccctaaattttctgtttcattactctagagacttagtaacattagtggaattcagggtgctgtaagaaatacggagagcgaggagactgcaggaacagcccgtgggaagggggaaagagataacggggagaaggtcgggaggaccggacaactttaagtgcccatccgcccgaagacttggaaagctaagtaagtaggaccccagagccgttcttctggcatcccctggcactcaccattgtctcaggatctcagcactagaaaataggtatcgttgagacaggaagacaccaccaccaccaccatcatacggttactcaggcaacaaagccccgcccactgtcgcacgaggcgtgggacgccaccgccccacctcttcgtccttagtggctgggagtaatctcagctgcgttcatccaatcgacagacccgcccctccacgctgtcgcctggggctacgagacgccattattctgtttccggcagttttacttccgtttgtttaacagctggcccggaagtttaagtgaatatgcggcttgggctccaaaagttgctgtacggtattttattttaaagtagaaatctgtccgcttttcacttacggaggccttacagtgtgtgttctgtgttacttgagtttatacgcactgcagaatttgtttaccctgctcttttggaaacgtattccggaagcgaaaccctgagtaatcggaagtggttaggagtgagagagctgctggatatgcggagggactgggcgggtcggcttccgaatggaagaggtctgtgagaagttaacctggtgataccgatccgaagagcctatcaagtgaagccccctgaaatacggagaataagaatcttagaggtaaatccgaggacaagcaggtataactaaggatgttggaaagggacggaggtctggctggagctcggtggccagtagctttggatttagggaaagattgttccgggaagactttttcagacagggatgaaacttaggtttcgacttccccggacagcaaagttgacaggcttgtcgcttcccggcctatcgctttcatacctgctcactccccctacttacttcttcaccccctccgcttcatttggcatttgccagcaggcactcgctgtgcctgtacgtttcgcagagcagctatcaagggcagtttcagggatcgttactcttacgaagggttttttggatacctcttttcggagcagtagagtgtaagtgtagaaaagtttgtgactgttaagaaagttagtcgtcgggttcactaattgaactgagttgtatctagtactgagaacgatctttttttgtagtgaaaccagttgtcatctagtgtacagtttgtcatatttatatcattgcagtagcatcaccttcttatatgttctctggtaaatctgagtctgtactgtaagacaatgtatacatttctgaaagcatgggctcgatatgtttctctttttacttttggagctacactattttaattttaactttttattaccaaaaaagtataaattatgttatcttgagtaatattttttgtcgtttgttaaacatctaaacagaagctcctttttgatatgtgtgtgtgtgtatacaaattgtgtcggtatgtctcctaagaaagtaattactttaaaattcctcttgtcatatggatgacaaaaccaccacagtaacttcattccctttgcttggctaaaattcaggacatacttctgacaatttagagtgtattggtgaggatggtgaaacggagtatttagaagtaaaccacccctaatttttttttttgagacttttagtagacataacaatgccttctgtgagaatgggatataagggacatttctctttctaaatgcatgcgtactaaatacagaagcaattaaaatatcataacttttaaattggaggtactctatgtgtttatatgatatttttaaaattatttcatatgcatacatttctaggttgttcagcagaagtcttggagtgcattttcagtggttaaggtgaaaaaatgactactaaaaatttagaaaccaaaggtaagtggcttttttataattgtttttaaaacatgacatttatgacgatgtgaaggaacgtttgagccagataactagatctcatggacccccttgggaatcatttgttatttcagatccctttatgtttattttttagtgcagtgtttatatttcagtactttagatgtacaagtgaaatttaacatcattagttagaatttattaggtgactactcttaaacatttaatgttaatgcaaagtttttaacagctatattccctatacactagaagattacgatttaaataagaatacacattttaaagatttaagtagatagacaaagcaactagggtgtatcaaagatctctttcatgttgtattagtttgctggggttgctgtaacaaagtaccacaaactgcatggcttg

SEQ ID NO: 1413 - DNA, 4001 bp, Homo sapiens
acacccagctcaaataatttttttaaagtatattttccagttttgttttgtatggcactgactctgtcactgtgaattccattttacccaaaacattgacacttccacacatatttatgaatcaaaattgaaagataattgcattaataggtacttttatttttttcttcttttgttttgttttgttttgtttttttaagacggagttgctctgtcacccaggctgcagtgcagcgtcgtgatcttggctcactgcagcattcacctcctgagttcaagcgattctcatgcctcagcctcctgagtagctaagattacaggcatggaccaccacgcctggttaatttttgtatttttagtagagatggggtttcaccatgttggccgggctggttttgaattcctgaccttaagtgatctgcccgccttggcctcccaaagtgctgggattacaggcatgagccactgcacccggccgacttttgcaaaggaaattctttgaatctgaagtgtcttgcaaggtagaggctattgcaaccatttcaactagtgtgtcaacagtcttctctaaggtgggctagaaaaatggtttcatattcaaattgtaactctgaaaaacaactgatggtaataaagagattccataatcagacagaactaagtgaaacaattagttttggtagagttctgtggtaatcatagttagaagtttatcctgggtagctgaaatataactaacttcagactccaggcctgtcggtggcttgtgccaatcaccacaacactttgaggggccaaggccagaggatcgcttgagcccaggagttcaaggctgcagtgagctatgatcacaccactgcactccagcctgggcaacacagctcttgttttttaacaagacattgttacttaaaaaaaaactgccctgatgaaacaattctaccatgaacactgatgttgttctgtggactacttcaggaagatggactaagaacatcattaaatagttccaaccagtttctgggtaattttatttttaattttttgttatgagggtcttgctatgttgcccagcctgggctcaaatgatcctcccaccgcgggctctcaaagtgctgggtttacaggtgtcacaccgcgacagccaagggtaacttttttttatttttatttttgagatggagtctcgaactgtcgccccggctggagtgcaatggcgcgatctcggctcactgtaacctccgcctccaggattcaagcgattctcctgcctcagcctcccgagtagctgagattacaggcgcccaccaccacgcccagctaattttttgtatttttagtagagacggggtttcactatgttggccaggctggtctcgaactcctgacctcgtgatccgcctgcctcggcctcccaaagtgctgggattacaggcgtgagccaccgcgcccgtccaagggtaactttttaagagctgccctacagctcattacctccttctcaaggagcatgagtgtcaaaccacctccagcaaagtagatgtagtcttttacagatttggaaagaaggatttaggaggaaagggaagtcgttcggaatgaaggatttcctcctctgacgcccagccgtcccccgttaagcctaaaggtgccagacctcaagactcttctagaaagagatttttcctttccaaggtgaatccatctgttccgaaggtcagaagctattttaccgaagttttccgttccactgaaaaaattaagggtcaatcaaagctccttgccccaaacctgaatatgagcttgcctcgggtcatattcgactctaaagactccaccacaccatcctggactcccctatatctaggacaaaaagcgaccagtttctcaggggctccttgcggggagcttaccgcgccctcactgtccgccggcccgagtgctaccggagatcaccagcggcccggacgccagcgagtggaacatctcggtcgcactctcattggttccagggggccggaagtgcgtgcgtccagcggaagtgctcccccggcgcggtccgccaggccagtgccctcaggtaggcggggcccctggccctaaactctgggactggcgggcggtcaggcggcacagggggaatcccgggggcctaaggaggttgtcccagtttttgtcaggtaggcccggaaggagtttcggggaccatgggtttacggctacctctggtggcaattggggcctgttggagcccggccgccgcgggacctacgtgccggacttcaagttcccgcgtggggtgggatttgctgcggtggccggagctgattcttcacccagtcctgttggttctgggccaaaccctcctcactttcaaggaagaggcgtgctctccgcccttaccttttccaagcctctgggtttgacgccatccctcaaggcgtgtccggatgcgggattttcctcaaagaccctctcggcctcgctaggaagaaactcagaaaggctgcggtaggcgcagtcgagggggaaagtgcccccgcccttgatgtctcaggctgctcaagtggaagttatctggactgccttagggcaagtttatatatagcaaataaaattacttgttaatggtttccttttttccagcatctccaccccgaggtggtttgaactttgagccttttgtagtcctgatgaataatttcattttcctcaagtttatgacactcggaacgtcaagaactggaggtttgtgcaatttgagaccggtcggcactgtgcagagatcagagtactaagagacaggtgagcatgaatgaggaccctccgctccagatatagtgtctgagagcggtttctgtagtttcgtaaaagtgaaaagtgcaccacatttagtgactactaggtggtgccaacgagttaatctttcggggataaatctcaactaatgtagtaccaggttaaggcttttaaaatgcacccatttttactgaaatgtattcagaatagctttagctccttaaaatatgttgagcctttatatacgtgaccaaattatcgacgttctattctgtattaggtactgagaaagctgagagaggaatcagactcatattctgttctccagagtttagtcagaggagataacgtattataataaaatcatatataattaaaggcagaaataagtgctaaatagagaataagatttgagctgggcgcggtgactcacgcctgtaatcccatcactttgggagactgaggcaagtggatcaccagaggtcaggagttcaagactcgcctggacaacatggtgaaaccccatctctactaaaaatacaaaaattagccagatgtggtgacgcatgcctgtagtcccagctactggagaggctgaggcaggagaattgcttgaacccaggaggctgaggttgcagtgagccgagatcgcgccactgcactccatcctggacgacagagcgagactccgtctcaaaaaaaattttaaaaaaaaagatttgaatgctaaagaagaagcaatcaattctcattattcatctaccagttgtttattcggcactttttgtctgtccaagattgtgctggatgctggtgtataaagaaaaggtaaaggccgggtgcggtggctcacgcctgtaatcccagcactttgggaggccgaggcaggcagatcacgagggcaagagatcgagaccatcctggccaatatggtgaaacccgtctctcctaaaaatacaaaaattagctgggcgtggtagtgcgtgcctgtaatcccagctacttgggaggccgaggcaggagaatctcttcaacctgggaagcggaggttgcagtgagccgagatcgtgccactgcactccagcctggcgacagagtgagactccatctcaaaaaaaaaaaaaaaaaaggtaaaggctaggcacgatagcttacacctgtaatcccagcattttgggaggctgaggcaggcggatcacctg

SEQ ID NO: 1414 - DNA, 4001 bp, Homo sapiens
tgaagtgtcttgcaaggtagaggctattgcaaccatttcaactagtgtgtcaacagtcttctctaaggtgggctagaaaaatggtttcatattcaaattgtaactctgaaaaacaactgatggtaataaagagattccataatcagacagaactaagtgaaacaattagttttggtagagttctgtggtaatcatagttagaagtttatcctgggtagctgaaatataactaacttcagactccaggcctgtcggtggcttgtgccaatcaccacaacactttgaggggccaaggccagaggatcgcttgagcccaggagttcaaggctgcagtgagctatgatcacaccactgcactccagcctgggcaacacagctcttgttttttaacaagacattgttacttaaaaaaaaactgccctgatgaaacaattctaccatgaacactgatgttgttctgtggactacttcaggaagatggactaagaacatcattaaatagttccaaccagtttctgggtaattttatttttaattttttgttatgagggtcttgctatgttgcccagcctgggctcaaatgatcctcccaccgcgggctctcaaagtgctgggtttacaggtgtcacaccgcgacagccaagggtaacttttttttatttttatttttgagatggagtctcgaactgtcgccccggctggagtgcaatggcgcgatctcggctcactgtaacctccgcctccaggattcaagcgattctcctgcctcagcctcccgagtagctgagattacaggcgcccaccaccacgcccagctaattttttgtatttttagtagagacggggtttcactatgttggccaggctggtctcgaactcctgacctcgtgatccgcctgcctcggcctcccaaagtgctgggattacaggcgtgagccaccgcgcccgtccaagggtaactttttaagagctgccctacagctcattacctccttctcaaggagcatgagtgtcaaaccacctccagcaaagtagatgtagtcttttacagatttggaaagaaggatttaggaggaaagggaagtcgttcggaatgaaggatttcctcctctgacgcccagccgtcccccgttaagcctaaaggtgccagacctcaagactcttctagaaagagatttttcctttccaaggtgaatccatctgttccgaaggtcagaagctattttaccgaagttttccgttccactgaaaaaattaagggtcaatcaaagctccttgccccaaacctgaatatgagcttgcctcgggtcatattcgactctaaagactccaccacaccatcctggactcccctatatctaggacaaaaagcgaccagtttctcaggggctccttgcggggagcttaccgcgccctcactgtccgccggcccgagtgctaccggagatcaccagcggcccggacgccagcgagtggaacatctcggtcgcactctcattggttccagggggccggaagtgcgtgcgtccagcggaagtgctcccccggcgcggtccgccaggccagtgccctcaggtaggcggggcccctggccctaaactctgggactggcgggcggtcaggcggcacagggggaatcccgggggcctaaggaggttgtcccagtttttgtcaggtaggcccggaaggagtttcggggaccatgggtttacggctacctctggtggcaattggggcctgttggagcccggccgccgcgggacctacgtgccggacttcaagttcccgcgtggggtgggatttgctgcggtggccggagctgattcttcacccagtcctgttggttctgggccaaaccctcctcactttcaaggaagaggcgtgctctccgcccttaccttttccaagcctctgggtttgacgccatccctcaaggcgtgtccggatgcgggattttcctcaaagaccctctcggcctcgctaggaagaaactcagaaaggctgcggtaggcgcagtcgagggggaaagtgcccccgcccttgatgtctcaggctgctcaagtggaagttatctggactgccttagggcaagtttatatatagcaaataaaattacttgttaatggtttccttttttccagcatctccaccccgaggtggtttgaactttgagccttttgtagtcctgatgaataatttcattttcctcaagtttatgacactcggaacgtcaagaactggaggtttgtgcaatttgagaccggtcggcactgtgcagagatcagagtactaagagacaggtgagcatgaatgaggaccctccgctccagatatagtgtctgagagcggtttctgtagtttcgtaaaagtgaaaagtgcaccacatttagtgactactaggtggtgccaacgagttaatctttcggggataaatctcaactaatgtagtaccaggttaaggcttttaaaatgcacccatttttactgaaatgtattcagaatagctttagctccttaaaatatgttgagcctttatatacgtgaccaaattatcgacgttctattctgtattaggtactgagaaagctgagagaggaatcagactcatattctgttctccagagtttagtcagaggagataacgtattataataaaatcatatataattaaaggcagaaataagtgctaaatagagaataagatttgagctgggcgcggtgactcacgcctgtaatcccatcactttgggagactgaggcaagtggatcaccagaggtcaggagttcaagactcgcctggacaacatggtgaaaccccatctctactaaaaatacaaaaattagccagatgtggtgacgcatgcctgtagtcccagctactggagaggctgaggcaggagaattgcttgaacccaggaggctgaggttgcagtgagccgagatcgcgccactgcactccatcctggacgacagagcgagactccgtctcaaaaaaaattttaaaaaaaaagatttgaatgctaaagaagaagcaatcaattctcattattcatctaccagttgtttattcggcactttttgtctgtccaagattgtgctggatgctggtgtataaagaaaaggtaaaggccgggtgcggtggctcacgcctgtaatcccagcactttgggaggccgaggcaggcagatcacgagggcaagagatcgagaccatcctggccaatatggtgaaacccgtctctcctaaaaatacaaaaattagctgggcgtggtagtgcgtgcctgtaatcccagctacttgggaggccgaggcaggagaatctcttcaacctgggaagcggaggttgcagtgagccgagatcgtgccactgcactccagcctggcgacagagtgagactccatctcaaaaaaaaaaaaaaaaaaggtaaaggctaggcacgatagcttacacctgtaatcccagcattttgggaggctgaggcaggcggatcacctgaggtcaggagtttgagaccagcctggccaacatggtgaaacctcatctctactaaaagtacaaaaatcagctgagcgtggtggcgggcacctacattcccagctactcgggagaccgaggcaggagagtcacttgaacccaggaggcagaggttgcagtgaaccaagatcatgccactgcactccacctgggtgaccgtgagacgccatcaaaaaaaaaagaaagaggaaagaaagaacgaacgaacgaaagaaagaaaaggtaaaatccctacttaaataattcacaacctagtgattgggaggaaatcaaggaagaccttgtagagaaggtgacacttgaactagactttgaagaatgaactgggcttcataggtagaaaaaaaaatgcaggctcaaaaaagtgcatgacatttttggaacagcaagtcatccagtgtggttagactgtaggaaactaactctgaaaagacattgtcagttacatcttgggtttgccttgact

SEQ ID NO: 1415 - DNA, 4001 bp, Homo sapiens
gtgttcttagggcactgatagtccttagaagactgatgacatgctcttgtctaccctgatgctggaacagaagtccttatttaacaggcaagttggcattggttcttaataaaagacttttgaaagctgaaggaatggtgaagaagggatggctatctctcagcctccctccttctatcgtgtagatatgcctacccgatttgccctttgctcaaagtagttctatattctttccatgaggtttttaacaagcgagcccagttcagcgcaccttttaagtttaaagatgaatatttttagcctaagccacctcgccctgtctttaccgctgtggtgtggttttcactaaacctccctaggagggctcgcgcagtcctcaggctccggataaacacgtgtgcccgcatccagctccggcgcgccctgcatttcagcaccgccgcctctggagagcgccttgctggcgggccaggtcagggcctcccacacgctctctcatccatcccagcccactcgcttttccctactcctcgcttctctcagtttcaagaaaaagcacccccaacttctaacttctcaattcctgcttctaaagtgacctccgcgtccctctttccgtgtctaaacgctcatgccccacgcctttgagtcctacgagcagctgcgaagccgcgtggcttcccaccggtggcgcgagacctccaataggcatctatcgatcacctttcccctaccgctgctggaccccgaaccagccagccggatgcccccgctcgctctctctgactccacgccccaaagcttctaagaaacaaacgcgcgataagtcccctccccccaacacgcacacgcatatactcacacacagtcattcgcacattcgtacacacactagacgcctcaagccttccgagtgccatcgccaccctgggcagagcctcagccaacttgggccccgatccttcggctccggctcgcgcagggcctcccgcagcctccgcccggccccctccccgtcctaggcagcgggtccctgaggccgaacctaggcggaaaagggccccctccctattcactcagcatccacctcgcgcgggcaatacacggcccacaattcccaaacactggtccctgggccgcccagaatcaccagccaaatccgaaattaatcttgaagccccagcccctgtcaccggtgtgtcgggcgcgagtgtgtttgcgaatcccaggcacatacatgatttaactccttcgagctttcggcccatcctaaacaaacagcacgttatctccagccccttcctcccctactcggcgccccaacctctgcccccatcccggtcttcgccagcctggtagccgaaccaccgcaccgccacactccagttctggtatctcgaacccctgcccagccccaaatgatactcatctctagtcccctcccatcccccacctttggccccctgcgagccgggtctggccccggcaagtgacgcctcggaaacgcagtctgcgtaccctcccctgagtccaaaatgaaggggccgacctccaccagctggatgagccggcccacccctccgaaggggcacacgccttcccgttcgatcgccctggaaaacacaggtgcctgggaaaggagaggagcggaagcggcttccagaggtgggcgggaggactcaccaaacatctgaatgtgccctttggtgatgggattgaagctgccgcaggcgagcaagataacgtgggtcttggtggtctcggtcatggtgcagatgggtccttcgcggtggtctaggggttgcctctctttttgtgtctcgttgtgtctgcagagggagaaaggaaggcgaggctccggcggtggatgctgtggactccaaggagccgctccagacgcaaaccgcgtcactctccgcctccccttaacgcttgcagctccggctagatccgaggctgcttttgtattgctctgctctcttctctcctcggtcgctctcttttcgttctggcttccttcgcatctctcgcctggtgccccaccccatcctctctatcgcccccagcccacttcactccatcactgtcttccttagagtttatccagaaggcaagacgtggtatccaagctcagaaccaagagcccacagcatggtgtgagctctttctgcctcttgcctcatcttgattcagttttcctcctcattctaacatttttctgtcccccctactttctctaacatctccaagttaaaaaatgtttgatcttaaggtattttttctttctctcttcctcaaaattttaagtgagaaatgaccattgtttatttcagtagtattcatttctgcttttcctttttcctttatctgatgattccaaactattgagttgagtccaaatcttgatctgctggctgcagagagataggggtgatctaagcccttcctctgcaatactgatccttttcgtgggcgaagcaatgctatccgtttgagagaacatgaagggggcagagttactaaaactgtattagaaaattatggggatccgccgggtgcggtggctcatgcctgtaatctcagcactttgggaggccgaggcgggcggatcacgaggtcaggagttcgagaccagcctggccagcacggtgaaaccctgtctctactaaaaagcaaatacaaaaactagccgggcatggtggcgagtgcttgtaatcccagctactcaggaggctgaggcaggagaattgcttgaacctgggaggcagaggttgcagtgagcgaagatcgcaccactgcactccaacctgggcgacagcgagaatccatctcgaaacaaaaaaaaagaaaaaagaaaatgatggggatcctccataagctaccaaagttgagacaaagacttaccatttaacaagtgtttcttgagggctcattatgtgtcaagtattgctataaaccctgctggtgaagcaaagtcactgtcttcattttactggaggaagatagacaataaatattagatggcaattgtgcaatgcacagtaagtgaatgcaatttactctctgacagagcagagagtgagtggagaagagaggacgaatcaagtagtctgagaaggcctctctggggaggtgacatttcagtgagacctgagcgacaggagtagttgctagctcacgtattcagggacagggaagggcttactgtattcatagaaatgaaaggccagtgatgctagaaagtatgggcaaggggaaaaatgatagaagactgagcagcaggtgatcagggccagatcaaatggggcttgtagactagggcaagagttagacacttttctaagtggaataataacaaaaggaagccactgaagcttttaagcaggggaataatatgtaatttacatttttataggatcactctggctgctgggtggaaagggagggcaaatgggaagacaaggaaagcatttaggaaaatctggtagcctaggcaagtggagttgtcctgagaccagggtttatagagacgggagcaacgagaagtagatggtctcaggatatgttttatagattttgaaatttggcttaaacaatgagtagactgaaattgagaatggtaggggaagatagatgttctatgcttatacaacagaaagaaccaataattctttgcagatgaattggatatagaggataattctttttttttttttttttttttttgagacaggatctcactctgtcacccaggctggaatgcagtggcatgatctcagctcaccacagcctcgatctcctggactcaagcaatcctcccacttcggccttgcaagtagctgggactacaggtgtttgccaccatgtccagctaattcttcgtgttttttgtagagatgggatctcactatattgcccaggttggtcttgaactcctgacctcaagcaatccacccacggcagcctcccaaactgttgagattaaaggcatgggccacaga

SEQ ID NO: 1416 - DNA, 4001 bp, Homo sapiens
ttctgactgaccctggagcctccttgctggccccctatgactcagtgtgccccgtcctcttgggacctgtgagtataacaactttcttttcaacagcagccatctcctgatctgttggccttgtcatacctaaaaaatagtaaaacctcaattttaaaacagaaggaagatactcattccagggggacaaagcgaggtgagcagatgaactgagtcaggaacaaagtctctaagccctactgaagcctccttttcttggctttatttgtttgaaaagcaatgatatcattttcatccactgtcaccaagggagtctcaccctcccccacacagcctggagcaactttgcaaaactgaggggaagaggctagctgagaagaaggcagggaagaattaggccaaattaggagggttttgagtgccaaaccaagtaattaacttactgaccatttgctggtgatctgctctgtgttaggcgcagtgttaggcacttgggtctgtattttctcatgttaaatttcacagcaactgtgtaagttgttaggtgatataatcactattttccaaataaggaagccaaggttcagagtcattaagcagttttgcccgagatcacagagacaggaagtggcttttggaatttgaagtgggatttgaacacagaatttttgactctaaggtgagtgcttattcgatttggtcctttagtcccagatcctttcgttccagtctggatagttttgggaagcagggagctgggtgatcacattcttcagggagcgtgaaacagacaatcctaccaggccctccctcttcaagttgtccagcctaagccttaagacagttttccagtgagatagttctacttgagtctgaagtaagtctgaaagcacagtacggtccatgaagtttgatccatatgtgggaccacaggagcctaccatgccatcccttggaactgttagctgagtgggctgaggctcccaataaatacaggctagttatggatttcctctccacagggagcaattttccttgctcttcctccagccagtcagccatgcctaggccagccatctactaacacttgtcctcagacccctgggcggagaatgtgggtacaccagcacaatgccctctctctgccctcataccctttattccaatgcactatggagtcagcatcttcccaggcctgtgtctgtgactcatgatggcagctggatttcccaatttaccaatacttatgtgacttgtgtcttgtgtatttaaggtttgaggctgggtggaagttttctaggaagacaaaggaacaggaagtagtggaagacatttttggaaaagcgtgcagcacgtacaaaggcatgaagatatgatattttgcaggtaatgaagaaaagagcaatatgccagaaagaaagatgtaagtagaagaaggtaaggctggaaagaaagtggggtagatagcatgataggaacagggttttcttagaagaaacaatcgattgcagaaggcacatgatggcagctggatttcccaaggggatgataggttacccacatttggtatattcttctacccagactcagtggccagtgactggccagcagaaggtgcgggctgggcttacatgcatatagggatcaggctgatgtccctaaacaggcatgcacagagcagccctgcaaaccttgagaagctccgctggagacagaatcctgttttcttgaccatctgcacctccctccagctgccccgccctcatgccatgtgcctcaggctgtctgaactcacctgagagagtaacaaacacttcccagagcccctggcaggcctgaatttcctctagttcctggatttccatctatttgtctggtttttgcagccactacttgcagccctgtgctggccatcagagagtaacacaaagtggtgcagctgctccctcattgttgctgatcttgtttgctccactacctccagcttgggagaatttgaatccctttgtccttacagccaggaaatgatttatgaccctcccttccataactgtcacttctgccagaccatgctgagagaacctctcatatgctcccgcttgtaggagccactccggaagtgtggcctctgttcaaatcctttccactggaaaaactaccccattcccatcccgcatcctttccaaatcaggctccaggcttcttggaattcgcccattgttgaaaaagccttttttttttttttggtatttatttcttcagaaatggaaagctaaatatatatgtaaaaatatgacacaaactaaatatatatgtaaaaatatgacacgaaaccaaggtttccccttcagcgaaactcaaaaacacatgagagaattctttcagaaacccacagactgtggtactaaatatagctgggcagggggtggagtggggcaggggatagagtggaaggtggggaggaagcaatgaagacaggaggaggacatgtgatggaggagcccaccttggctcctcattagggtatcaagtctgtgtcatttgcatggaatcaggctctatttttaactacacgtctattttattctacacttttattaacctttctgagtacaagtttaccatacacgcttcttaacatagggataattcgagcttgaaatagactttatccaggagatagctgtttttcctgggtaaaacaggtgacagaatattcagcatagattcctttttgcgaaggtgtggcagtgctgaggctgcagtgcggggattttttgaaaggtcagtagttgctttttccctaaagaatgatattggaaaaacagtttcctttacagccttttttttttttttttttttaaagaaagagtttctctcttgttgcccaggctggagtgcagtggcatgaactcagctcactgcaacctccaccttccaggttcaagtgattctcccgccttagccttccaagtagctgggattacaggcttgcgccaccatacccggccaattttttgtatttttagtagagatggggtttcaccatgttggccaggctgttctcaaactcctgacctcaggtggtccacctgcttcggcctcccaaagtgctgggattataggtgtgagccaccgcgcccggccctttacagctttcttatttgtgtttatcttccctctctacttcctctagtaagaatatcttcatggaacagagttcccttctagggaaccagctgtccaggtttgcaggggactttcttggttttagcactaaaaatcccatgtcctgggagaccttagtccccgacaaactgtgttggttggtgctgcaggctgaataatggctttccaaaaatgttcacaatctaattcctggcacctgtgaatatgttatcttaacatggtaaaaggaatccagatagcccctggaagctagaaaaggcaaaagaatggatttttccagaaagaatgttttcttccagaaaacattctttgattttcaaacttctataagatcataaatttgtattgttttaagctaatacgtttccagtaatttattacagcagcaataggaagtgaatacagttggttacccagcccctccctcaaccaggatgcccaatgaaccactgaaccactcatgcactgaaccaaagaagctcaattactgcattgagtggagaaacaaaatcagctcattgaaaacgtaccatgtgtgagaatttcagggacacagaaagacacagttttaaattaattccactgttattttggacttttctctaagaaacctgaaagtaaagaaatgcacaataacctacacgtgccccaaaataaagcctttgtaattccttaggttaaaatactaacctccccctagaggcaacagagcatgtttacaggttcagatttaaatcctgccccaggtgtcaccagctgggtgaccttgggtacccagctagttactcaattgcgctggctgccaactctca

SEQ ID NO: 1417 - DNA, 4001 bp, Homo sapiens
agtgggaagtggaagtagagggggcggggagtggcctacagggtcagtctactcccttcacaagggttaccaactagcaagacaggattgccaggaggtacgtttttggcagactcacgtctcctacccaacaacctctacaacataccctcaaacacactacacaggccccccagccgcggtcttccctggacttgctgtgcctgcgccctgcgctacacaggcccccagccgcggtcttccctggacttgctgtgcctgtgccctgcgctacttttgcctgatggtggcttcacccttccagaggctcagactaaaggcaaatctctgtctctaatacccagcacgcaacttgtcatcagatctcatcagcaacaccttcaaaaccgttcgtgcctcctctcaaaccaccacatagttcaattctcagttaacctaaaggtctctctgtttccacccttgtcacctacaaggcactccaccgctcaaacccagaagtaactccctgttttacgaggcaatcttatgacggtctacggcacctggctcttcatcacccttctgggctcatctacccctattcaccccctcactcctgccgtagccacgtttacctctgtactctccccaaatgctcccactgcaaggcttttgctgttttctgctgcctgaaatcctaagacacgtttcccctactgtctgtgtggcctccttgttcgaggtctttattcagacgtcatcttctcaaacaaccacctccgcttttttttttttttttttttctcctgaggcggaatctcactctgtcgcccaggctggagtgcagtggcgcaatctccactcaccgcaacctccgcctcccgggttcaagcgattctcctgcctcagcctcccgagtagctgggacgacaggtgtgtgtcaccacgccaggctaatttttgtatcttttgatttctttctttttctttttgagatggagtctcactctctcacccaggctggaatgcaatggtgccatctcggctcactgcaacctccgcctcccaagttcaagcgattctcctgcctcagcctcccgagtagttgggattacaggtgcccaccacgcccggctaatttttatatttttagtagagacatgatttttccgtgttggtcaggctggtctcgaattcctgacctcaggtaatctgcccgcctcggcctcccaaagtgctggcattacaggcgtgagccaccgagcacagcctccgctccttctaacagagcaactcggctcccctgcaactctctcttcagcccctctgtccttcctttccctccccagcacttatctctcttctaccgaactgcaggcggtgatttcacccaagaacgtgagagttctcctagatcgggaagagatttttgcacaactcaccaacatacgctccctgcctaggacagagtttggcacggaacaggagctcagtaaacatcggatgaaagagtaagttaagctgaaaggactggggggcagaggtcggcgatccttaggccttggccctgagaccccaggcgaggtcagcaacccaaccggggtgggacaggacgagcaagaggttctgctcacgcatgtccccactaacctggccgaggggctcccgcccggcttatccggactccgggcagcctcgcgtgcttcccgtgtctccgcttgtggagaattttcggactcggattcggactcggagtcaaagcccgaagctaggaactcgtccaccgtcagctccgccaggcgcctgcgggtcacgcaggagtcacagctgcccgcacgcccagctcgccccagccccgctgagaggagcaagaaaagcccccttggatacagacacccaccgggaggccaaatcggccctcggacccgcggcttacctcttgcggctccccgcagctgccatgacaccaacccgaagcgtgcaccccacttccggccccagaatgccgcgcggctgcgcacttccgccgcccaggccccgcccctttccccgccccgccgcgccacgcccagccgagtggctctatggttctccgaccgcaacgccggcggcctcagggcgggagggcgcgttcgcgtgctcggtgcgggcagccccggtggggcccagatgcgcctcccgctcggcgcccggctccgtaggacgcggtgacgccggtgtccgccccggggaagaccgggagtcccgccgcgcccgcagcccacccggcgctccgaaggcacgcgcctgcgaggacgccagactgcaacggcggggctcctatgcaaagagctcccacaaatcaacaataaaaagcagggagtccagtggaaaacgcgaggggcagtgggaaccgcactgatgtcgccagctcgacaaaagacgggcgacccgagggccaggctggcttcgcctccgatccgcggagaccgggccagcgccacgaacaccacgcagggcgctccccgtccatggccctctgggtgccgaccgcggctcttcccggggacgccgcacgggacgaagacggtggggaggccggcgccttccttcccgctaccagcctgacacccgggcccccgggcctggacagccagaccccgcgacaagggcgccgcggggcgcaggcacggctcccccagccctggcgctgagggggcgcgtgaggcgaacacgggcggattggcctcggggtcccattcgacttcttggtgccgcggggccccggggctccccggaggagagcaagttagggggtcgggggagcggggatggcttccgggggaggaggagggcgaggcctggggggctcctcggaggaggaagagggcgaggcttaggggggctccttggaggaggaggagggcgaggcttaggagggctcttcggagaaacaggagggcgaggcctgtggggggcttcccggggaagaaggaaggcgagacctaggggggcttcccggaggaggaggaggaggagggctaggccgggggcttcccagaggaggaggatggcggggcctggggggcttctcggagaaggaagatggcgaggcctaggggggcttctcggaggaggaggagggcgaggcctggtggggggcttcccggaggaggaggatggcggggtctgggggtgcttctcggaggaggaggcggacccggggcgcagcgctggaagaatccgcgtccaacgtctagtccccgaagcctctcgggaggcggggcgggcggcgccgagaaacagcggctgcgggcgggagcggcgggagtgagcgacacagagcgggccgccaccgccgagcagccctccggcagtctccgcgtccgttaagcccgcgggtcctccgcgaatcggcggtgggtccggcagccgaatgcagccccgcagcgagcgcccggccggcaggacgcagagcccggagcacggcagcccggggcccgggcccgaggcgccgccgcctccaccgccgcagccgccggcgtgagtgggcgggggtcggggcgcggggggcggcctcgggacctgcgcggcccccgccctcgcgtccgctcgcagaaggggcgggggccgcttccgagggccgggggaggtcgggactcaggtgcggagcggggtcggcccggagtaggttccccacccgcgccccgcgcgcccaggacgcgactcccgctgcggtcccgagagggcggctagggacgcggaggagctgagctcgtgggggcgccgggaagcggggccggacgcggggctctgttcgcggctctgactacgccccaggggagcaggggcgcagcggaggcctggacacggcgcgctccggggcgggggtccttggcggaggtcaggcgagggctgccggcgcccccgtcgcaccaggggctgggtccccgcgggctgcccgggccccccagcggctccagggcgggcgggcggctccagcggggcgaagcctgacccgcccgcctcctgcagccccgagg

SEQ ID NO: 1418 - DNA, 4001 bp, Homo sapiens
aggtgatccgcccacctaggcctccaaaagtgctgggattacaggcgtgagccactagacagggtttcgccatattggccaggctggtctcgaactcgctacctcaggtgatccacccacctcagcctccaaaagtgctgggattacaggcgtgagccactgtgcccagctctctcttttccttttcctttctttcttttcccctccctccttcctttcttcctttctttcgagacggagtctcactctgtcgcccaggctggagtgcaatggcgtgatcttggctcactgcaacctccagctcccgggttcaagcaagtctcctgccttagcctcctgagtagctgggattacaggcgtgtgctaccatgcccagctaatttttgtatttttagtagagatgaggtttcaccatgttggtcaggctggtctcaaactcctgacctcagatgatctgccagcttcggcttcccaaagtgccgggactacaggcctgagccaccgcgcctggcccatactttatatttttaaactaagatcataccccatggcagctacagagaaagcatggtgaccgtgaactcggctctgtgctcctggttcagacagactctaccactctgtccttttaaagacccacagcttgccaagtctcttccagaacttcctgggttttgccttccctcctgcattagacagggaatctccaggaatggcatccacgttaagaatcaggctgcctgagttcgactcctagctctccctctactgtgtaagttacccaacctcagtctcctcgtctgtaaacacttagagagagggacaactactccgtaagagagctggatgtttaaatgggttcaaagcctaaaacacttttggaacccttaaatcctggaatttctgagctctcagtaattgcaaccttttttttttttaactattaaaatccctttcagagttccaggtgcggtggttcacacctgtaatcccagcactttgagaggccgaggcgggtggatcacaaggtcaggagatcgagactatcctggctaacatggcgaaaccccgtttctactaaaaatacaaaaaatatagccgggcgaggtggcacgcgcctgtagtcccaactactccggaggctgaggcaggggaatcgcttcaacccgggatgcggaggttgcagtgagccgagattgtgccactgcactccagcctgggggacagagtgagactctgtctcaaaaagaaaaagaaagaaagaaaacaaaacaaaataaagtccctttagctcgtaaggcctagggaccccttagcagggtacctgttaccctgctgctcaggggagcctagttgccaccaaccatcaagaggatggacttgaatccgactggcagccagagaacaggcccgggggaccacggtcctctcctaccctgcagctctcccggggctgcctctccagccctccctgccctcggggactactaccggcgccccccacctacctgctcgaccggcagcagcagcaacgcgcggccggggcccacgggccgcaccggtgggatgaggagaggccggtggcaactcgaggcggattcgagttcgggttcggactcgggttcggaggccggggtcgggctagggatcgggctgggggtcgcggtgttgggtctccgggccgccgccgcgcgcgacacctggcgggctccctccctccagtccacgccggacgcctgggcttgcagtaaccgccaccgtaggcgccgccgaccgcaccagcgcaggctcccgagccggcggcggggccggcggctgaggatgagctggggccgggccttgcggacccgcagccaagtggaacggcaggaaccccgctttagcagcagtcccgagtccgccatgctgggtcctcagggcctaccgcgcgagaatctcgcgagatcccgtcggtccgccccgctgccctcccagctgccgaaaagaggggcctccgagccgccggcgccctctgccggcaacctccggaagcacactaggaggttccagccgatctggtcgaggggctccacggaggactccatttacgttacgcaaattccctaccccagccggccggagagagaaagccagaaacctcgcgaccagccatgggccacctctccggaaaaacaccgggatattttttttctcctgcagaaaaagctttaggattggcagtttaaacaaaacatgtctatttgcataccttcggtttgcatgcatttgtttcgaagtgagcaaccctgggtaacaaggcgaaagtatatgacaatttgctcagaatcttaatgtcagaaaactggagactggggcaggggggtgtcgactcaaagctgtgtctcatttagtaaactgaggcccaggtaaaaagttctgaaacctcgcaacacccggagaaattgtgttccagcctcccacctcgccccaaaatgccagagctccttttctaagccaggtgaagtcacagagcgtggacagaacccacaaccgtccagaggaagggtcactgggtgccacctggtttgcatctgtgccttcgtcctgcccagttcctgagtgggaccgcaggcccggaatgtcaaggcaaacagtcctgcttcagccactgggctccagtcccaccccttttgggggcctgaagttaggaagcatccggcagctgccttctatttaagcaactggcctccttagaggccactccttggccatgccaggcgcgggcatctggccagcatgctgctctgcacggctcgcctggtcggcctgcagcttctcatttcctgctgctgggcctttgcctgccatagcacggagtcttctcctgacttcaccctccccggagattacctcctggcaggcctgttccctctccattctggctgtctgcaggtgaggcacagacccgaggtgaccctgtgtgacaggtgagtgaggggccagcagagccacacttagtgggacccctggctatagggcccctctggctgccatcctccaaacaggaccttgcctctgcctttgccccttgaactgtccccaggccttgttcatcaatccacttgccacctaagtgctggctagaccttcctagacacttcggccagtttccaattatttcacccttgctgttagaatgtgttgtattgtaacttcattgaaattggttcttggctttgtaccatacctaggtggccaggcctaagcaagggcagctttttccctcttctttttttttttttttttttttttgagacggagtctcgctctttcacccaggtgggactgcagtggcgcgatctcagctcactgcaagctccgccttccgggttcacgccattctcctgcctcagcctcccgagtagctgggactacaggcacccgccactgcgcccagctaatgttttgtatttttagtagagacggggtttcaccgtgttagccagaatggtctcgatctcctgacctcgtgatctgcccacctcggcctcccaaagtgctgggattacaggcgtgagccaccgcgcccagccgctttttccctcttctatcttctctccactcctacccatgttcaaagttccctagagtcccagatgacaagtaggattctccatggttcttcatggggtgggaagggaagacacatcccattagatgctttaggagcttgacaaatataaattaggttggtgccatcatgaagtcaacaatctaggtagagggaaactactgcttttcttttatttctatctatctatctatctatctatatttttttgagatggagactcagtctgtcatccaggctggagtgcagtggcataatcttgactcactgcaacctcctcctcctgggctcaagtgattctcatgccttagcctcgggagtagctggaattataggcatgtgtcaccatacccagctaatttttgtatttttcgtagagacaggggtttca

SEQ ID NO: 1419 - DNA, 4001 bp, Homo sapiens
actctcttctcatcctgtcttctaaaaaacaaaaccaaaactcatctattgacccactggctaagaacagtgtcacaacgaagcccatataatctttctccctctcccactcacccaaacatagtgagaaataggaagcactacacatggctttttaaattagtgaggcagctgtcatcaagccactctgtaggcgacagcttctttccctgtcttccttttttatttgctatggcagacatctaggaccatgattcataccacatattaccaggaccacctggtaggggtcaaacatttgctgactgattcatgagagggcctcctccaaccagcccagaagggctgaggtgaacaatttgtggcaccctcatcagtttccaaccttcttaaggcagagcagttggcagcaatgcattcagcatgcttgaggcccagtggtgtcaacagctctgttcttggtgagcaatacttatgtggagataaaactcagtgggaggagacaggggcaaccagaccaggaccctggtttgaagaaactgagttagaaggccaataccagtgttcacacatatgtgattcttgtgcaaagaagtgaataaagagttctccagggagcatttcagaaggcccctgaagaaagggaactaatgaatttttatggcctggaccaatgtagcttatggggaaaagggtgttcttgtaccaaaaccatggtgtgggtaaagacagagccaggtgagtgggggcaggagaggtgggacgaggatgcaggaagatggatggggagtcaaaagcattagctgattcccttgctcagaaaacaagtgctcaaatttctgaagaggagtttgctccaaagagattcacatttttttagggagtaaagggcagtgctacctcacagttggccacccttggccaagtgacttgctggcccagggtgtgcccctcccagcaaccagcactcagagaattacacttgtggataccgtggctgcctccctcttgcccagattggaggccctgaccttgccgttgaccctatttctgattgagtggagccacaggggcataatgcctaaggaatttaaactaaatctgtcctccataaagctgctaaggacagaactgatattttggtcaagaagtcagactcatttttttgtctcatattaattgagagaagatctggggaggggtgagaacaggtgtgatacagtgaaatacatgtttggtcttcatccctgtttcctgacatatagctccccaaacccttgagatctccagagtggtaagagtgttttttgtatgcttattagatgattagtggttggggaacccctggaagcttcgggatgggggctgctcacaggacagaccaaggtatgattagaggataggatttttcagtcccacgccccaacctccaggagatgaggggctaaaagttaaactaatcaccagtggccaatgatgtaatcaatcatgcctacataataaagcctccattaaaaactcaaaaggactgggtgtggggagctgccgggcagctgaacatttagaggttcctggagggtggtgcacgttgggagggcatgggagctctgccacccttcccacagaccctgccctatgcatctcttccatctggtgttcattggtatcccttataatatcctttaaaataaaccagtaaatgtaggtgttttcctgagttctgtcagttgctctagcaaatcagttgagtccaaggagagggtagtgggaacaccaatttatagccacttggtcagaggtgtaggtgacaaactattacttgtgattggtgtctgaaatgggggaaagtcttgtgggattgagccctcaaactgtgggatctgatgctgtttccaggtagatagtatcagaatcaaactgagttagaggacactgtgtgccctctgcagaactgcttgcttgcttggtgtgtgggaaaaagccccatacatttggtcatagaagtatgttgtgacagtatagcaggaagaaactgagtttgtttcttcctatatccactcaacagggaaagaaatgtcaataatattgtaatctggatgtcagatggtgggtggctattaaggttttctcctctttggaaagggaggcatggagaaatttcagctgggggtcccccaaatctatttggttctaaggaacaggacaactgctatgggaagcccacagataagcctcagagaagggtaagcttaatcttgcacttatgagtaccgttacttatcccaacaaagagtggcatcgaaaggaacctactgagcaaataaaattactaaattattcatcttccattttctttggaaccaaaccaaccagagagaaatgtggaacaaagtctttcagcagatataaacaaagaaagtagagaatcctgcatacctctaactggcacttattgagggctctctgcacacatactgcagagtcagtttcttttcttttcttttctttctttcttttttcttcttttttttttttttttgagactcactctgtcacccaggctggagtgcagtggaatgatctcagctcactgcaacctctccctcctgggttcaagcgattctcctgcctcatcctcccaaacagctggaattactggcgcccgccaccacacctagctaatttttgtatttttagtagagacggggtttccccatgttggccgggctggtctcaaactcctgacctcaagtgatccacctgcctcggcctcccaaagtgctgggactacaggtgtgagccaccatgcccagcccagagtcagtttcctgctttccagtctgaacatcccaacaggacaggccatttgaatgcaccagaccaggagctggagtgcttgtctgttgggtactccctaggcagttgtagacaactcacttctctctggacctcagtttctccatctgtcaaccgagaggactggcttgaggctgagacagttgataattctacatccaggttgacattgtggtcagtactggaggcaatttgttaatggctcattgaagaaaactctcagttccccattgtgaagtcagaattagaattgagggtgaaggaaaagtcccctcttacagaagccaggaaaaaaattgaaagctttttttgcaggtacccaagttcaatggtggagtaccagcaatacctagaagaagacctttgactcaaatgcttcccatcgcagatccattggcaccaagtgccatgagaaaatgctccttgtaccagattaaataagagttttacctctgtaaacccagttacactatttcaggtattttcaagtcctgtgaatatgtgagcacccactgctgctactgcctgagccagcactaatgagccctctgcttctgcagctgtcaaaagtggtactgggcataaggctcaaacctcaagctgtggcaggctgtgctgcaggagaacccaaaccaggccatactgagacaaaatagcctggacttcttttaactttgaggtgcagcattttataactatgtaggctcgaacttgaagcactgaaacgaggcagcgttacgtgaaaccttggtttgggcagtctgctacagccctctgtgctttgtttccccattcatacaacaggggcagagagcaccacctcctccccaccagatgggattttttttttgtatttagcatgcttttctttcaaagaattaagccccttttgtaaaagtagaccatatttctttctggaaaggtacaaattagtgtctcctttgcagaactgtgttgtctttggcaatgaatgttgtacttacatactaagtcagtgatgtggcacagagtgatgtgacactacggccacgtcccgagtgccagggctcagatgtccagctctgcactctggcctcatcatgacacacaaaagttcagccctgcaccctccagctctacactgctttcccaaactctgaaaccca

SEQ ID NO: 1420 - DNA, 4001 bp, Homo sapiens
tgaccctgatgaaaactcatactttaaaataaaaacctctgctcaccaaatcaacaggcctgggcaaaaattaacccaagcatcccatcttagacccaccgaccaggtctattctgagagatgagagaactaagataagatcttggctgcagccccactctgtcccagccatacccagtaattcagctctgcattccacggcagggtttaatgtttcgggggactaagcggggcagttctcctagctccagcaaatatggctgggataaggttattcagggggaaaaaaaggtgagcttcaccaattcacccatatacatgagaaagaaaaaaatctaaagaaactgaccacactgggcacatgtcagatactcgaaaaatgtgtgaattgaaggaagaagacacctgatggaataatcctttcgtgagatgctaacagcctgcacgtacaccatcaagaaagagaaagagaacaaagagtcaaactgtcgccacatccaaagtacaacgttttcaaaaccagcaagacccagcctacttagagggacaatacttttccacctacaggcacactgtaggtgccgaaagtccctgggtctctctacgtcacagaggaggtcaagtggcttgaaggaagagcagaacactgttccacagaaaaagcactctttcctgctgatgggcagtgggaaccgccactgcagtttcagaagccagaactcctcactcagggaggtgcatcacagggagtcagccttgctcacacctgatggtccagggccgaggcttctgctccacccctcccccaacggtggacctggggctccgacctcagcgctgaaattccagtcatctctgctaaattcttcagcaacagttccctactagatgctgaaacttaacattaagccacaaaactagcaaatgggtagctttcaccactcccttcagtgactggcacatgcagaggagtctggcaaattagccatttaggaagtgactctgacacctagacccggttacctggagtttaaaaaaaaaaaatctggattcttttcttcaattaggaagcaggcattcctcttttaaaagaccttcctgaaagcacctctccctgggagcccagcaggtaaataacaccagagcttccttaaaccgattctaaacgaccaggtgcccaggctgagctcacttgccggcttctcctctggaggagggatccgggaagtaactcaatccagtcctaggcgggtaaggatgggggagtctgcaggtgggaagggggaggtgaggcaataccgctcaaactttgcagttgctcttgagcagttctgggcaggagcccgcggaattatagactcagaagggagagttaccctccctaagagaaaggcccccaaatcggcctagcccgccagctctgggtccaggacggctgtgcatcccatccgctcaaacatgcccccccaaccgccaccacaggtagcaccctccccggagccccctcaccttggcctcaaagcagatgccgtgctggaaggcgtcctcgttgtgcaaggggatccgcaggtcgtgcccatcgtccacaaggttgtacttggttttgctaggcatggttacccgcggcggacccgctccttcggaggcggcggctgcaggaaggggctggcgagaccccggggaggggagactggagctgggcgcggcgacgcgtggcggggcctgggagcgctgggcagggggagccctggccgcgcggcggccggacccggagcggtgccgagggccgagcggcagcgggctgagctgatgcgggcgacgcgagcggcgctgtggtcgcgcaattcctgccggctaggagggcggcaggggaggaggtggcggcgggagcgggctgcgcggcgcccctgcccggggaggggagcggtggggcttgcggcccgaagcgggactgggcgcggcgccggccccagagcagtggaacgcaccgcccgggacgaagaagaaaaggcgacggtggcggtggcggtggcggtggcggcggagcagggtgcctgtcacggagacgctggatcagccgccagcgagcggctcctcctgtggggcgggcccaggccggctcctcccgccgggctcagaggccccgcccgccgccgggtccgcccccgcgctgcccgcgctgccagccgagcaggtgaaagtccccgggagagtcgcgcccggccctgcccgcgcccccggccgcgcgacgccggcaacttcgccccggccccagactgccgggatctgaggtgccctagctcagcctagtttcctttttttaacggtcaaattctgagccggagctactgatggccgcggcggcatggccttgaagtttttgtttttgtttttggagaggggggaggggccgtgtttattgttttgttttcgtgttttaccaggaaggcccaagtcttgtcccagatatcccagatctgggccctcattaattctcagagtcccctttctcagaaggcaagactgcgcccaaatggaggactatcttaggcgctttttgttcgtatgtgacttgtgtaatagggcttatggggtgcctttagggagggttttaacatttaaaagccatcagccttgtagaaatggggaaggcagaaaggagtactaaggacaagagaatccagaacatttttatattcttgactgtctacaactgggtatggacaaaatgagcttccgagttatttccggccagcgtattatggttcccatcttagtaaatgctggagctcaatttgcctattgctaagaaggggcctagtcacttttctcctttacatcaacagttttggagaaaagttgcctaattatctccatcttggcagatatcgggtaatggaagggttgtgtcctatgtgttcagtttctgaacggtgcaagatatgcaaataaaggagctataggaggagttcgtgaccaagtattcagtatctgtgaaaacaccataggtagagctgcaggacagctgttatatacatggctaactccaaaatctcggaaagtaaccagtcaagccagtgtcaaagccagtcaaatctgagattccttagaccaaagggtcagattctctgttgaattcatcaccttaaacctacttttagtgccctgtggacatatctacccaaggcgacttgcagaccaaacattattgattgtttgttgtataggccaggcttggaattaccataaagcgtaacaacgaaactgcttgtaaaaggcatgtcttcttataccatttccatgacagatttctacaagagaatacattattgccgtgattgcatttctcattttgtcccatagtgctaaagtacaattgcccttaactagatattgcctattctctaactgctgaaattactggtcaagatgtagcaacttctgggatatctccttaaataaaagcaaactgatgatatggacaaattaatcacatacattatgctgtacagattttattatattcataaatattagtaagaaccaaaaataatttgcactgaagaaatgcaccactaacctttttataaatacaggacatgaaagtctaatcaggcatgtttgactctttgaatgtcaaagtggttttaatatgcatcgtaaatgtactctctaaaacctggcacagtaactcaataacttaaaggcaagaccttaagtaactatttcatttacatctcatattctctcccgaatttaaaatgtcctctgactccaaacggccttttttctagattagtttgagtctaactggactgctgaatttatcagaatttcatatctaagtctataacacattgtttgtagacaaaacacaaacaaaaaggctgaaatcccaaaggtatttcagggtctagtacagagactactacagagtagacagccaataattatttatggaactgaataataatagataatgatcattccctttcactatg

SEQ ID NO: 1421 - DNA, 4001 bp, Homo sapiens
tttcactcaaagaaaaaggaaaagcaaaaacaccatcatatatgctctttattaaatgcttcagaaacaacggctctgcttcatcactacaaagcctcctggtccacttctgaaattcttagtgacctagacgtgtacgaaatttgaactttccaagaagtatctagttggtgctgaacaacccagtactattttcgggtgataaataaccttgttctctttttaaacatctgcgattgacatgtcgactgactgttaacaatgaacaaagaccatatttttctgaagctcatcatcttcctaaccttttctttgaaaacagatgtagttcatgtactagttttttggtgaaggtaaaaatctttattcagattaggctcagaaaaagaaggggctgctttccgttcaacaaatatgcacaagacagcatcccactgggagcatcaatctcagaagcagtaaaacacagcctcggccctgaaaggactttctgaacacctttggagtgtcatccgtttaatatacattattttaattaatcctattagctggataatttctttcccattttattggtgagttcatatagcagagctggatttgaatccaggattacagagcagggctccaaagcccaagttatttccactaaagggtctgaagaaatgtagaatctaaaagtgtgggtgggatggggaagatatgatttgattccctttccttggtccaaccgtgttagaaacatccaaccataaagaagctttctaaggaagccctttgaattaacgtatccactttttctcacccgcccgtgccccacccccagccatgccaaaggagcagcaaatgctgctgccaggttggaggaattggtgatcgtcacaccacattcctgggtctggacacagcctgaaacagcagcagagctccgcgcctcggaaagaataacagcagttgagatttttaaatcatgtgcctcagcatgcagccacaccagttgccctacttctcctgcctccacctttcaaagacgcgagcagcacacacggctcccccggactttcggtggggttggagtgtcaaaactcaggcgcgccgcaaaaccccgtccccatccaaaccaagcccacacacccggcccatgtgccgccccctggcaaaggcgaggctggctgcgacggtgcaggccgtttggcttggcggccctgcccccgctctccacgccagaatctggcattccttcgctcagcccctccgaggcccgccgtcggctctcgctcgaccccaagaaacgcggaacctgaagggcaaaactgcccacctccctgcaccctggcactacgaaaaaggagtttctgagacttgctgccggcctccctcctgccgaggaggcgtgtaaggggtcccgggccgcggggagcagaggcggcggggaaccccggcggttggcggggcaccacgggaggggcccccggcgatgtccaaactcttgggaacccagcgagtggcctcgctccgcgccggcggccgagcctggccttcccacacagagaaggaccgagggggagaagggtcgccccaggtggcagccccgggcgccgcggacagcgcccctcagcccgatactcaccatgcgcgggggccgcgcagcacagccagagcgccagcagcgcccacagcagagcggggcgcagggcgggcatcttctcggtcgcctcctcctccgccgccgccgccgccgcctgggcagatccacatggggagggggtcccgatagaggagccccactctctcctcccctcctcctgcttcaaaggctcaggccctggcgctacgctccgaagcccaggcgcaaatgcctcgactccccgcgccccgagtccgccgctcctcggccgccgcctcagccgccgcccgaagtttggctgaaactttctcgggtgtgcaacgaagcagcctcgtgtgtccttccgcctcagccgcctcctcccaccgcaagccccgccccactgtcgccgcggcctcggccccgccgccttgggcacccaggggtttcccgcaggaagaagcgccggcccgagctccgcgcggagggatctactacgagtcactggccccgtccgcatccttctccagcggccccgggggccgccgcgccttaactcgatcagggctgcagcggctcgctggcttgaccagtgcagaaggggcgtgggggtgaggggggtggggtaggactctgaacttcaagcactggagtttgccgggatcgtgaacttgcagggagaggcggtcctcatccagtgaggtctgtatcgccacctacacccacacatccacacactgctttgctagctagaggaatgctctggagtaggaccagtgctgtcaaagaaggaaagtgggccaaggcgccaaagtccattaaaaaggaatagagccatcacggagtggtgctgccccattcattcattcatttgttcatccgtgtagcgaatatttcttaagtgccttactttgcgtagctgtgtgcttggcagtgggatgataccaaagatgcacaagcaactttgagtaccaagactttgccgctgtgggctgggggattcagggaaggctttcccagaggagctgggatgaaagcaggatcttgaaaggtcagtaaaatttgtataagacaaggagaccagctaagctaaggatattcgttgtaacactgtaatagcaaaaccttgaaaacaacataaatgcccacccttagaggaatggatgaataatgtatggtatatttataaaatgaaatgcaacacagtaattgaaaagactatagctatttatgtcaatagggataaatcttaaaaactaaatgatagtgaaaaaactaatcacagagggagacaaagtataccatttatgtatatttttttcaagacaatactacacattatctgtggatgcatatatatagatatagatattaagagactataaccagaatagtagttacttccagggcaggagagtagggggtgtgatcaaacctgggtacaagtgggcttctaagaaaagagctaaaagtaagaacagcaacaatagttgtatggacatatcattccaggaaagagccctcgtgaaagcaaaggtacagtcaaaagagtaagtaaatgagttctgtctctgttagcagtgagaggagtcaaggacggaaagggggttgggaccaaattatgcagccttgaatggcaagctgaaagggtggggaggcagctacctcttaggtcacataaaactattgaaagtttttgaacagagttgagattgatggaaaggaagattgctctgataattctgtagaaaattgattgttgggggagcaagaggtgaactggagccccaggaccagtcaagagttggtgaacagtccaggcacaaatttaagaagacctgaactaataaggtagatttcagaaggaatgaatccgagacaatgttaaagaaacagaaaaaaaaaatggaggtgtgactaattggatgtgggagtttacaatcctgttgggatgggaaatcctacccatagaacctctccctgactcctataggataaaattcaaacttctaaacatggtacatacaaggccttttcgtcattgggccccatctcctgtcctccctgcccctgttgtgaacttcacacaataacagtattgactaacttgagattcccccaaacatatcttgctgtttctgtccctgtatcttttgttcctttggcttggaatgactcctgtagtccccttccctcctcctcttaatgaacttctaatcataattcatccttcagtccaaagaaggctttgccgacaccgcaataaattcctccccctaacagacagtccctccactgtcttccactgccgcttctttatcttaacaccgatacttatttttcacacaggactctttgtatttctgtgttctcaactaagttttgaggtcctcat

SEQ ID NO: 1422 - DNA, 4001 bp, Homo sapiens
ctctatcctaaagctacacttaaagctttcactcaaagaaaaaggaaaagcaaaaacaccatcatatatgctctttattaaatgcttcagaaacaacagctctgcttcatcactacaaagcctcctggtccacttctgaaattcttagtgacctagacgtgtacgaaatttgaactttccaagaagtatctagttggtgctgaacaacccagtactattttcgggtgataaataaccttgttctctttttaaacatctgcgattgacatgtcgactgactgttaacaatgaacaaagaccatatttttctgaagctcatcatcttcctaaccttttctttgaaaacagatgtagttcatgtactagttttttggtgaaggtaaaaatctttattcagattaggctcagaaaaagaaggggctgctttccgttcaacaaatatgcacaagacaccatcccactgggagcatcaatctcagaagcagtaaaacacagcctcggccctcaaaggactttctgaacacctttggagtgtcatccgtttaatatacattattttaattaatcctattagctggataatttcattcccattttattggtgagttcatatagcagagctggatttgaatccaggattacagagcagggctccaaagcccaagttatttccactaaagggtctgaagaaatgtagaatctaaaagtgtgggtgggatggggaagatatgatttgattccctttccttggtccaaccgtgttagaaacatccaaccacaaagaagctttctaaggaagccctttgaattgacgtatccactttttctcacccgcccgtgccccacccccagccatgccaaaggagcagcaaatgctgctgccaggttggaggaattggtgatcgtcacaccacattcctgggtctggacacagcctgaaacagcagcagagctccgcgcctcagaaagaataacagcagttgagatttttaaatcatgtgcctcagcatgcagccacaccagttgccctacttctcctgcctccacctttcaaagacgcgagcagcacacccggctcctccggactttcggtggggttggagtgtcaaaactcaggcgcgccgcaaaaccccgtccccatccaaaccaagcccacacacccggcccatgtgccgccccctggcaaaggcgaggctggctgcgaaggtgcaggccgtttggcttggcggccctgcccccgctctccacgccagaatctggcattccttcgctcagcccctccgaggcccgccgtcggctctcgctcgaccccaggaaacgcggaacctgaagggcaaaactgcccacctccctgcaccctggcactacgaaaaaggagtttctgagacttgctgccggcctccctcctgccgaggaggcgtgtgaggggtcccgggccgcggggagcagaggcggcggggaaccccggcggttggcggggaaccccggcggttggcggggcaccacgggaggggcccccggcgatgtccaaactctcgggaacccagcgagtggcctcgctccgcgccggcggccgagcctggccttcccacacagagaaggaccgagggggagaagggtcgccccaggtggcagccccgggcgccgcggacagcgcccctcagcccgatactcaccatgcgcgggggtcgcgcagcacagccagagcgccagcagcgcccacagcagagcggggcgcagggcgggtatcttctcggtcgcctcctccgccgccgccgccgcggccgcctgggcagatccacatggggagggggtcccgatagaggagccccactctctcctcccctcctcctgcttcaaaggctcaggccctggcgctacgctccgaagcccagcgcaaatgcctcgactccccgcgccccgagtccgccgctcctcggccgccgcctcagccgccgcccgaagtttggctgaaactttctcgggtgtgcagcgaagcagcctcgtgtgtccttccgcctcagccgcctcctcccaccgcaagccccgccccactgtcgccgcggcctcggccccgccgccttgggcacccaggggtttcccgcaggaagaagcgccggcccgagctccgcgcggagggatctactacgagtcactggccccgtccgcatccttctccagcggccccgggggccgccgcgccttaactcgatcagggctgcagcggctcgctggcttgaccagtgcagaaggggcgtggaggtgagcggggtggggtaggactctgaacttcaagcactggagtttgccgggatcgtgaacttgcagggagaggcggtcctcatccagtgaggtctgtatcgccacctacacccacacatccacacactgctttgctagctagaggaatgctctggagtaggaccagtgctgtcaaagaaggaaagtgggccaaggcgccaaagtccattaaaaaggaatagagccatcacggagtggtgctgccccattcattcattcatttgttcatccgtgtagcgaatatttcttaagtgccttactttgcgtagctgtgtgcttggcagtgggatgataccaaagatgcacaagcaactttgagtaccaagactttgccgctgtgggctgggggattcagggaaggctttcccagaggagctgggatgaaagcaggatcttgaaaggtcagtaaaatttgtataagacaaggagaccagctaagctaaggatattcgttgtaacactgtaatagcaaaaccttgaaaacaacataaatgcccacccttagaggaatggatgaataatgtatggtatatttataaaatgaaatgcaacacagtaattgaaaagactatagctatttatgtcaatagggataaatcttaaaaactaaatgacagtgaaaataatcgcagagggagacaaagtataccatttatgtatatttttttcaagacaatactacacattatctgtggatgcatatatatagatatagatattaagagactataaccagaatagtagttacttccagggcaggagagtagggggtgtgatcaaacctgggtacaagtgggcttctaagaaaagagctaaaagtaagaacaacaacaatagttgtatggacatatcattccgggaaagagccctcgtgaaagcaaaggtacagtcagaagagtaagtaaatgagttctgtctctgttagcagtgagaggagtcaaggacggaaagggggttgggaccaaattatgcagccttgaatggcaagctgaaagggtggggaggcagctacctcttaggtcacataaaactattgaaagtttttgaacagagttgagattgatggaaaggaagattgctctgataattctgtagaaaattgattgttgggagcaagaggtgaactggagccccaggaccagtcaagagttggtgaacagtccaggcacaaatttaagaagacctgaactaataaggtagatttcagaaggaatgaatctgagacaatgttaaagaaacagaaaaaaaaaatggaggtgtgactaattggatgtgggagtttacaatcctgttgggatgagaaatcctacccatagaacctctccctgactcctataggataaaattcaaacttctaaacatggtacatacaaggccttttcgtcattgggccccatctcctgtcctccctgcccctgttgtgaacttcacacaataacagtattacttgagattcccccaaacatatcttgctgtttctgtccctgtatcttttgttcctttggcttggaatgactcctgtagtccccttccctcctcctcttaatgaacttctaatcataattcatccttcagtccaaagaaggctttgccgacaccacaataaattcctccctctaacagacagtccctccactgtcttccactgccgcttctttatcttaacaccgatacttatttttcacacaggactctttgta

SEQ ID NO: 1423 - DNA, 4001 bp, Homo sapiens
acacccacttttaatgagcccctgatgcaagacaggaactcacattctatggttactattccaacaactctgccaaatgagaatcatcattatcgccatcttacagatgagaacactgagactcagaaaggataaacagccaatccaaggtcacacagctagctattataactagctattataatagtattatagatataatactgtaagctattataactacctcccactacctcaatcaaggaggccaggagaggccaagggagaagagaggcccagagggaaaaagtaagagcaccaaaggaacccagggctaatgctgtctcctctttaacttcaggacagattcgcagcctccccacctgtttccaacctccaaaatgagagctgtgaaatctccttgagatctctgcttctgctgatctattcagcaactatttcccgagcacttgtgttccagtgcataagaaggctgtcaaatgtgctgtcttcaagcatctagaaagccagtgggggagaaagacaagaaagtgactgtgagcagcaacaggcccccgggagggtgcagaggtgagcagggctgaaggaagatgcagggggtgggaggcgctgtcagggtccgggaagcctccttcccggaatggaaaatgtgtaatgcctgagacccagatgccttggggagcttttggggaagcagaggtctgattaagcactgcctggaattccctcattcatgagcattctttcagcacctaccctgcgcccgggagaaacggtcttgaacacagcagacaagctcgctacccccatagaatgtaaagaaacggggcacaaattagcatacaaaaagacacaagtgtgacctacggaaactgcacagaggaggtgcaacgaacggagccctgggttaggaccgggaggcgctgcccaccatcaacagaaatactcctccttttgccaactacacacgcgagaggctggatttccttcacagacgtccaccaaagccacacatcgcgacacacggaggcagaaagcagcggtctcctaagaagttagacacgaggaatctcgggcagcgaggtgcctgcaagcccgggggcgggcgggagcagcctgcacgcgtggggaagggcacgcgggagcgggtggcgccttccgggccgggtcggccgggaggttccaaggcaggaaaggggcgcagaaggccgggacggcgccgggtacaaagcctcgcagggacgcccgaaggccgcagagccaccgcggggaactgacagccggagccggagctggagccggggggcggggaggaggggcggaggggcgcggccaggcggggtccgcggactccggcctgggaaggatgcgcgcggactagggcgcggggagccaaggcccagaacatcggtaccgcgctcccttcagccgaggggctgcagagaggccagggggcagggggcagggggcagggggcagggggcaaagggcaagggcagaaaggaacccacgtagccaaacggcacccagcggccccgaccccaagtgtcccgacgaggggggacgcctgcgactaacgcggggacagcccccgccgcgcgccaccgccgcaccccaggcaccgggcccccacgcagggacggcgtggaccaccctacccccgaaccccgaggctctggccaacactgaggccccctgtgcctcgaggccgcgtccaacctcccccgcggcgccggcccacatggttccgcccgccgcgggccgcgttacctaggagaccgacccgccgcggccgcgccggaggccacggagcccacgcttttcagagagtctccactcgacggacccagaggcccggcggccggtgctcaacggagccacaagcctgaggaccgaggactggccgaggggcgcgccccgtccgctgccacccgcgggaggagcctcggaaggcggcgcaccgcgccgcacactcagtccaagaacccgcctcgcgtcactgtcgccgtcagggccgcggagccaatcagagcccaagtcgagggctgcgctttgcgagcgccagccaatcggtgcggcggcgggcccatcctgatttgcatgtccgacgacccctcaaccaatggtaatgtgactggcgtgaacaatagccaatcagaagctggaagaggcgtggccccgggcgtcccacgaggtgaagatgctgctggcggaacctgcaggagctagcgggattcgggggcgctaaagtcgcaggggcagggcgggaaggaagatccggcgcggggcacaggatccggagctggagcccccaggtgagtaccggggagaccccggcggggcgcgctttccaccaagctgctccgggacggcggcggcgggtatccgcgaggcccgcgctgcggcaggcgccgcggtcccgtctccatctcttcttccccggccctgcgtccctgcctccgccgctgtctcacctcctctccagcctcctcacctccttctccatcgtctcccttcccccatccctttctgtctttccttccctgtcctcccgcccgcccgacccttcagctcgcatccctgacccctgcccctgccgccgtccctcttcccggtgcacctcttccccatctctgcccgctccggtcctagcagcctcgccctcccctttcctccatcctcctctcatcccctctcccggcctctgcgcagccccaccggggcgctgctgttcccggtcctccccatctctcctcctgatcgcttctcaaggctcatccgtcgttctcgctgcctgtccctgtgtcgctccggtccctttccccaccctcccattctgcccccagcccctccgacctctccccgcgggcacgctctcaccaccttaccctgctccccaagactgtgaccctgcttcctgcaccagttcctcgggctgtttacagcacacacaccgccacttctgaccctgagcccctactcctatcttaagcttctccctcctgccaggccttggcacaaagcacttccgcacctccctacctgctgctgctcccaggatgcaaagaccccactgctgcaccgcgtcctgcggcattagcagcagccggggtacctgcccaccttcccaccccgccaaccagccgcatcctggtgtccctcctcctggcatttgtcctgggggctcttacagggactgtgctttgcccgcagcatcccggggtgctccaggtggaaagccccttagcacctttcctccctggccaccgtctccttccctccccacccccactttcctgctcagcctcactttgtgattcagcatttttggggttggtaactttcttgcttcctgtcgtgatagggacctggctacggagctgaaggcaggggtcttgaccctgcggttagcagggccaccttaggaaccagacctgagctgcctggttgggagggggctgaggagctggggaccgccactgggggttgtcttttcctccctttcatttgtctgccctgtgttgaactgtgtccaaggggagatgacataagtaatagctcttggggaagtgggctattagcatttatggaaattaatacatccacatccgaggagcaagaacaccaagttcaggccacagctgtcccactgtctgtcgtttcaggattttttctttctctgcaacttctcctccccgacaaaaaccccagcctcacccctcccctttcccccagtgccaagagtaagctcctgctctgctaaggaagccgcattcaggccccgcgttgcaggttgcagggtttggggacctacgtgtggagagtcacatctgcccacctgattctcgcctggcggccgtgtctgctgcagagccctgtgcagctcctggccctgtgctctcgcagtgtggggccctaagagtgcacttggtcctccaggtcctgtcattgtctccacggccacactcggcctcagtggcactgacagtgttcgggccgca

SEQ ID NO: 1424 - DNA, 4001 bp, Homo sapiens
aacattttggtgaggtgaagcgccttttcatttctcccgtcttaagtagcctgcctttgggagtgtggtgctaggtgaaaaagaggaggggatgttactctctgttccccgtgagcttcagaaacctcccacacaagggctcagcaaaggtcacttcatccttagtgggactgctcgcccattgcttgaggtctcctgcttttgttactctgtagctgtagggactgaggcccaaaaaggtgcccaaggccacagctataggaccatgaccagaaatgaggggcagcagcaagcaagggtgagcatttcaatcagactgtcttactctgggattttggcttctctacttcccagctacacgacttgggcatgttacttaatttctcagagcatgtttcctcatctgtgataagaggatggtgagagattaaataactcagtaaaacacccagtgtgtgcctggcatatagtaggggtttcataaatggtggcttccttacttgtctaccctaccagtgtgatctgctgcctcacagttacaagccctctaacctcagcattgaacccagcaaccatttactgaacagaggtttctgactgatgaaagggtatcatcaactgggcaaaacagtattaacgtgacccatttaaattataccccaactgcagaaatcttccttaaatggtagctttcagtgatccagcatgtactgctttgctggtaactaggaaatgttaaaacttcagagccagcaggaagcaatataacacactattccttatttaatttcttttaacacctgtcatcccactaaagtggtaatcatttttttcttccactcattataaaaaagactggaggtagacaaaattttcccaagagttgtttctcctgcagaagcaaaagagacacctttctttgcattccctcctttgatctaattttcctctctcttagcttgcagctggaattgagtaagtttttgttccagactttgtgcaaagtgctttggatgccttttctcattgtatccttaccactaccctctgaggcaggtactgttataggagagatggttaaggtccttcctatgatcacatggctagcaagtggttgagctgtgatttaaactcaggtgtggctcttcctcacttggctctgctgcgactgcttttcagaaagaatgatcatcttcccagaagtttaaaatgcttttaggtaagaccgaggggtggggacgctggaagaagaataagcctacagcctacagccaccagctcgtgcatgtctttacttaaattaggtgcccgtatgcccctccatggccacaaaaaccaagtccatggctcctttgccaagttgcttcgtccccaacctgtaccacactcgctccccagtcccatccaaggctggccccgagaccagtatatagtgatatttgtatttcttctgatgttctttgctcaccatagcaggttgctgggttcctaacttacgcccttccgttcctgggaacctgagcatccagcaatctgctctggcttcagtgggtctcgtggggatgaccctttccaccttatctgacgccccttagttaccacctggaaaagtagcagatagtggtgctgaatccgtaccttcctcgggccgctcgctctccaacagcgccaccacctcggtgccctcctcgccggagcctcggacctcatccacgtccaccaccgtggcggcgggcgctcggggctcccccggggtccccgcccgtccggagcccgacggctcgggcccagcctcctggcgcccgcggcctccgccgctcctctcggcctttgccctcttgttctccttgtgcggagtcctgccgcctcgcccgcgggactccctggaggagctccgcgccctcctctccatcctcagagctgccgggcggctggagcagcagcgcgggagcgctaggggcacgggagcgcagtccctgtggagtcgctgcgggtccgcgtggcgtgcccgggggaccctaaagaccgtcgggtgggggctgagggcgaggggcgggacaccggggccgcgggcggggcgcacccggaaccccgacagctgtgtcttggtggagctgtggactgcgcccgccgactcccacggccggggcggcgctgaagcagagagaggcctgggtgggagagccggccccgggcagggtgcgggcgttgaaaagtgcgtgtctgcaggtgccaacccgggctgtgaagactcatctcctggagggttcctaatgtcatgctagagggctgacggagatacagaagctcatcgcaagctctggtttctcttcaaaacgaatacatcttttaccttttactgcagattttcgtggagaggaacagttgttagtaaccttttttgtctgtttgtttttaggtcctgcttgggcagggccaagtaaaaaagaaaaaagaaaaaagaaaaaaaccacaaaaggtcatcgaattagggtcactttaaggtaaaatcagaaatttcgcctcatccccaactttccttcttggagtcgtctcaaggatgcctttctctcctccctacgtatttcttattttatatcctggccctagttattctacatatgcattaacccctaatgatgttggctgattcctcctgggagtatttacattttaaaggggataaaagaaaactctctttgcgatgtgtttcgtctctgttattatttagggtctttattaatgcttatgcctgatgttgatgatgcaatgcttcttgaagaatcataggcaggaaggggtctggtctaacttctgtttttaggaagagacactttgtcccgtgcttccatgatgaaagcaggagttgggctttttcagggttcattggccaggctggatctagcaacgatctggggagctgcctcaccctcttctgagggacttgaaacattgaataggtttatttctctttcactttctgttaataatttgtttcttactgaaagggaggttggtcaaggtaacccatcacccaagatttatgatactactcagatagttcagatcacatgatggcagaaataatgctcactgattttttaaattttttaaatatttattgaattcacacagcaatagctttttttctctcccaaaaccttattaaacactgaggacctgaagtaactgaagtgcgtctggaaaaaccattccactactttcttctatatgttccaggttaggccactgggagtaaagtaaataaaagatgagcaatccagtcacttaaatagattttttactgtctaaacctgatcattgcatgggctaaggaggataaatatttcctcgcaagggcctgcctcagttgatagtttctgcctacaacactacagtgagaaaaattccaaagctgcgtttggctcaaagagagaaagatatcatgattatttcatattcccccaaattaacatttgctattaaacacagctagcatctttatcatcctttagagatttccctgttagaaaaagtgacaaactatttgtagcatttattggtgtttttcctcagcctggtcctgttataaattaatttcatccgcatccctagctagactcttatactaaaattgcacctgtttttcattccaagaatggagcaggatatctggtcaaatgatattccccaaactgtactgtctttcaataagagagaaattccttgtaggagaaaaatcaatgagaaaaggccctactgggtgttggagcccatgctgagcacttgttctcagtcacctttgctcagtttccttggcttctttgaccactgacaagttacatttctatatctatacataacagcaatataagcagctgcttataacacaagtctgctgggattatgagtgacaatgacaaaatcagagaagctgcataccattccatgataaaaaggtcaatgcagcatggctggaaggtggaggagttggggaaggg

SEQ ID NO: 1425 - DNA, 4001 bp, Homo sapiens
agaaccagctccctggggtctgggtctctattgaaatcttcgtgcctgcactatacttgcccagctgaacaaactgtttgctgttcctcctatctacctttcactgtctgtctgcttgcctttgttcctgtggttctctcacttcaatctcttcggtctgatcaacttttaaagctcactttatccattccagcaggtatagcttaaaaacaaaaacaaacaaaaaccaaaaaacctctcattttaaaaaccaggggatttcctgataccccagccgaaaataatttcttaaacctcagaattcccccaaacagtggcttttcattaaaaaccttacatcagagttattaagcagggtggttttggctcctctcctagactgtctgccatctgggggcaatggcagcttggaaaatttctttgcacagataactacactacgtaaaagtttgctgcctttgcaaactttgaaacgcctacaggaagaaatgggataaaaacgactttggccgggcgcggtggctcaagcctgtaatcccagcactttgggaggccgaggtgggcggatcacctgaggtcaggagttcgagaccagcctggccaacatggccaaaccccgtctctactaaaaatacaaaattagccgggcgtggtggcgggagcctgtagtcccagctactcgggaggctgaggcaggagaatggcgtgaacctgggaggtggagcttgcagtgagccgagatagcgccactgcagtccggcctgggcgacaagagcgagactccgtctcaaaaacaacaacaacaacaacaacaacaacaacaacaacaacaacaaaagactttaacagagaatgatcagtatttttaagattcaagtttttaataaacttgggaatgttatgctttgaagcataacagataattatcattatttttaagattcaagttttagataaacttgggaatgttatgctttgaagttttcagagctcgtagctaaagcgaatagctcaaatgttctccagcctaaggcttaatgtgaatttagattattactgaaacattgggagggggtattactcttgaaatcttatacctccatccacagataagaacactcagtgcaaagaattaaagctgcctaagtcaaattcttttttaaatggcaaagttgtttttttaagagacagaaagtgagggcagaatgtacctctgggcagagaatatcttgagggacaggtactcggagaagaggagatacaaatagggatttttaaaaaagcagaaaaccaccaatttctcctcaagtgaaggggggatgtatcaggtttaactttaagctctcttctgctcaattgctaactctattttgaggaaaggacctttggagacccggcagatatgctgtctgcaaacaatccgggggagtaagttcttctgcccccgtctgtccctacacttttcgcattcacaccttccccagatccgtttcccagcgtatctgccttccctctttcctccgggtccgtcaacgtctcacccacccgcgagtcaggccccagcgcccctccgcccgaacgcccaggtcgtcgggccgtctgcgtccgtctgtcctagcccgtgccgtcgcgggccgcgctcacccaggcctccgctcttgtccgtgcagccgctccgcccggcagccgccgccgcgctttatatccgcggccgcccggctcgggcccacgtgccgccacgccagggagcctgggggttgtagttctgcgccgccgcccgcgaggcgcgcccggaaccgctggcccggaaaccccgaaacgttttgcacactggagtctgctcttccccgggtgtcacctgaacaacatgggctgaagtgactccggcgcagcgccccggctccccgaggatcggaagcatccgaactggcggccgggtgcccgagagcacgcggctcacccgcgccacgccgagtgcaaacctccccctgcctcgtctgcacgccagtccttcccgcgtgcgggcacctcctgggctccgctgcgtcttaattttccttctcttgcgcagggctctgcaatccccactatctcgtggttctgcgttgtgaggtttgggctgctgtttccgaggcgtacggagaatcccaactgcccatcggcgttcaggtctcttcgggttgacgccgctgcaccagccctgcagactctcgtgttaaagagagatgagcgaattttaaagtgaattatctactcatacgggagctttcctggcttcttttggagaacatttgaaagagttttgaaagggaaaattatttttaacccaaccgcctctactttcaggagtatcaggagtcttattctaggatcatgtactgtgtgaataaatcaggaacagagccagagacaagtcctcagttttctcttgctgatgtgattccacctcaattttccataaaaggcgatggctgatgcttattattacatttagagaaactaaattgttcaaagggctttctagtttgcaaagtgcttttaaatgtattctaatagttctttcgttgcacagagcaccagagataatagctaataagtactgtgttcagtgcttactcagcctgcaccgttctagctgttttaacatttaattcataaaataatcccattggtgggtcctgttttataaatgtatatattacagatgagcaaggatcattccattttacagatcagaaacaggtttaaagagttgaagtaatttgccaaaagccatagagctggttaagctgtggtttgatttcaagtagtccagaagcttgtgcttttaacactatgttatcctacaggaaaaaaaaatacaaaaagaaaagaaaaagaaaaacccttagttacatgaagcaagttctcctaaggctgcagcatggtttttgttttggtttggtttttgtaatattaacaagaatattatatcctaatggtacaatgaaagttttttttttttttggaaagtcacagtttaataagtgcaaaattaagtatgtcagtacccaaaaggtataggtcattaggcttaacattgtcaaccaacaaaccaatattctaaatgcatgaactaactactttttgtataaatatggtagtgcaaagtaattccttataataatttgttagtgtctaccaagaagcagatgctaagatgggattagatgtgcaagaaacttactgggggagggatttggagcagacaggagcagcctgcagactgatgtagggctgacatctgtggaacaaaagatggaagaaaggagcatggagtagggagagtctcactgcattcttacagtatccactctgtgccgttatgaaactcagagcctatactgtgaagtgttggggagacgttgttttaaaatatggtaaatgcagtgatagactgtacagagatattacaggaacactgagctctaatctgggctgaagggggtggtgtgtgtgtgtgtgtgtgtgtgtgtgtgtgtgaagaggcaggagggtgttccagaaacgtcttactggggaaggtcacagccaagctaaatatcagacaatgagtagggcttagaagaagagaggcaacaaaaggctcagtgctgaactgcaggcctctaacccccttctgataagcggcagtctctgtgagatttcttctattattatgtagtattatttaatcattaattttcttgcttttgtttcttgcccccaactccactgcaaggtgttcaaggcaggcatcatgtcctattcctttgtttttcccacagtgcaggacatagtgtctatccaagtgcaggccaagagggtgagatttagaaatattactaccatcaactcttctttgtttaaaacaaatgtatgtcagggttttgtatcagattttgtttgctacaattcaaatttgaaacccactggtgcaggggaaagagcttgggagatatggtgcaatgaacttggtcaga

SEQ ID NO: 1426 - DNA, 4001 bp, Homo sapiens
aatttaatgcatggggtgggagaggcgaggaagtcaccatcaaaccactttatctacagttagcataagatgtgagaagtgttgacaggaagctgcagcttagatgggatgatcacaactccatggcaacaagatgacacaaatgcagcagagaccccaggggacaggagcctcttgcagtctgtccctaggcccagccctgcttgtcctccctggctgttatcttcagtactgcaaagagaacacagacatatctggcttggtgacctggctgtcctggaaaagtcagcttcatgtatgagtgtgcccatcctctgaacttgattactgaccacctgcttcccaccggcccccaccccagcctgatgaccctctgagcttcatgaattgataagcaagttactcatcagagtaaatttcacttaagcccttcaggatcttgcaattctggggaggaatatgaactgctaatcagccatgcaaagataacttggctctatgaatattttaatttcccagtgctagtggcagttgctttttttttttttttttttgagacggagtcttgctctgtcgcccaggctggagtgcagtggtgccatctctgctcactgcaagctccgcctcccgggttcacgccattctcctgcctcagcctccggagtagctaggacttacaggcgcctgccaccacgcctggctaattttttgtatttttagtagagacggggtttcaccgtgttagccaggatggtctccatctcctgacctcgtgatccacccgccttggcctcccaaagcgctgggattacaggcgtgagccaccgtgcctggccttttttttttttttttgagacagtctcgctctatcacctaggctggactgcagtggcgtgatctctgctcactgcaacctctgcctcctgggttcaagtgattctcctgcctcagcctcccaagtagctgagagtacaggtgcccgccaccacacccagctaatttttgtatttttagtagagctggggtttcaccatgttggccaggatagtcttgatctcttgacctcatgatccgcctgcctcggcctcccaaagtgctgggattacaggcgtgagccactgtgcccagccccccccccttttttttttaagcattttctcagcagactagctaaggacaatagatggcatgtcctgacacccatggggcactctgggtgttggggcagaaacttgagagggaatgagcttctgcattggtccctttcctgctgaaggtgtctcccagtagtgtccatcccatcccatttccatccccagttcctcttacccggaagctgttacagcccagtccgctctgggctccaatcctgtccatcctgcccccgaagcagctggatctccgcaggctccgaggggcagtgagcagcgccctcagcttgctttttaggagggcagatcgatcagaggagtcccaggggccccgcccgagggcacctccatctctctgggctgggctgacttccccggtccagggaggcacctcagggagggggctgagagcagcccccgcttcttcattcggctcactgagcacttgtgggggcacgacctcatcttctaaaggcatcttttcttccaaatggtccagcaaattctttagaaaaggaaaatacagggaaagggataaacctcactgacttggaggaaatcaagaggagtgagcacagcatcagaaagccccctggccccagactgcacccgctttcctggccctaccttgaaatccatcaggtctgcgttggacacggcattgtacatgggattagctctggtctgacctaggagctggaatgccagtaaaaggaggaagctcacggtggtggtggagaaggagctcatgctggcgtcgtcaaggagcaatccactgcttgctgctctgtctctcccctctggttcctctctggttcccctctcttggcctacgtctgtccctgtctcccagctgcccagtgccgcctctttttatagccccccagctctccaagcacgcaggagagacagaaccctccccattctgtcacttgcagtgataaagctgccaagtgagaagccagcaggagatgcccttttaaagttatcatcccgcagggcttgtcacagcccctctctgccttgggcagccccaacagccccccagaccctcagctgcaagagccgcattcttactgatttgactcaagaggctcccacttcaaaggtgtgagaagagtaaaaaagagtccttggttatctcaccgccgtgcctcaggattctttctcctcgacgctggtacccgtgcggggaaacagagggtgacgcttggctggtgcccagctcccctggtttgtttgtggctcagctgtcagggcctccaaataagggtggagaggaggaaatggcaggcagccagcagcccgagacaaatggatccagatgctcaagctggcctcacacctgcctcatccgccacgtgggcagacctctggcctcagacagggctgccttcacccctggcagtccctctccatggtcaggcgaaaggaagttattttttagtatataaagtcagctgagaaccaaatgtgatgaagctcccaggaatccaacccccaaatagaaatagcaagaaaaggcgggggagcacaagcatcctctctccaaagctcctcctcttccatgtcccccgcgaccctcctccagcatgctgcggggacaggcttagaggacgcagccaatttcatttcttccgttgctgtttatagatgctcagactcttcgtgtctgaagtttgttaacatccccctgcccttcctgggcttgtgcccgtggcaacttgaccgatggaggaagggaggtgggggtgaaggaggtatagtcagtttccctcaatgccttctacatccttccctgaggacgtggcaagtggcaagtgaccgagccaccaaggtcacaatttccctggcccccaaaagggaaataacaggcagcaagtctgtctatgtttaatgaatggcctgtttgctaagcactgaactcagtgttagccattaccattcaatgcaacgtatactgggggaaaactctaaatttgaagggctgagagaccagtactgtagcccaaaacaaaccagttgcatacctcttcgcagccttactttccttgtgtgtaaaatgagaaagaatgttaaaaaccggccgggtgcagtggctcacacgtataatcccagcactttgggaggctaaggtgggtggatcacctgaggccaggagtttgagaccagccctaccaacatggcaaaactctgtctctactaaaaatataaaaattagctgggtgtggtggcatgtgcctgtaatccccgctactagggaggctgaggtaaaagaattgcttgaccttgggaggcggaggttgtagtgaaccaagatcgcaccactgcactctagcctgggcaacagagtgggactcggtctcaaaaaataaataaataaatgaatgaataaagtagaaatcttccctgcctaccttgcaggattgttgtggagcccaagtgagctgagaacgtgtcaacacataacaagtgtgcagtgctgagtccctgcaagatggccatcatagttgtctttattggttgcttgtagcatgcctagcactgtgctgagaactttatggaaatgattttattttgatcaccatccccaggtggtagatagcattgtccttgcttacaagggaacagaactgagcccgagaggctatgccacttgcccaaggccactaggtgcctaagtggcggaaccaggactggatccccaggtctgacgctgatgtctgtatcctagcctatttcacgtagagagctgccaccttacctcttagctgcattccccaattaaacccccattccccatctttcagatgccccaagggagctccttcaccttccccatgcccctgg

SEQ ID NO: 1427 - DNA, 4001 bp, Homo sapiens
gctgattgccagacccctctcactttgtgggttggagttttgaaggctcctttgcaggatgaccccaggaattggagtttcaaagctgatatttggggcaggatggagggctcaccccggtatgggaatgtagatgagccacacccacacacactgcccccagtcgttgacattttagctgagacctgaaagcaataatccccagggagagtgctttaatggtggaattccaggcagagcaaggacgagtggagaaaacggctggatacgtgccctcaggttgcacacgtatcctgccctgctttgaaaagcagtttctcccaagtgcctcaagtgcttgagatattcaataacatttcagagcattaaaaactctgaaagaaaagaaagcctgctacctctgaggccacatcctcatcccaccatgaagatgccttgagatcacagggctttgtggttttagttgggttggtttctttgaaatgagggattatttttaatgcgccaagacaaatcagtttcaaaagataaagcttataatgttgactttatttcaccgtggaaattttgtgctcaaaggtaagaaaccatcttatataaaacaatcaaataaatacataaatacattaaaaaaatgagtcacttcaaaggcggccacagggttgaggaaaaagccccttgtggaatcagaagcaggtgtctgcagccaggacttcctcttaatgccgcctcagcactgtcagggaaagagagagggtgatgatggttagggtgggagatggaggcaggggctgagcttacctcatcgtgtgccacccaccaccctgttagtcatcagacgtttgaggcttaatgcaactctctgagcctcagtttcctcatctgtaaattggggattatcattgctctggtgatcctgctctctgcctttgagactatagacagtttagaggaaaccaggaggaaatgtttggttctctttctgcaccactggggggctgccaaatgataaacagacccccaaaggagattctgcccctttgataagaagtaggaggtggggagaaggtattgtgggcatggtaatgaaataagcccacatttactaattccacaaaggcaccccttggccctgaaggctgttaacaagaggaagcgatgtccaggtgaccttttctcaaagagtgtggttcccagagacaacaaaccccaaagtgactctaacagtgtcacacactggaatgggggaaggcggccggggtggcagggggtgcttacctttgcagcccaggccactggaggagctgatccggtccatcttcctcccaaagcagccagacccttgcaccatcttggggcttcgtggtgcccgcagggtgtagaggaccattttgcggtgcccacggatgccctcggtggctacctcccgggacttccagacacctgtgggacgggggctctcctggaggggctccagggatgtctgctccacctgcagctccgacagtttgccctgcaaatggttgcgctgctcctgcaatgaatgggggcgtccaagcctcagggacccacccctgggctcaccagcccttcatggcacccaagtgaaccgactgccttgggtacagggtcagggcacccagtctctccattttctgattcctttatcactaattccaaaggaaagatgagggcctcttgggacagcaggtgaggaccctttcattgctgctgtccaatccccctgagctgccctccgctctcacctgtaacccggacgtttccaagtccgaggctgaaccggggctgcccagcgggtgggaacgacctcccaggaaagccagatgcaagaagagcaggagcaggagcgcccgggaaggtgctgtctggggatccatgtctctggagggactgcggaggctgctgctgctgcttctgctgctgctgctgctgctgcgatgcgtccgggtttgcttcccacctgccctcagcctgcggggtgctcctcctggctcctcgggacaccgtggccttttatcctggagctgagtgtcgggcctgccctgccatgcagggttatctctgatttatcagccacattccgggcctctgagatcagggcccgggaatgagcccctccgcgcctgcgacgtgggaggtggagaccgggcagagccgaccttgtatagaaatgggccgggtcgggccggggggcaggaacgcgctggagacacagacaagtccccgtctcccgcttcttcctttcctgcaaatgtccaggtgtcctaggttggcgctttcttcctgcctccccaccccaccgttgctggaaaaggcagggaggaccccggctttccgaggaccgacgtgagcgcggggagcacggggtgactcacagcgaaaacagccccggccaagaccccgccacccgcggcgcctctcccctccccgcgcgagttccctggcccgcacgtagcgcagcacctgctcgccgctgtgcaccctgcctgcctgcgggtcctcgggggcgccctggccgctgtccgtggtgctgatcaccccgagggaacttggagcaaactctcaagagctgctctcttcaacgggattttcaggccagaaagacctgcgtggagcaaggacaagagacctccgagacctttccctatgctctcacaatccgccatcttatagtccttacagcaacgggatgctgattccccagtggcaattcattaaaagcctgggtatgaccaggaacttctggaatgctgacccttctttcactccttaaagggaagagcagatttcgctggaattttgagagatagggtccagtgatgacgaagtcacccaagaatgccttatatgtgtgtcctccacgtgtcaacacctcctctcccccaccaagccaacacaggatggaaaacaaaaggataggctgggcatggtggttcacgcctgtaatcccagcactttgagaggccgaggcggtcggatcacgaggtcaggagatcgagaccacggtgaaaccccgtctctactaaaattaccaaaaattagctgggcatggtggcaggcgcctgtagtcccagctactcgggaggctgaggaaggagaatcacttgaacccaggaggtggaggttgcagtgagctgagatcacgccactgcactccagcctggttgacagagagcgaaaaaagaaagaaagaaagaaggaaagaaagaaagaaagaaagaaagaaaacaaaaggatggctggaatgatggttatctatttgctgggataccagagatatggggatttcccctctcccagtgcctccttcatctgaccacccatgatctaattatcattagcaggtggcctggtgattagaagtgagactttggagagaaatgcccctgagaagagtcatagcagcttaaatacccccctaaagcatatatgactgatgtcactccccttccagagaattggtgtcaacaagcagcaggctggaggagtggagctgtctatgaggggagaagagttacagcagagaagggcagcaataagaaactgggacctctaagcagatcttgcctaaaaaatagcatctgcccctgaggtgagaaaagcacggttattattcctcacttcagaggaggaaatggtgttcatgaattaatctactttccaaaagtcacacaattgacacatgataaatcctggattctaaccagtctgattagtctagccagcagtctgattccagacctgaagctcataatcactgccagggtgatcacaaggtgtttctacaaaaagcaagcttaggtgaatcccgtgtcatctatgaaggctctgggagctgtgctgtgggggatgtgcaattctagtggtgactgtgtgtgcaggagaaagaatgggaagtggctcagatgagcattttgcagatgaaatataaatggaggtgggtgggtaagggctgtgtaaagacaccagtgctggaaatg

SEQ ID NO: 1428 - DNA, 4001 bp, Homo sapiens
gcgggcactgacatcctgcccatcccctctctcccagggcctgcggggagcagggccctgtccaccttgcaggctttgcccaaagatatccaggtggaagaaaacgtagtcctccccacacaagccagcttccagggccaggagcatgagggttctgaaggcatcaggggagctgcagatgtagataactggagaaagacggagagtcagagagagaagcctaggtactgcgggagagacaggagtaggaaagctggggcacccaagggaggaagtttagagatagggtgcaggagagacccagtgagagttaagtggtaactcccggctcagcctaggccacagcaggagaaagtcgaagggtggaacgggcgggtgcggggcggtgggcgggaggaggaagggggaggcggaagggaggaaggaacgggtagggagagggggatagtggagctgaaggtggagaaggatggggccaggagggagagaggagggagagggagggggagaagagaggggatgaggcgcaatgagaggagaggatgaaagaagggagaaggctatagggaagagagaaaatgtgggagggaaaaagggaccggaaccgagctgtgctagggtgggagggaatgagtgggggtcggggagatgagaggatagagacgtggtgggggtggcggaagaagagagggaaatagaaactcagctgtagaaagggccagggagctgaaagtagaatgaagaacggcgaggagaaagaagagtgcccccagatgagagagaaagtcccgatgcctccggcaggtcagaggggaggccctgcggctaagcggcgggacggggtgtgccagcgtctcacctcggcctttgcgcggcatggtccgcagcagcctggtgtagtggctgaggtcgtcctcggcgaactccaggtggtccaccgtaatattgaggcggtcgcggacccgcatgaacagcccctccacgaggaagaagcagtgctcttcgtcacccggccggtaggcgtagagcatgagcgcttggcgctcccagcccagccgtcggtgcagcgccgccacgaagtcccccagcttggcgtagctgggccccgcgcgggtggtcagcgcatactcgtccttgacaccgaagcccagcgccggggcgccggcggtcagcagcgggacccgccagtgcgcggtgaagcgccccactggggcggcggcgtacacgcagccggggcccaggaacacagcggggttgtgctcccacttgaggtccaccgcggccaggggcgctgcggtgtcggagcagacgcccagcgcgttttcgctgctgcccagcaccgtgcggaccgtccagcccggcagcaagtcggggcgcgccttcacctgggccagggccagctccacggcgggtcccacgcgcgcccacgaccaggggtacgaggtattggccagcggcagtaccacggctaccgtcaggttgcccgcgtggctgccccggagcagcagcagcagcggcggcagcagcaggagcaggagcaggcgcaggcgggagccagcggggcgccggggccccggcatggcctcagcgggcaccgcagcaggcgagcgctcctaccatggcctcctcggtccccttgggctcagcggccggtcccaggcatcaggcgcgtccctatgggaaggagcaggagcgggacggggacgctcaccccggggctcgaggccccctgtagctgcgacggtctgggccgagagcgcaaggggcgcgaccgaggggggcgcgcagggcgccgcggagcaggtgggtgccaggagaacgtcgggctggagaggacccgagtgtgaacaactgggagtgtgcgtgcgtgttagagagagagagagagagagagaaagggtgcgagtgagcgcttcgtgaagaaggatgagagagggcgcgcgagggaggaaagaggagtgtgtgtttgtagcgtgcgtgagcgcctgccccagggagtgtgccagaaggggcgtccggccggcccaagtctccggctatccggagggaaccgtggaggacccgagccaagctccgaaccctccctcccagccgcttcccctcccagactcagtgacagaagagccaatccaggatctttaactccttcctccccgccgcccagcccgcgcgcttccccgtggaccatcttccccggtctcggccgccccacgcctacctctttggaggacaggaccctctgaaggtgcgccctcgccgggatggaaaggacggctgaacggagggtgtgtgtggaagcaaccggggcccacttgcgccccaccttttccctcgcctcctacctggtctcctcgggggaagagggaaaggtgtgctggtttgggatcctggcaggaaactgagtgagtgcgtggatgtgtgtgtttgggtgtggggtggaaggtgacgggtttctggaaagtccgttaaagttgaaggtgagcccagagtgcttgttacccattccttctatgatctccctctctttccctccctgccaccttccagactgtgcagattagctgtgaaaaaatgatctggtgtcagagaggaattaaatctttagcgcccaaattgtaggaagatggggagagtgggtgggtgtctgggagggaggaggttcacacctcagggacgccccaagaaaatgactgttttgtgttgagggttgttaaaatgaaggctgtgggagatgaccactggaggcgtaaattggggagtgggttttggagcacttgacagctgggcccccggtgcagactgctgtggaatcagtgtgccctctaatggtcatcgggggttattgacggcattgcagcgccaacctctccaacgctgcgcctaagcaggacataagatcaccaaacttcaggtcagcaaacatttccagagaaccttcggtgcattaagcacccactaggtgccgagggcataaagatgaatatatatagtccgtgcctttgaggagctccatttgggacaaataaccgtaatgcaacatgcattaagcactacaggggagacatggataaattgctaaaggactcagatgagggctattcattctgcttggattggggccagaaaatctccaaaaaagaaataattcaagaggatggaaggatgagaaaggtattctgtgtagacagagcagaatgttgaagtacatttcctatatatggaattttaggagacttgaatattcttattatctagagcaaattgtggtcgataggccaacttgagatggcaggcatgctttggcttgcattctctttatgtatattgtatttaattccccacacttaaatatcataagatggggccgggcaaggtggctcaagcctctaatcccagcactttgggaggtcagggtgggtggatcatgaggtcaggagttcaagatcagcctggccaagatggtgaaaccccgtctctactaaaaatacaaaaattagccagacatggtggcggccgcctgtaatcccagctacttgggaggctgaggtagagaattgcttgaatccgggagacagaggttgcaacgagccgagattgcgccactgcactccagcctgggcaacagagcaagactccgtctcaaaaaaaaaaaaaaaaaaaagatggtacatgaatatttggatttctgacttttttttttttttccttcaaagatggaggtctccctatgttgcccaggctggtcttgaactcctaggctcaagcgatcctcttgcattggcctcccaaaattcctggataacatgtgtgagccaccaggcccaacctggatttctgactttccttaaaatattggaagagctggcaatatattgtcctgcatccctccatgagcaattaaccagagcaagtatccattatctccttgaaatgagtctagttcattatggttcctaggcaccctgcttcactcaggtgcattacctgcctggctgtagtag

SEQ ID NO: 1429 - DNA, 4001 bp, Homo sapiens
cctggcacatctgtgggcagagagggagaagagggctggtgagcaccctactcccagccaccaaaggacaagactggcccaagatctgggccatcagagacacccctctgcctcctttgctcggcctttgaggtcccactactacctcctcctttagaggaggtaatttatttatcaattttcaatgtattcatccatccatttatgaagaggcagtgtggagtaatggttaagaattaggcttcctgggtatgaatcccagcactgtcacttattagctgggtgaccttgggcaagtcacttaatctctgggcttcagtttctttatctgtaaaacgggaataataatattaataggacctgtctcctaggcttttatgagatttaaatgaactagtatatgtaaaacccttagaatagggcctaacatatggtaagtgtgatatgagtatttgctactattattacaattaattactacgatttatgcgtgccacaagggactcctggggaactctcatctcagatgctctccagattacaaacagcactgtctccatctgccgctctcctggccgaattccataaagactcctttcctgtcctccctacgcccctttcagtcatctcttctatgtgatctttctgaacccacagaggagttttagctctagagcttcaccatgcagccttcctttgaggatgtgactgagacacagctgtgtctgcccaccccacctccccacagccttctgtaaaggtcagagcaaatttctcaggcagagtggcaagggccagtctctggagtgaatagacctgagttgccatcctggtctgtccctacctggctgtgttacctttagctagtcacttagcttctctgtgcctcttctgtgagatggctatttgatgaaaatgaggactggccaagcacggtggctcacgcctgtaatcccagcactttgggaggccaaggtgggtggatcacctgaggggttaggagttcaagaccagcttgatcaacatggtgaaagcccatctctactaaaaagtacaaaaattagccgggagtggtggcggccatctgtaatcccagctactcgggaggctgaggcagagaaaattgcttgaacccaggaggcagaggttgcagtgagccaagatcgcaccactgcactccagactgggtgacagagtgagactctgtctcagaaaaataaaaagaaaatgaggacccaatgagataacagatatcaaacccttagaagctaccttccctggctggcccctgcttcagccttgccccccacccaggagtgtctgggagctcaccggggttgaagaggatggtccctttcaggcaggcatattccttggggctaagctccaggctccagaaggactccagacagcattgaagccactgcaccgcagccagggagggctggggtctgtctggcagttggccactgcctccactgctgctgggctcctccagcagaatcttcttgagtatgctgggcaccggggcctcagccacctcaaaggtcacagcatcttgggccaacccaagcaggaagagggggccccagcaaccctgcagcagccgccgctggtcctggggaggcagctgccagaaggatggcaggttcctgaggaaggccactgtcttggccagaacatccaaggcctcccggcaggtgcgatgaggtgcacatagctggacgggccggtgctgcctacataggcagcggctacggggtcgggggacagccttgaggctggagctcagaagtgcgtagagaatggcggggcggcttgcagctccctggcatgggcaggcccctggttggctggtgctcatggttagggatctgctctcacttccagctctctggctctgtgttctgcgctgtgggtgctatttatattcccagtgagtggaacggggggaatggcccaacaaccttgactccagaagtcatgttcattgaaaaaaacacacagacattgcccctggcaggaatggtggggaagtggtgggggagggggcattgggaaccccacgtggcactgatatcacctcagtcaatgaagtggccggtgcagggcacagggccacctgccgctcactcagctgccccttatcagatgactcaagtggataaacaaggtcattaactcaggctgtaccagggcaccaaggccccaggtgcacaatcagcaggtgtccccattggtgcccgctcttgtgtgcacaaaagactagggcttttgctaagccaggaagccagccccagagctgggtgggccttgaatgcaaggcccaacctggaagtgccttatcactagcttgtttgcctaaccttggggccctgcttctgttgtcagccagaagcaggctacagggaagggagccaggaccctgggggctgggaggactttgcccactgtccaatctaggaggcctcctcctctgattccagttctgggccccctgcaggaataaggtccttcagaatccttatccccagcctgattcctaccactcctgaaaggccaggtctgctgagaagaactcacagaattataataaaagatagttgccagccgggcacggtggctcatgcctgtaatcccagcactttgggaggctgaggaagggggatcatttgaggtcaggagttcaagaccagcctggccaacatggcaaaatcccgtctctactaaaaatacaaaaattagccgggcatggtggcatgtgcctgtagtcccagctactctagaggctaaggcaaaagaatcactcgaaactgggaggcagaggttacagtgagctgagatcatgccactgctctccagcctgggcaacagagcaagatcctgtctcaaaaaaatatatatgtatatgtatatgtatatgtatatgtatatgtatatttatatgtatatgtgtatatatatatacacatacatacatacatatatatatatatatatgtatatatatggttgccattctctaagcacttattatgtgtcaggcacttcccactctaatattggcagcctcttcctaaggctagattcttactttatgagactaaaaaagctaaagtgacttgcccaaggtcatcccaccaggaagacaaagcccagatcttgcctgactccaaagtccttgtttgtttccctggacccactggcccaattgcacagccagagcctgagattctcagagcttgtggctagctgcccccaccttgctgctgcctgctttgcagacgttgcccacttgtgatctgggcagaagtgttgctctgctgccacgtggctcctctgtcccgggcatctttctcagatggtggagcacaggggatgagagaaggtggagaggcccttggttgtgtcatgttcctggaccttggccagtccagtgtggcaagccttctgctgcatgctgttgggcagcctggtgccctggatggggagagagaggctctggcatcactagccctggcatctgctccagaatccatcactttttggttatgtgacttgggttgatccttgaacctcgataagcctccctgggacaataatgcctggctgtagggctgccatggggacaaaatgaggtcctggttgttaaattccaagtggtttctggcatacggtaggaggatttttctgcccctttcctctgtggagctgagcaccagtggacaaacaggcacacctctttcatttgattattagtcttaatccttaaatttataaagttcctttcatgtttttaaatctcactgaattctcacagtgtccccttgaagcagactctggagtcagactggctgggttcaaatcctgcttcacttagctgagtgaccttgggcaaatcactttctctttctgtgcctcagtttcctcatttttaaaacagtgacaagaatttctggaggtggatattggttttatggggcctgaaggttacgatttgg

SEQ ID NO: 1430 - DNA, 4001 bp, Homo sapiens
gtacataataaatgctcttgactaatgggctgtgtccatcagacaaacattcagctttccctctgttatgccaccagtttatacagtgatgtgtttggcaagatgtaggatgccagccacagggtagttagactctaagataaaggagtaatgtagctggacaggcttgggcaccagcgagggtgtaaaggctgactaatagggagtttggtttggagggctatttccattggggaggagactctcacctgaagaaacccttgcagccctcacaagtcagcgcattaaagtggtagcctgtggcttggtccccacataccacacagttcctcagctcatcttccctactggccatgacgtcacgtgttggggtggctgtcacagactcctgaatgtaggaggggtcagcagtcagttttgggccacccttgacccttttctgtcccttctagagagtctctttccaaaccaaaccaaacatgcccttgacttgatccctggcgttatcttttgtggttttctttttctttttctttttcttttttttctgacacaagttcttgctctgtcacctaggctagatctctgctcattgcaacctctgcctcctgggctcaagcaatcctccacttcagcctcctgagtagcagggactacaggtccagaccaccatgtccagctaatttttgtttatttatttatttattttttttgtagagatggggttttgccatgttgcccaggttggtttttttgtttatttttttttgtttatttgtttgttctgttttttgagatagagtcttactctgttgcctagtgttgcctaggctggagtgcatcatagttcaatgtaacctcacactcctgggctcaagggatcctcctgcctcaacctcctgagtagctggaactataggtacacaccaccacaccaggatatttttttcttttccttccttccttcctccctccctctcttattcctttctttcctttttttttttttccctgaaattgagtcttgctctgtcacccaggctggagggcagtggtgcaatcttggctcgctacaacctccgcctcccagattcaagtgattctcatgcctccgcctcctgagtagctgggattaaggtgcccgccaccatgcccagctaattttttatttttagtagagatggggtttcaccatattggccaggctggtttcaaattcctgacttaggcctggtgcagtgtctcatgcctgtaattccagcactttgggaggccgaggtgggcggatcaccaggtcatgagatcgagaccatcctggccatcatggtgaaaccccgtctctactaaaaatacaaaaattagctgggcatcgtggcatgtgcctgtagtcccagctatttgggaggctgaggcaggagaatcgcttcaacctgggaggcagaggttgcagcgagccgagattgcgccactgcactccagcttgggcgacagagcgagactccatctcaaaaaaaacccaaaaaaacaaaacaaaaaacaaaaaaacaaaaaaacaaattcctgacttcaagtgatcaatcctcccaccttggcttcccaaagtgctgggattacaggcatgagctcccgcgcctggcctcttttctttcttttttgtagagatggggtctgttatgtaacccaggttggtcttgaactcctgggctcaagcgatccccccaccttggcctcccaaagtgctggaatgacacacgtgagccactatgcctagcccccagcattatctgtattttattacatttagtctttggtccccaacagatttcctacctgcttctcttaggcagcatgtcacctgcaggccacagaatctggtatggaatgcctctccccaaactcccacgctgttgctggttttcctctgatctcaggagttgccagtgattggagttagggattatgacccgtagtatctggaaaacaagagatgtctgttttatgtggcctccagttgctctcagtgactgtggggttagggcacagaccctggactcagggcaaaggcctgggtgggaggttttcccagcatgacaaaagtgctggttggtggcacacggggagggactccagtgggtgggaaccttgtgactcattggaagctgctgcttattagactcatcgagattttccctgttgatgagtttaaggctacatctgcagccttctgtgtacagagatcctgaacaagctgggaagagagagagagagagagagacaggcagacagacagagcaagctttttcacacgcagtatgtcagtactaaaagaagaggtgtgacagttccacaaggctcccccaaaaaaagtttttaagagactaggggctgggcacggtggctcacacctgtaatcccagaactttgggaggctgaggcaggcaggttacttgaggtcagtagttcgagaccagcttggataacatggtgaaaccctgtctttactaaaaatacaaaaattagctgggcatgatggcacatacttgtaatcccagctaattgggaggctgaggtgggaggactgcttgaactcgggaggcggaggttgcagtgaactgagatcatgccactgaactccagcctgggcacagaacaagtgagactccgtctaaaaaaaaaaaaaaaagagagagagagagagactacgatctaagtaagagcttacggaaagagccctctcacttcctaactagggagggctgagaatcaaatcagagtgaccacagggcacagtgacatgccctgtacatccccctactctggagacagggagagaatggtttgagcccaggagtttgaatccaacctgggcaacatagcaagaccctatctctaataataataataataaagtgctatttttaaaaaatattttttttttggctgggcggggtggctcatgcctgtaatcccagcactttgggaggccgagttgggcagatcatgagatcaagagatctggccaacgtggtgaaaccctgtctttactaaaaatacaaaaattagccaggcatggtggcgcacgctagtattcctagctacgtggaaggctgaggcaggagaattacttgaacccgggaggcagaggttgcagtgagccgagatcgcagcactgcactccagcctgggtgacagagcgaccacacccagctaatttttgtacttttagtagagctggggtttatgttgaccaggctggtctcggactcctgacctcgtgatccgcccgcctcggcctcccaaagtgctgggattacaggcgtgcacctgtaataatagctactgtgcccggcctatttttctttgttttgctattatgtcttctgcttcttcatttgcattaaattataattaatgtttctctaaagatgagttaaaaccccaagtgcaggctggagtcatacacacacacacacacacacacacacacacagagagagagactgagttaaaaagatccttgtttaggttaccagaatgagttggtagaacccctaatctcaagtggtatagcatctaactatgcataactttgtattttgaaataaactgagttccagagagcacagatgcttggatctgttccttgggagatggtaagaatatttatgtgtatgtatctgttggtgtctttgtgactctgacaattcatactaatttattcaatcaacaaatattgaccaagaatccacctatgtcttagatactagagttaaaagatgagtaagatgctctcctaccctcatgaattttaatcgctaatgggggagacagacctttacacagatataaagaaatatggtcagatcagtgatggtgccatgcacagagcattatggcactgaaatagcggggcacctaattctgctttggaaaaggggtgtcgaggaagaggcaggagaggctttctggaggtgtggcaactgagttgacttttacagggt

SEQ ID NO: 1431 - DNA, 4001 bp, Homo sapiens
tagtccccagcagccccttatgggctggaccgacagtcctccggttcccagccctctgcggtgggaccgattccagagctgcaggtgttctctgtttacgctcagagtgtaccgcctcggtcccttgcgatgtgagttgcgcgtgcggtagctggaaacacagttcttccagggttgcagagaaaagtgcaacagcgtctctttcccctaccttaccctctttaattcacccatggggtgtgggggagactgtgagggatcggcgtgcgtggtctcccgacccagctcaactctattttggcagcggccagctggggctgcgcgcagcaggagcccaagaccgcccgcgcgggcgcgagcccccgagcgcgcgtcccccgtgcgcgcgcagtccgcgtctccggcccgagcgcgctctagctgcggccccggacgcggaaccggagctgcgcggagctgccgggaaggactccttgcctgcgcaccgcggcggttctgcccgacgaaaaagatgcgaaatggttgtgtgctgctctctcatctttcttgtgcctgtattttctgtgttatctgcagaacaattgattgtgtgttacaccctgcttaccttccccatgttttctttttcgtaagtatagaacatttttggtaaacatttcctcaagtgatatactttagggtgtagttggcccataaaaaaagcaatctgtgactccactgcattctgtggagtcagctgactaggaaggaaaaaagaggaaaaactcaagccttgattttctttcttgttataatggagctgagactcagagagctcatgacaggcccctgcaaattcggagggaaattccagtctgaaagcctaggcaaatgctgccagaaaaggcacaggtccttcaaaaactggggaaaggcagaagggcctgacttccaacagacaaataattacagatcactgggaatcacttcccttcagtcctttacttttagaattaattgaatgtagtcttgctataaaattcataagtttgtaactctattttttaaatgaatagtagctttatttacttatttctgtttgtaaaaacaaaatatactaattgttgcgagaaacagtagctcttcaaatcctttactaatgatggtctagtttttttggttttttttttttttttttggaggtgggggcatgactttcattccccaggaaaataaaatgaaaattttttacggtataagcagagaataagacaccatacttttgtgtgggttgaaaagtaacaaatacttgacagctatctgttaaagtttgatcaatgatcactcaatatgattaacttgtttcaaattgttcaaattttagcttattatttctgattaaaaattatcagaaaatattaaagttgaaattgataaagtataaattatattttctggctgattagggtattagaatgacaccagtaaacactagatataatgaataatattcatatgttgaaatatccatttgctttttttgaactgcaagaaagataaatgtgtgatatatatacataggcttattgtgtgcttttaataaacataataggaaaagccatgacttaaaatgcaaaatccatcaacaagattaaattatatgtatgtagtagcagaataaatagatgatcaatagagaaactcctacttaccaataggtgtaagtccgtgctttaaagactcttgtaaatccccagtatctgaattagaagacattcttagtgaaattataggcagttctttggcttaaagcagaaatcattgagcaaaagaaaagtgcagcttgtcaaatttcgtggccttgggaaggacacatcagactacagtaacccttagtgaaagttaagaaaaagcaaaggaaaaaaaaaaatccagaattcataaagttacaagcaagtctttccctggactctgtactttttccaacattagtgacctgctgtaaaccatgtatccagtttcatgatggtttctaatcagaagaatggaaacttttgataggctttgactcatcacatgactctatgcaggttgataagaggaccctgttataaagtgacagcaaaagagataagaattcttgccagataatggcaaagaaatgattaactcagaagtggagaggtgctatgcagcacagagagtggaaagttgtaaaactgaggggtcagaagatcagacttagtggataaaaactgcaaaccagctaactaacttaggctaactaaactttggcttgtgacataccccttgatgtcatcacctctttgcatagaggaggacagacatagctcttctgacctctgtaaatacattttagatgataacattggcagacattaattctttaagtgatgactacaaatgtgatcgacactctgaaatactacaggtagcatttccaagcttatggttatttatttattcatgttgtggtcaaccaacttttttatcgggcctattcattagatgaggagttaaccttagcttgtttctacattggtcatatggctaaaacacaatctatctctttatccccaaaaggtaaaacttatgctttgagattaatgctggcaaaatggtgaatatgtaacacatttttcatagttataaagttattattcttaggctgggcatggtggctcacacctgtaatcccagcactttgggaagccaaggcaggcggatcacctgaggtcaggagttcgagaccagcctggccaacatggtgaaacctccatctctactaaaaatgcaaaaattagctgggtgtgatggtgcactcctgtaatcccagctacttgggaggctgaggcgggagaattgcttgaacctgggaggcagaggttgcaatgagacgctgttgcacttctctctgcaaccctggaagaacacaatccaagatcatgccaccgcactccagcctgggcaacagagtgagactctgtcttcaaaaacaacaataacaacaaaataacaattttttttttttgagatgggttctcgctctgttgcccaggctggagtgcagtggcacgatctcggctcactgcagcttctgtctcccgggttcaagcaattctcccgcctcagcctccccagtagctgggattacaggggcacaccaccatgcccggctaatttttgcatttttagtcaagacggggtttcaccgtgttggccaggctggtctcaaacttgtgacctcaaatgatctacccggcctcccaaagtgctggaattataggcgtgagccaccgcacctggccaaaatcctcaattttaatattgacactccttttaaattaagtaaatgcaggttgtgtgtatgggtacagataatttttaactcaatatataaacatttgttgtaataaaacttcatatatcagatgatagatttagcagtctttgtctaaagattcacattacagaatttatggtctattaatttatttagagatgggatctcactctgtcacccaggctggaatggagtggcacagtcatagctcactgcaacctcagactcatggacttaagcaatcctcctgcctcagcctcctgagtaactaggactacagatgtgtaccaccacacccagctaattttttaaatgttttgtagagacagtgtgttgctgtattgcccaggttggtctcctgggttcaagcagtcctcctgcctcagcctccccaagtgctcagattacaggtgtgagctacctgtaaacccaggccagtcctttttttttttttttttttaatgacagagtcttgctccattgcccaggctggactgcagtggtacaatcttggctcactgcaacctccgcctcccaggttcaagcaatcctcctgcctcagcccccctagtagctgggattacaggtacgtgccaccatgcccggctaatttttgtatttttagtagagatggggttttgccatgttggccaggctg

SEQ ID NO: 1432 - DNA, 4001 bp, Homo sapiens
ttgtagcacacagggtatgagctttccttatattttatataaaagaattaatcaaaaataaaatgtgtagctttataatatgagatttaccaggatagtattcatatttaacccacttgccacaaagagaaacattcttactttgttatagagaatggagggattttcctggtggtggtttaagtaattgtactgagttttccacttaaaaacaaaaacaaacaaacaaaaaaaactttgaaaaatagtgaatattgaatttactgggaatgtattaaaaagtcctgagataaattcttaaagtataatttatatttttggtaacaatatagcatattttacatattaaaatccatgcacttaaataggtcatatatttataaaaattattatattaaaaactaaaatctgatttcttggtctttatgatataaatttcaaaaaatccttaaaattattttggaataaatcaagatgaaatcacacagttgggaatttaggcttttatgtctgtggataaagaatgtttagacttatagcacagaaatactctgaagttaaaatgtatttgggaaatagtttgtcatattccctttcaagaacaacgatgctttaaatatatataagtcaagcaaaatcaatatttaggactgttagaaatggaagtctttctacagctatatcactttactacaataaagtattttagaaccatgagactggcaaagttttctaaacagcataaatttctttgccttttgaactaaatcagacacacacttctaagaatcatctccctaagactctctctttctccctcatttttagttgagtctttaaaaaaggagcctaaatttagcttaaaagaagtaatccactggtttattttggtgttggacattatatttttcaggtagcaatgtgtgagcaaaccttgcagctttcacaggtgaggagcccataatggtacccagacactttatctccacacacgggacaaagctcttccagatcttcatcataggagtaattcaccattttaaattgagacactgaaacaaaaagagaaatgtatacacatattcaattaatttacatgtaggtgttaatcctgcaacaaaaagcattttggtgattgctgggcaaatatcacatggtaaaatataaaataaaaacaatttttagcaaggtcttactgaactatttttacaagtaaaacatcttttgtcatcaataagcatggacctcatataattccatgtgccacaaacaattccaacttcttttgttaacattttaaactgaccgcttttaaacacaagtctcataactccacaaagcaacaaatagagacatgaattgcataaggtgacagtttagaatttcttttaaatccctatgaagttaaattccaaaatgtcaccttcgcctaaggtagagaaacaagcgcaggctttattccctccctcttgaagtggtttgctgcaagtgcaccttgcttacagggacagcagcaccaatttgcaaactctgtccgacagagaaactgaagccccagaaacccgcttctcagcagcagcccactttaactaaacagcctgaggctcccaactttcagatctgttagataatcgaaacattcagttccgtattgacagtacttttctattctggatactttcatctccttacgtttgaaaatctgtgaaaataaaaagaaggaaaaagaaaatagaggacgcccgtacggggaaaaataccagaagagtaaaagacacacagaagggttttggtttcaaagtattgaagccctgtaatgaacctcacatgtttccgatcatcatagcaaaatataaacacctcgagatcgccctattaaagttaaacagaaatcaggccgccacgacgcgcggcgcggctcactgccgggatcgggtaaccgccttgctccggacgcagacccacgaaggcgtcttcgcagctaaaaagatgacaaactatgcacaggaagggcagtgaccaggagaccccaggaagtgcctgatccggtatttcccggagactccacatccacacaggtcaagtatgggagcgcggggcgcgggtgggcgggcacccgcaggtctgcgcagccgggaccctgcccgcactcccccgggcactcttcggcgaaacccgtgggcgcaccaggctctcgcctaggctctacctcctgctacccaacggcgcacaaacacgcagccgagtttgttttaagttaatcagtggcgtttgcagggggtggggcaggtgggggatggaaagccacggccgggcagaagtttcctctgatttgtttaccaaaaaggaaagagaaatagcccccaccccatcgccaaagtcctccgccacagtatcgccgcagtgatgacttgttcttttgaaaataaagttattttttttctctttggttcccgagctcttcggtcggaaagggccgtcaggggggtcacttgcagcactttgcggctaaggactgcgcgcagacccgcggagttgacgcgtctcttcccgggccacagagccctaggatggctcacaggggagtgagttagccagagtttgggaacattccgagaaaagaggctccagagaaggcaggagcctgccttcgtgaaatattaataaagggatgctaggcgaggtcctcccagcggtgccagcctgaatcccagccccaagagacccccactagggttttaggaacctgggggtttgggaagggccgagggttcagaaattcctttatagcccctagacgttgatagctctcctaacaatcgcgatgacagtcttgaggcatgttttaggaacaaggcgaaaagcgcactttcccaactgtgatcttttctacctccccttcccccaacaaagtaaactctaactttacaccaaaggggcacagataggcaactgctttcagagggactccgtgcctacctcggggacccgacatcgaagaaagaccgaggcatgaggtagagactctcttgaaaaaacccaaagacagaggctgagtagggagacgctgctgtgtgaggcctgggcacctttcagagtttcccagatgctctggtgcagccgaagtaggcgtttggggaggcgaactcatcggggcaaagaagcgcccacactcttccccagtttcggtctagggaaagaagaacggacggcggtgccttggaaagctagggcctcagagaggcgcacaaagttccctcaaagttgggcgcgctgctctgtcccgggaccatgtagtggatcgtctttctgggctcctacggaggcgtcccaggtgggaaccagagcaagcaggagaatggggtccccatcccccaggggctcctcccgacaggcaggcctctagtctccgacgaagccttgccccggcgcttcccatgctgatttcgaaccatgggctgagtgagtggcgacttctgagcccaggcaccaaagaaaaactacttctctggtttgggggcactaggtagtgtgtccagaagacccctctcgaactttccaaagaaaacgttaccaataacatttctctctccgctctcaaaataagtctttggcttctcgcgccagaacaagaagcagaaactttccttttggagccaagaatcgtgccggcctcacccagcgaccccaagggtaggccctctccggagctgccggctgaggtcccccaacccagccccccagcgccacttccccgatgccccacactaaactggaattccaggtgcccggaagaaaggcttctttggaccaaccgggttcccatagcagccagacccacaggtcagcctccggggcttcagctctaggggactctcacagccctacctagaggcttggggagaccccaggatgaccgatggggtaacggatcacaacccgcacggcgcacgccctccagctacgtattttcccctccgcggtagggcgactacaggtcc

SEQ ID NO: 1433 - DNA, 4001 bp, Homo sapiens
ggctacattagagttagttttcatcaattaaacacgagtagccagatggtagggaggccaggtgttgattaaaataatctctaaagttaggcatttctaaactgaacaaaattacaaaaccctttatttatttatctatttatttattttttgagacgaagtctcgctctgttgcccaggctggaggtctgtggtgtgatctcggctcactgcaccctctgcctctggttcaagcgattctcctgcctcagcctcctgagtagctgggattacaggtgcctgccaccacacccagctaatttttgtatttttagtagagacggggtttcaccatgttgatcaggctggtcttgaactcctgaccttgtgatccgcctgcctcagcctcccaaagtgctgggattacaggcgtgagccaccgtgtccggcaaaaccctttatttaaagagccttaggtgccacttactgaagacaatctgtaccatgaactctcataataacaatagaatccctaagtactattacatagtgctttaccattcataaataacttaaatatattatttaactttccataacatccctgtgtggtaggcaggacaagtttatggtaatttaaaacatgaggaaaatgaggttgggagagattcagttgctcaatatcacacaactaaataaactgcaaacagggaccaaaatcctaggcataaagactaaaaatctcaagttcttgctactccaatcatctggtctcagctgcttcaactagctaataaataaatattgaagaacactcatctctgaatcctttatctccatcctattatctcccatacaatcagacagtctcgctactatggcctgtgtttctcatgtaatagagctgttatatatgaagaaactcatgaatgaactcaacactgagtttgcaatagtttacagaactgttaaaaactggacaggttttagaaacttcagcagctaataaaaatgaactgttctctataaacacgttaagcttattgcataactgaatgtatacccaaaataactttttactttctctcctcttattcctttaatacagaatatgggtaaagatgatccgacaagtgagagacaggatcaggtcagcgggctaccactgggcctcacctctatggtgggatcatattcatctacaaagtggttctggattagctggattgtcagtgcgcttttcccaacaccacctgctccaaccaccaccagtttgtactcagtcatttcacaccagcaagaacctgttggaaaccagtaatcagggttaattggcgagccacatctacagtactttaaagctttctataatcaatggaaatgaaaaccctagtgtgaccttccatttggttcttaaagtgactagagaacgcaaaaacaccggattaatatcggcctcacacttctggagtagttttctagcaacccccatccttagctatttttcaacagtccttgggccccgccctcagcctaagcaatggaaatcccccttcctattactccccgaaggcttctcagctctagcaggaagcctccaggccgcaactccttcccattctcccttctgtctccaaagatctccccacgtaggcaccaaatggaaggacccccgcccaaggcctttgtctccagctgatagattctgctccatttctggcatcagtgaaacgcctgaacattccacagcccaaagccgaacactatgcatgagataaacttacctcaagctccactgcctctgctttggacagatttaggaccacagccgggaaaaatgttggagaccccggaaccgccatgaacagcccccaccaaggagcggcacttccggccccgcccgctacgtaatcagtcggcgccccaggcgcctgagtccccgccccggccacgtgggcctccgaaccacgagtcatgcggcaggccgcacccagacccgcccctcccacacgggacgtttcaataatgaaagcgctaggtgctagtgtctcaaaaatcagtaaaactttattcgcttccattctttcgccattaacagaaaactggagaaagcaaaaatgtttcgtgtttacaaagataaacggcctctttacccagagatcaaaacctcaaacgacaagggggaagataaaaccgccctcccccacatcccctgagctgacccttgtcatcttagacaaagccttcagtccactggccagggaccctgtatatggccaattcaagaagagggccaagaaatcagacccatccattcccgtgatataaagttgaacagaagctacaccaagggtcaagtgtctgtattttacaggacacagtaaccaggcggctacttataaaaaaaaacaagattcatttcaggcacaacttttttatttttttttgttttgtttttaaatcagtaaaagaaaccgggtcctagaagctgcagtgatctaagcagcagcaagtttgtgcattcattttttttgtttttgtttaaatatgtttaaattatcacactgctggcactcctcatttgcatgaaattctgcaccatacttactaattgtagtaaagttaccccccaacccacgaaaaaaaacctactctggaagaaaattttcactgaaatataaccaaacttctttaagtggattgtgacaagattataaatgatatgaaaaataacattttaaaatttggccatcaactttaagaaatggtttgcctatacaaatttttgtaatttttaaaagataatatattctaccctcatatggtcctcagaattaaagcataatgaacaggaagaaaaaggaaaagaatgcaactgagtgctaaggcagaacatcttgccagaagtaattaatgaaggtagagtatataatgaaaagtgcagaatttcatagggccaacaagataacagtctatatttttcacttacacaggcaaagtggattctgcaattaccagttgcgttaaatgcaccaaataaagctcctaaaattgatactataaggcgccaccttaagtttttccaggctgcaactgtgcattatttaaaatggttttcttaaatttatttatttttttaaacataacacgaggaaggtgttaaaactggtgtaatagctcaatagaataagtattccagatttcgggagggatgaagagggagatattcagaacccttcaccagattccccccaacttgatcatagtggattaatggtgtgctttgtggatgtggttagtcaatgacaccagcttgacggatctttctttctgcaccaaacccctgtgggggggagaaaaaaaaaaccctgcagttaatgatttgagcgcacaacaatcatagtacattcactattccgaaatgaaactacaaaagcattatttttaatcatcttatgcagtactaattctttcctagaggagaaaatccacagtaagcactcctgacccattcattacctaaactgtcttcaaagcatcaagaaaagaaatgtgcttcttactgtaagcaaccattaggttagggggctgaaccaatgtgtagaaagtcctaactagttataagcaatatggaagtctccctgcttcattaagtttcctgacctattgtttaaataggaccacatattttatgttggtctatcagttggcctcccccaagccttgtatgccctcataccattgagttatctggtccccttggctgacgaagaaccattaggcgaggagcactggcatcatccagagtgatattcttcaagcgattgaccaaccgatcaggtcgaggagctgcaacagccttggggccctcactgtaattaagtcaaaagatgagaagaaaccacacttggtgggcagacagcaagcacttgcaaaggagtgtgttttccacctaactgcccaaatgactcactttttatgatgggactcttgcctcatatacctagctagaaagacaggac

SEQ ID NO: 1434 - DNA, 4001 bp, Homo sapiens
ccagcactttgggagaagaggcgggcggatcacaaggtcaagagatcgaaaccatcctggccaatatggtgaaaccccgtctccactaaaaatacaaaaaattagccgggcgtggtggcgagcacctgtagtcccagctactggggaggctgaggcaggagaatcgcttgaacccgggaggcggaggttgcagtgagccaagatcgcgccactgcactccagcctggtgacacagcaagactccgtttcaaaaaaaaaaaggaaatcagcaaatgatacactgaatttggtgtcagatagtaggggtcatcataccagctctgttattatttagctgtgtgattcagagcaagaagcaaactctttgggtctcaatttcctcaacctgttcaacgaagttattggacaatatgaactctatttaaaatacatcaaagtccaggcctggcacagtggctcacgcctgtaatcccagtactttgggaggccaagacaggaggattccctaagcccaggagtttgaaattagcctgggcaacatcgcaagacccagactcttattaaaacacacacgcacacacacacacgcaagatacatcatagtcatgatactccatgaaataagctacctctgaaggaaaatactcaggtggggactgaatcaccaattattagaaatgtttagagaactcctgtacaaaccaaaagtagagaatttcaaggttagaagaaaccttacaactcacccaactgagacctaagccctctctaatatattcctggacgaggtcgcccaaccgttttggtaatggagaactacccatggaaacaagtcacttcaacttaggccaaatatgatgcaaagttactttactgaagccacaccatcctctggtaactttcgtccactagtttcacctatcacttaagtgtccctcaaatattttggatagtgataatatgccccttaaatatcctgtcctccaaattaaagtatccaactccgtcaacctttcctggtaacataataccaagactccctcaccattcaggctgcgttcctcaaagaaaccttcattcttgctttagcgactgtattcaaatgactcgaaaagcttctcccattctgacgtcttacaacccaagatctcccacttgcccagctgacaccacagggaagcctctaatcacgcttgccacctccacccaaggaagcatttggggtggaaagtgtgccctgttgctccattgggagacatggagacaagaagtgacggcggcaccgacagagaagccggcacactgttcgcctccccattgcaagcctcctccctcaccggtattgcttggggtcgctgggagacttgacgatctcagggtccccagcattactgagagaccccctccgtccctcttcctcagattcatccgctcctagacgggcaacccggctgttctcgcccagatcctgtccattgggctgcaggtcagggcagctgcaggtagacttcgccttgttccttccaggcatggccagaataggaaagggtctggcagcagcagagtcttcgcaccgaccccgcgtttcgattccccagagcgccgcgagctcccgcccggcctcacacaacttcctccgggtggcacagactgcagcaacagtgactctcctcagcattcaccaccaagctggagcgatggacatcccgcttcccaggacccacctcctccgcgttctagaggcggtggcggccggccctggtgctgccgcagccgcggggaacaggcctgaacccctcccccaacccagtctccctctcgccgacttccctcgtccctccgccctcccggccgccgatgacgctactgatttcagccaatcatgaggcaagaaagtagtcacgctcacgtaagcaaccaatcagaacaggaaaggagaggcaccaacgtgacccggactgattctcggaacagccagcgaacatttcgaaacccaaagtgggcggggcgagggagaagaagcggagagagtggcgcggaggacgacgggagaagggcccccggcgcgtttatgacgtacgagtgtgttttgtggaaaccactgagtagtgctccgcgtgtcaaagaaaaatattcccctaatgagaaaactgagaaacgagtgcagagaattaattccaaagttttaaattttcccattcgtgtcatagtttgggtaccctactcctcagacccggggcgagccttcggctgtgactcagcacataaaaaaccagaacgccggaagtattttcctacacccgccggatggacgctgctcccgagcgccgcaaatactaattggctcttctctaccctacagtcggcccgacagtggtggggtttcatcctcaagccctaagaaagtgctaaaaagaccagtctggatgtgctaactcttctgtgtgaaaacgttttttagctcctccagcctcctgttaaattcggccaatttttatcgagcagctgcagcgtctgctgccttcaagtctcctttcccagtttttcccgctagcagtggtctttggttagcaatgtaaaatgtgacggaaatacaaacataaatgaaagctaaaaagcagctgaaattagtaagatgcactatactgacaccatggggtaagagatcatagctcatacatacgaatgagcggggaaagacgtgaagcagggagatgtgttgatagttactgtatcttcaaggttttcgaggcctcttctgagttccaaatgcaaggaatacaaccatgaacaaaacaaaacttgccttaggctgggcgtgatagtgatagctcacacctataatcctagtactttgggaggccgaagcgggaggattgctttgagcctgggaatttggtaccagcctggacaacatggtgagacccccgtctgtacaaaattcttttttaaaattagccaggcttggtgatgcgtgcatgtggtcccagctactcaggaggctgaggcaggaggaacgcttgagtccaggaggtcgaggctgcagtgagccgtgattgcaacactgcactccagcctggttgacacagtgagaccctgtctaaacaacgacaacaaaaatttaaagccttgccttgggggagcttgcatcctaatgggaaggaactgtaaaatatgtaaactaaagtaaatcaggcttttaaataattcaagttagctttcttcagaagtcttattgaggactgccacctgggagagtcagagagttttttttttagactgctccaaagcagtgtttcagcccgcagcttctatacaggtggtggccgctctgcatgtgcttggaagttaaatcaaatgtgctcagaaaggctgggcctgtaatcccagtgattaaggaggctgaggcagaaggattgcttgaggccaggcatttacaaccagcctgtgtaacatatcaagactctgtctccacacacacataaaaaagcaaggcgtggtagaacatccctgtagtcctagctacaggagaggcagagttaaaaggattgctgggactcctgagtttgaggttacagtgaactatgattgtgcctctgcactctagcctggtgacagagcaagaccttgtctctaataaaaaagaaaaaatgtactcaggagttacactagagcaaaatctcatgaaggtttaggtggaagagtacacatgtttatagattatggaggcatagtcattaatcctgtcagaaatgtacaggaagaggcaaggtcgagcatcattggatttatcttttctaaaaatgcagtgattcaggcaagagacatgggaacttgtgctctatcctgcatattttcagggtattctggagggctgtgcgcagtcactgaggctgtgaaattctgctggcaagagagtttgtgaaattctgctggtaaacagaatgagcagacatggcttcttatgtttgctactttgtctcacatatacaaaaaacaat

SEQ ID NO: 1435 - DNA, 4001 bp, Homo sapiens
ttatcaaacaaatttaccaaaaatgaggtcagtaaatgaaataacacatctaaaacagttacaacagtagctgaaacacagtgtagattccataaatattagttattatataactttatataggctggaaaaaaccctgaaaccattattgaacatttgatctggaaggcaaaaactaagcaccttttatcaagttttcaacttgctcatttatacattgccaatacaggttgagtatcctttatccgaaacactcgggaccaaaagtatttcaaattttggatttttttggattttggaatatttgcgtatacgtaatgaggtatcttggggatgggatgcagtataaatacaaaattcatttatggttcatatataccttatacacataacctgaagataattttatacaatatttttaataattttgtgcatgaaacaaagtttgtgtacatgaaccaaccatcaaaaagcaaaggtgccaagtgtggaatttttcacttgtggtgtcatgttggcgctcataaagttttggatttccgagcattctggatttttggattagggatactcaacctgtacaatcacatctttgatgagaaagaaaatttagctcatttataaagatctcttgactctggcagcctggagaaaatatatctagacttgaagtgaaaggagaaattaggttggtcctgaacttggagctaagtgtcatctgtcaaagaggtgtggtgggaagtggaaaagattatctataaggttgtttcttgcgctaacgctgtaggggcttataacaaatttagaactagaatccttcagctttcaattcacataagcaagaaatttgtaaaaaatcggcaaacgggctgggcggggtggctcacgcctgtaaccccagcactttgggagaagaggcgggcggatcacaaggtcaagagatcgaaaccatcctggccaatatggtgaaaccccgtctccactaaaaatacaaaaaattagccgggcgtggtggcgagcacctgtagtcccagctactggggaggctgaggcaggagaatcgcttgaacccgggaggcggaggttgcagtgagccaagatcgcgccactgcactccagcctggtgacacagcaagactccgtttcaaaaaaaaaaaggaaatcagcaaatgatacactgaatttggtgtcagatagtaggggtcatcataccagctctgttattatttagctgtgtgattcagagcaagaagcaaactctttgggtctcaatttcctcaacctgttcaacgaagttattggacaatatgaactctatttaaaatacatcaaagtccaggcctggcacagtggctcacgcctgtaatcccagtactttgggaggccaagacaggaggattccctaagcccaggagtttgaaattagcctgggcaacatcgcaagacccagactcttattaaaacacacacgcacacacacacacgcaagatacatcatagtcatgatactccatgaaataagctacctctgaaggaaaatactcaggtggggactgaatcaccaattattagaaatgtttagagaactcctgtacaaaccaaaagtagagaatttcaaggttagaagaaaccttacaactcacccaactgagacctaagccctctctaatatattcctggacgaggtcgcccaaccgttttggtaatggagaactacccatggaaacaagtcacttcaacttaggccaaatatgatgcaaagttactttactgaagccacaccatcctctggtaactttcgtccactagtttcacctatcacttaagtgtccctcaaatattttggatagtgataatatgccccttaaatatcctgtcctccaaattaaagtatccaactccgtcaacctttcctggtaacataataccaagactccctcaccattcaggctgcgttcctcaaagaaaccttcattcttgctttagcgactgtattcaaatgactcgaaaagcttctcccattctgacgtcttacaacccaagatctcccacttgcccagctgacaccacagggaagcctctaatcacgcttgccacctccacccaaggaagcatttggggtggaaagtgtgccctgttgctccattgggagacatggagacaagaagtgacggcggcaccgacagagaagccggcacactgttcgcctccccattgcaagcctcctccctcaccggtattgcttggggtcgctgggagacttgacgatctcagggtccccagcattactgagagaccccctccgtccctcttcctcagattcatccgctcctagacgggcaacccggctgttctcgcccagatcctgtccattgggctgcaggtcagggcagctgcaggtagacttcgccttgttccttccaggcatggccagaataggaaagggtctggcagcagcagagtcttcgcaccgaccccgcgtttcgattccccagagcgccgcgagctcccgcccggcctcacacaacttcctccgggtggcacagactgcagcaacagtgactctcctcagcattcaccaccaagctggagcgatggacatcccgcttcccaggacccacctcctccgcgttctagaggcggtggcggccggccctggtgctgccgcagccgcggggaacaggcctgaacccctcccccaacccagtctccctctcgccgacttccctcgtccctccgccctcccggccgccgatgacgctactgatttcagccaatcatgaggcaagaaagtagtcacgctcacgtaagcaaccaatcagaacaggaaaggagaggcaccaacgtgacccggactgattctcggaacagccagcgaacatttcgaaacccaaagtgggcggggcgagggagaagaagcggagagagtggcgcggaggacgacgggagaagggcccccggcgcgtttatgacgtacgagtgtgttttgtggaaaccactgagtagtgctccgcgtgtcaaagaaaaatattcccctaatgagaaaactgagaaacgagtgcagagaattaattccaaagttttaaattttcccattcgtgtcatagtttgggtaccctactcctcagacccggggcgagccttcggctgtgactcagcacataaaaaaccagaacgccggaagtattttcctacacccgccggatggacgctgctcccgagcgccgcaaatactaattggctcttctctaccctacagtcggcccgacagtggtggggtttcatcctcaagccctaagaaagtgctaaaaagaccagtctggatgtgctaactcttctgtgtgaaaacgttttttagctcctccagcctcctgttaaattcggccaatttttatcgagcagctgcagcgtctgctgccttcaagtctcctttcccagtttttcccgctagcagtggtctttggttagcaatgtaaaatgtgacggaaatacaaacataaatgaaagctaaaaagcagctgaaattagtaagatgcactatactgacaccatggggtaagagatcatagctcatacatacgaatgagcggggaaagacgtgaagcagggagatgtgttgatagttactgtatcttcaaggttttcgaggcctcttctgagttccaaatgcaaggaatacaaccatgaacaaaacaaaacttgccttaggctgggcgtgatagtgatagctcacacctataatcctagtactttgggaggccgaagcgggaggattgctttgagcctgggaatttggtaccagcctggacaacatggtgagacccccgtctgtacaaaattcttttttaaaattagccaggcttggtgatgcgtgcatgtggtcccagctactcaggaggctgaggcaggaggaacgcttgagtccaggaggtcgaggctgcagtgagccgtgattgcaacactgcactccagcctggttgacacagtgagaccctgtctaa

SEQ ID NO: 1436 - DNA, 4001 bp, Homo sapiens
tgtaagacacctaaatgttttaaataccttagcatttcctagaatcagacaaattctaagattatacaacaaaagtcttctcccaaaaaactactaaaaacgtcctgagatatatccctattcttgccttgcttgcaaggagggaatgacgtaagagtcactatatacaaaactacatacagagtcacaacccaggaagtgtttcttcattcttccactgaaccttttttttttgagatggagtctcgctctgtcacccaggctggagtgcagtggcgagatctgggctcactgcaagctccgcctcccgggttcacgccattctcctgcctcagcctcccgagtagctgggactacaggtgcctgccaccatggccggctaattttttgtattattattattattgttttagtagagacggggtttcaccatgttagccaggatggtctcgatctcctgacctcgtgatccgcccgcctcggcctcccaaagtgctgggattacaggcgtgagccaccgcgcccgaccccttttgcctgttttagagtgaaaacattttctttacaagactaaaataggttaaaaaaaattgtgttggttgaaaactttactaagatcatacatttgcctctataccacatttcccaagcctttcttaaatatttttgcaaagccctgaaggtggtagttttttgggaacacaagaaataaagggattgtgtgcttccttataacaggcaccaatctacttatattagcggaaaaaatttaaaagctcataataccgcacatttgtgagttatgaatgaccacagtgcaaacagtaaaaataaaggttaataggccgggcgaggtggctcacgcctgtaataccagcactttgggagcccaaggcgggcggatcacgaggtcaggagatcgagaccatgctggctaacacggtgaaaccctgtctctactaaaaacacaaaaaaattagccgggcgtggtggcaggcgcctggagtcccagctactcaggaggctgaggcaggagaatggcgtgaacccaggaggcggagcttgcagtgagccgagatcgcgccactgcactccagcctgggcgacagagcgagactctgtctcaaaaaaaaaaaataaaataaaataaataaataaataaaacatgcaaaaggaaagatcaaatgctgcttgggtgaatggctgacttccagaattaccctttccaggagaattcctcattgtctgcggctgcattgtccaacaggtgagccactagccactttgtagttactgagcgcttaaatgtaactagttcgaagatgtgccgtaaatgcagcacaccagatttgaaaagcttagtacgaacaaaagaatgtaaaatatctcattcatttgatattattacatgttaaaataccttggatttattgggttaaacaaaatgtcttatttccattaacttcacctatttcttacttttagtttaaaactacataaagattagcttgccttgtattttcactggacagcgctggtctaagtaattaataagacccagctgacattagcatctatttctttctcctctagcgtttctcgaactggttctacagtagcctggggcaccgttaattctgccaaggcctggcgtgggatctttctgaatcctaagatcctgggtgttgggtaagaggatgatgagtaaagaactggctaactggtcccgtacccactgcgcatctcgcagagcgggctcccgaatctcctccggcagagcgtccccgagcttttgcacgaagcggccgcacagttgtagcatttcggtcacagcccgcttcgaggtgcagcgcacccgaaagtcttctcggggagtggcggagaccaaggcctggctctctgtgccagccgcgagctccttgtcccatggagggtcaaggaccaccaactcaggagaccccgccatttttcgtcggaactgtgggcggggcactctgggagcggaaaagcgggttcacactggtgtaaccagcatgcatccggctggaaactcaggacgctgcagctgaaacgttccggctccggctctgctggccggtctaaagcggcagccgccggggcgcaatgcgagcggctggcgtaggcttggtggactgtcactgccacctctccgccccggactttgaccgcgtatgtgagggcgatacgggaccagagggagcagggaggcccccgtcctttcccctcgtgttatctttgctctcctcccttgggacgaaaccccatatcccccgcccagacccttgtttatggccatatgaccttgcccctcatttccctattccctatttaacctcagacataccgatttttttttcctgattcagtagcggtaagctatctccacaaggcttttgtttgctcttctgagttcctggaatcgttccctcactccccttggctggcctgtttttcccctcggggctctcacctcctggctgagatgccactctttgtgggaagcggtcctcgaaacgcgttcaaatcggggagaggtcgggcgcgggctcacgcccgtaatcccagcactttgggaggccgaggcgggcgctgcgcatctcctgtgtccaggagatcgtgaccagcctgggcaacatggtgaaacctcgtccctacaaaaaaaaaaaaaaagccggtgattgtggcgtttgcctgtggtcccagctactcgggaggctgaggtgggagaatcgctggagcccaggaggtggaggttgcagtgagctgacatcaagccactgcactccagcctgggtaacagtgagaccctgtctcaaaaaaaaaaaaaaaaaaaaattcacaaatgggggagagaggcaaacaaacaaacaaaaatacatggccgagtgtggttgctcacacttgtaatcctagcactatgagaggccgaagtgggtggatcgcttgagcccaggagtttgagaccagcctgggcaatgtggtgagaccccgtctcaattaaaataataatacacacgtaaaatcagttacaaactgttttacccattacgtgggaaactagagactaataatagaggattaaggggggttttatttcagggggaaatcctcccaggagctgacacttaaggctgaaaagacaaggagccacccaagcaagggggtgagtgtatgctggttagggaaacagataggttgcaggcccccagacaagctagaatttggcacatttcagttgccaaaaagctaagtggagcctgatgagctagaaagagaaaggcatgaaacaaaactggggaggtttgcaggggatagatgaggtgggtcagtaaggaatttggattgcatttgaagcacaatgcagattcattaaagggcttttttaaaatttattttcatttttttatttttttagattgagtctggctgtgtccctcaggctgaaatgcaatagcatgatctcaggtcattgcaacctccacctcctgggctcaaaaaattctcctgtctcagcctcccaagtagctgggatcacaggtgtgtcccaccacgcctggctaattttttgtatttttaatagagacagagttttgccatgttgtccaggctggtcttgaacttctggcctcaagtgatcaaccctccttggcctcccaaagtcctgggattacacaaaaatggataggcatgatgctatccattttaacaccattttgctgctgtatggcaaatgggtggaggagaagagtggaagctacaagactagttaggaggcttttgcagtatataggcaagagatgttggctgttggtactatgatgatagcaggtgagtttgagatgaatacatggattcaagatacattttagagagagaatccacagtaagtactgaagaattggatgtggatagcaagggaaagggaggagtcaaggatgactcagattattagcttgtgctatagggaagatggtggtgct

SEQ ID NO: 1437 - DNA, 4001 bp, Homo sapiens
agggcagagagatcatcagcccagtttccaaaactctgtgagaaagggttggggaggccataggactagtttccaccggccggcgagcaagaggaggtgaaatcgtgaggcaagttcccggggtcctatgtgtaggaggaggcgaaatcatgggtccagtttccaagggtacatgagtgagctgaggggaggtcactgggctcgttcccggggactgatgagcaaggggaaaggaggttgccgggctggttccaaaagctgaaggccatccgctagagtaacagagattagtgtgctggtcacagtacgtgccttgaagacagggacgccgcattctggagggactcatccagctgcaataaggtgtccgctgacagagagggggtgaccccggaatgctgaactgctcaaaataagggctggagagtggggaacccgagtggcagggctagcggcagtaggtcctttccaggagtggggaagaggactcaaaagaccatctccctgagtgcgaggaaggttgtgggggtggaagagatggtggaggtggcgagggaatcggctggggtgggcaggggggcgtgccggtcatagaagaaattccagggcttccagtgaggcaagaaaaagggtctctggagaagcaaggagagtccagaggatgagaggattcgttgcaccttttgccagggtttgggccggcagtatggacagggtggtcgctgtaaccttgcccggtcgccagaggcagctcgaggttgaggaaggggctgaatcctttcctgcaaggcggcggagacccaggagtgcaggcaaggtcgctatggtattttccgaggggtgagggcgaccgggctggaaaatcaatgaggaaaggagaagtcatgtgggggaagaatgggcaagggaaagggggaggggagggagggaagtaaaagggggagtgggggacagaaaggtaggtggacacagctggggaacaagagacagtgacatcactaaaagaatgaaggcgaaggtgatgacgcaacttgggcggagtcaggagactgcagacgtaacaagtggaagacactaacgctcgggacatagagtgcggacagaggcggtgacggaaaagacgagagagggaggtgcctaaggacgttccgtggagtgcttgggaaagacgctaggcgttctagagggccgggaaacggaaagactggagaagtttccaccctcacttttccctcctgcgcccccagccggaccttacccatttcttcttatatcgatgtctccgcgggaccgtcgcgaggtccacacgcttcagcagctcccggacacccctcagtgtcagcgcagccatatcggcgtgctccacggggtaattccgaccggaaccgcgacaggagactcgcgtgttccggggaggtggtgagcgccacccggcgggacacgagcgaaaaaagggaaaggaaatacatctgacgctctcccaggactccgcgcgcctctacagactccgcccagccaggagtcccctgaaggctgctggaaaaagagcaacctggcacccggaataatgactctgcctggatgcttagagcagtgcgagggactcccaagaagcccctagcccacttgggggaccagggaggattaggagttggtggttgagtaccgaaagagttagctaggcgaaaaggggcgggaagggcctcctaggccgaaattgcatggaggaagatccttaggtagaggaaaatgagaccaggcttgtaggcagaagcagatttgcagtgaaacaaatgaagcttaagtttcgggacctggccgggcgtggtggctcacgcctgtaatcccagcactttgggaggccgaggcgagcagatcacgaggtcaggagatcgagaccctcctggctaacacggtgaaaccccgtctctaccaaaaatacaaaaaattagccgggcgaggttgctggcgcctgcagtcccagctactcgggaagctgagggatggcgtgaacccgggaggcggagcttgcagtgagcccagatcgcgccactgcactccagcctgggcgacaaagcgagactccgtctcaaaaaaaaaaaaaaaaaaaaaaaaagtggaggcgtgaataacccaccccttgtttagcgtaccatcaagaaataaccataaaaatgggcaagcagcccttggagctgctctatctatggactatccattcttttattcttgtactttaataaacttgctctcactttgcattgcggactcgccctgaattctttcttgtgcgagatccatgaacctctcttggggtccggatcgggacccctttctggtaacaatgcctgtaatcccagccaatctccctgccttttgatctccctgcctcactcctacccaccctgataattggctgttgaatgatcatttaaaaacacagtttctgatcatgtccctcctctccactggatccctactggtgatgtcaaatgttgtggggcctaacgcttccgcaatttgagaagacatagttaagaaaaataatacaaaacttggccgggcgcggtggctcacgctgcccccagccgaaagctttttcttatttggcatttgaatgtggaattttggaattttcttattggcaacaaatactgtcagttattttccttgaagtgacaggctcactttgttcatttttcaagaaaaaggctggccggcactgtggctcattcctgtaatcctagcacttgggaggccgaggtgggtggatcacctgaggtcaggagttggagaccagccaggccaacgtggtgaaacccagtctctactaaaaatacaaaaattagttgggcatggtggctcatgcctgtaatcccagctacttgggaggccgaggcaggagaataacttgaaaccaggaggcagaggttgcagtgagctgagatcatgccactgcactccaggctgggcaacagagtgagactctgtctcaaaagaaaaattctagtatattaaaatataattgattttttctgttgaccttgtatcctgagaccttcctaaactcaattattacttttggtaactttttggaaatctgttcaggttttctatgcatatggtcatgtcttttgtaaataaagacactttaacttctttcttttctatctatatcccttttttttttctttgctttattccactggctaggacttccagtacacagttgaatgtaagtggtgatggtaggcatccttgccttgttcccattcttaagaagaaagcatttagtacttcaccattatatatgatgttagctgtagttttgtgtgtgcgtgtacctgcatgtgtatagatgtcctttcttaggtttagaaagttcccttctgttcctagtttgctgagattttaaaaaatcatgatagttgttgattttccttaagttttttttttttttctgttaagatgatcatacagttttactccttttttttttttttctttttgacggagtttcgctctgtcaccaggctggagtgcagtggtgccatctcggctcactgcaacctccgcctcctaggttcaagcaattattctgcctcagcctcctgagtagctgttatcacaggcatgcaccaccacgcctggctaatttttgtatttttagtagagatggggtttcaccgtgttggccaggctggtctcgaactcctgatctcaggtgatccgcccacctcccaaagtgctgtgattaggtgtgagcccctgcgcccagccagttttacttctttattccattactatgatgcatcatgttgactgacttttcaatatgaaccaactttgcattcttgtaaaaaacacatcaattcatgatacaaatacagtattttttttcttttagacagagtcttgctctgtcacccaggctgcagtgcagtggcacaatcttggctcactgcaacccacgcctcccaggttcaagcgattcttctgcc

SEQ ID NO: 1438 - DNA, 4001 bp, Homo sapiens
atgattgagggagccagacagtgggcagggatggggggtggagggaaccacagagcatatatgggtattgcaggggggccctatggagggtccatggcggctgctctgagcataactattggccgagacaggatcacaaggaaggcagaggggaaaagaagtggggataacacttttgagagctctagggaccacagtcagtaaggtagtccctgggggaagttctttggggctggaatttgaaggagttgtgatgtatggctgcatacaagaaggaccagagaggcaggagggaggtgggggacaggtgtgggccttagcgggcttgggctggccagaaggggtgtgctggggagtgttgactagggagagacatttgtggggagtatgtgactgtcttaactctggggacttaggggacttcggttggggggaaactggagtgggaagagggggttcattatagcttctgcggggaagtgactggggtggagatataaactggttgcccaggggtgaagggaaggaaaggacagaatgaggaccatggggacgagatggttcctgggaacaggggggaccagaagttgtggtgtccggggttaggatgaggtaagagttcccagttgcctcccaggagagaagggactcaatgcaagccttcctgggagcctgggactggggtgagcaaggagaatcagtactcccggggcacaggcagatggcatagcaaggactcccaggggtaggtatgtaggcctctgaggaaagatgggagtaatgataagagccctcctgaggtgagctgggagagccaggcatgcctgcctgagaagagagtgggaagccacaacaatttttctcaaggggcaggtcaagctgtggtttgggttcacaagagtctagaggcttaaggctgccatggtaaaagctgccagtaggtggggaagatgctggggagagaagggggtcattataacttctccctgagaaccagtgagagggcagagagatcatcagcccagtttccaaaactctgtgagaaagggttggggaggccataggactagtttccaccggccggcgagcaagaggaggtgaaatcgtgaggcaagttcccggggtcctatgtgtaggaggaggcgaaatcatgggtccagtttccaagggtacatgagtgagctgaggggaggtcactgggctcgttcccggggactgatgagcaaggggaaaggaggttgccgggctggttccaaaagctgaaggccatccgctagagtaacagagattagtgtgctggtcacagtacgtgccttgaagacagggacgccgcattctggagggactcatccagctgcaataaggtgtccgctgacagagagggggtgaccccggaatgctgaactgctcaaaataagggctggagagtggggaacccgagtggcagggctagcggcagtaggtcctttccaggagtggggaagaggactcaaaagaccatctccctgagtgcgaggaaggttgtgggggtggaagagatggtggaggtggcgagggaatcggctggggtgggcaggggggcgtgccggtcatagaagaaattccagggcttccagtgaggcaagaaaaagggtctctggagaagcaaggagagtccagaggatgagaggattcgttgcaccttttgccagggtttgggccggcagtatggacagggtggtcgctgtaaccttgcccggtcgccagaggcagctcgaggttgaggaaggggctgaatcctttcctgcaaggcggcggagacccaggagtgcaggcaaggtcgctatggtattttccgaggggtgagggcgaccgggctggaaaatcaatgaggaaaggagaagtcatgtgggggaagaatgggcaagggaaagggggaggggagggagggaagtaaaagggggagtgggggacagaaaggtaggtggacacagctggggaacaagagacagtgacatcactaaaagaatgaaggcgaaggtgatgacgcaacttgggcggagtcaggagactgcagacgtaacaagtggaagacactaacgctcgggacatagagtgcggacagaggcggtgacggaaaagacgagagagggaggtgcctaaggacgttccgtggagtgcttgggaaagacgctaggcgttctagagggccgggaaacggaaagactggagaagtttccaccctcacttttccctcctgcgcccccagccggaccttacccatttcttcttatatcgatgtctccgcgggaccgtcgcgaggtccacacgcttcagcagctcccggacacccctcagtgtcagcgcagccatatcggcgtgctccacggggtaattccgaccggaaccgcgacaggagactcgcgtgttccggggaggtggtgagcgccacccggcgggacacgagcgaaaaaagggaaaggaaatacatctgacgctctcccaggactccgcgcgcctctacagactccgcccagccaggagtcccctgaaggctgctggaaaaagagcaacctggcacccggaataatgactctgcctggatgcttagagcagtgcgagggactcccaagaagcccctagcccacttgggggaccagggaggattaggagttggtggttgagtaccgaaagagttagctaggcgaaaaggggcgggaagggcctcctaggccgaaattgcatggaggaagatccttaggtagaggaaaatgagaccaggcttgtaggcagaagcagatttgcagtgaaacaaatgaagcttaagtttcgggacctggccgggcgtggtggctcacgcctgtaatcccagcactttgggaggccgaggcgagcagatcacgaggtcaggagatcgagaccctcctggctaacacggtgaaaccccgtctctaccaaaaatacaaaaaattagccgggcgaggttgctggcgcctgcagtcccagctactcgggaagctgagggatggcgtgaacccgggaggcggagcttgcagtgagcccagatcgcgccactgcactccagcctgggcgacaaagcgagactccgtctcaaaaaaaaaaaaaaaaaaaaaaaaagtggaggcgtgaataacccaccccttgtttagcgtaccatcaagaaataaccataaaaatgggcaagcagcccttggagctgctctatctatggactatccattcttttattcttgtactttaataaacttgctctcactttgcattgcggactcgccctgaattctttcttgtgcgagatccatgaacctctcttggggtccggatcgggacccctttctggtaacaatgcctgtaatcccagccaatctccctgccttttgatctccctgcctcactcctacccaccctgataattggctgttgaatgatcatttaaaaacacagtttctgatcatgtccctcctctccactggatccctactggtgatgtcaaatgttgtggggcctaacgcttccgcaatttgagaagacatagttaagaaaaataatacaaaacttggccgggcgcggtggctcacgctgcccccagccgaaagctttttcttatttggcatttgaatgtggaattttggaattttcttattggcaacaaatactgtcagttattttccttgaagtgacaggctcactttgttcatttttcaagaaaaaggctggccggcactgtggctcattcctgtaatcctagcacttgggaggccgaggtgggtggatcacctgaggtcaggagttggagaccagccaggccaacgtggtgaaacccagtctctactaaaaatacaaaaattagttgggcatggtggctcatgcctgtaatcccagctacttgggaggccgaggcaggagaataacttgaaaccaggaggcagaggttgcagtgagctgagatcatgccactgcactccaggctgggcaacagagtgagactctgtctcaaaaga

SEQ ID NO: 1439 - DNA, 4001 bp, Homo sapiens
cataccatatggtaccagatataacatatataattggtgtttatttattttacagattcaaatgcattacatttatttatttatttattataaagtcaaccaatgaaaacaacacagttgtttgcatgacaacaaatttgaaactagcggctagaatgccagtgcagacttaagcttcagcatccggccaagttgttgctgtgtttgtatttgtacagtattgagaaagtcctgattcagaccaataagtggttggaaatgctaaaaggttttttgttttggtttgttttaaactaaaggccttacaatctcaagacgctctttgatggaacagatcacaggggaagccttattctgagctttgctttaaaaaaatctgcagcacaagctagtggccttcaagctgctaaaatgtccacctaatacattagagtgagttgggttttattacacatttttaattgtttaaaacatagtccgaagaagaaagaaaataaattggattcacatgtgtgcagactccctgaaacatggggcttggggaagctagtttggaaatccctgacccccttgagtaaggtccagactccttaacatgatccccaaggccctctgtgggctcttccacatccctccagctcttcttccaacaatcctgcattcttcattcagtacttattcaggaacacagtcctgagcttcagagacatctgcatgacttttgcctgtcctgtttccctctccctgggaaactccacctactcaggctttaagatcaggatacgtgccacttctacaaagctttccccagtgtgatgtcactactctactccccccccaactcccctaggctctcatctctggagcctccatcattgtgcagtgagctcctgaggcagggactcaggttatttaattcttcaatccccactcttgagcagagcttggaggtgctaattgaatgattgctgatagggtggacctgttggggaagggttcttggagggaagcagcaaattgctttaagatcaagctggagctctttggaggaccgctgtgggccaacctctattctcggttttctcctcaagctctgagatctgggaagttggagacagcaaggtccaggggcagaccagggcatcatcaacttgtttgatggcagagaggagagagctcctctgtgaggtcccagacggttgacaccaccacagggtcgtggggatgttaatgcccactgcaaggggagcagaacccgagctggggggcagagtccagcgctgggagcctgcggccaggggcgccgatcgccccccagcgcagagtgtggatcccagtgcctggagagagcagctccctttccttaggacgcggggagcgcactgcccccagcccagggcccaggacccagagccagaccccaaacgcagagtctcaggtccggagcccgatgcccagatggcggagaccggagcgcacagccaggaaccgggttcccaaagtctggttacccgcgcctggggcgcttctggaagcgctgcggaccagcttcgccaacaagtgcaatccgcgctccccggcggcccgagtggggaggggctggggctgcgggcctctagctgggccctgatgacagcatgggggagggggagcctggcgtggaacccgagtcccggtaaaaaaatacaccagagcagagctcccaaaataaacccgagcccgcgccagctgcagggcgcattctggggctgaggagctgcgtcccctcccagaggggcgccacgggtcccttcccaagagacttatgacccctcctccggggtaacccttcccccgtcccccgcatacccgtgcattgcttttaccgatttgggtttcttcttgggcgcgaggttgtcgtagaaaatcttggcttcctcccagaccggggccgcagcggtctccgctcctggcccgggctcgcggggctcctggggctcccggggctgcccaggttccatgctccggctctgacccggcccggccagagcaggcggcggcgtagacgcggaggtggctggggctgggctgcaggagggaggcgagtcccggcgagggaagggggcgggcagcggcgaggaggctgtgcgtgtgagctgggctccccgcccgccgggcggggggaggtcacactggccctctcggtcgcccgtgtgtcgctgccgctgctgctgctactgctgtacggtatgagggatagctgggctctccttccccgaccgacccacgccagcagccggttgggtggtgaggggggctctctggctctctgggtttgtgggctgcagcggattggggattgcgaaaatgatgttcttcgcaggcgctgcagggcgcggagacaggagaggcctgacaactttttttttcccccaggatagtgatccccaaaggacaaaatgaaaagctagccgctcccctcccaaaagctagctgcccatctttcctttaggagctaggaccctgggatcctgacgatgtccccttccctccgaggccagtccatccggcagacgggcaggaggtgatgcatggatggctcctctcactagcagaagcctgctcccagcgggagctcagtgaagggcccaacccggcagctcctccacaccacctaggaggggcccttgaagtccatgttgagaccaggctcgggtggtctcaggtcgagaccttggcctggggtggggacccaggccagagagactcccagggactctgaacccgaattcttgctggccctttggtggtcagcagagggcgcgcattcctaggcccccacctgcccagcttggggtgatttgttataggccatgaaggggctggatagagggagggcagaagaggggcctcggaactaccatcctggaattccagggtgttgtccctcttgatgcagagctctgtactagtctcagggtgcagacacaaatgtcacccatcccaaggtacaggccaggaagcagacagcctctctcagaggtgtgcatgggtgggtgggagaagcaggagaaaacactggcttagctaggagggcctctgactggggaggtgagggggctacagaatggagtgatcccctcagcctccaccaggtcctgggaggaataaaccaacccttgtgtgggaggaagggaaaaatcataataaaatgttaggattgggggaagtgtgtttagacttacttctagaagattgtttccagagatggcccaaaaacctcttccatcctgcctgtcctttggaaatgtgactttgacattcctcccattcagaggtggagtccagtctgagctggccctgtgacttgctttgaccaattgaatggagtagaagtggtgctctgtggtttccaagcttacgtcttaagaggccttgcagattccatttttgccctcttgggagccagctactatgtaaataagtctggactatcctgctggaaaggccacgtagtgagacagataggacctggaggataagaagctagcgacagcccaggtgactataggcacaattgacagacatgtgaatgaggccatcctggctgtcccagccccagctcagctcccagtggagtgcagctatgtgggtgacgccagccaacacaacctgaagcagtaaaaccttccagctgagcccagccaactcacagaatcatcaaaaataataaattgttgtttcaggcaccaagttttggggtagcttgttacactgcaataaataattgaaactctaggaatgaggtcaattattctcaggtgcctcatggagaagaatgatgaagtaactcaggaagaatacatagagtggttacttggatggaggtgggcacttcacacaaaagtgagccacccccatgctgtccagcggcctttaatctgtgtgattggcttgaaaagatgacctgggccaagcagatttgtctttctcaggaatttggaattgggaaatgggctggg

SEQ ID NO: 1440 - DNA, 4001 bp, Homo sapiens
atcaaccgattaatatgatgccagtaaagaatatgagagaatattccaaacagcatccctacaccaagtcttcctctttcaatttccctttctccccagctgcacaacatgggatagtaatgttttaatctagcaccaataaaggcgattaaaagaagggacttcaaaagctctcgatgtggccaccagatccccaaggccggcaatagggcaagtgtttttttgttttttttgtttgcttttccccaaacaaatataattggcgaaagaaagaaaaaataacgacaagccgcctgagcgatgtgtgtggccaggtgtgcgtgagagagggagagcgcggggcccctgtcagtcggcggatggaggctcagaccccacgcctgggctccggacacaacaagaggacgcatcaccggcccggggcgcacccccgggaagacttgtgtgtgggtgtgagcgtgtgccgctgtgtgtgcgcgtagggctccgcgcgctgcctcctcggggcgctttacaaagttcctcgcccacccggagccttccctcccgcctgtgcatcgcagcgggtggggcggggggcggcggggggtggggaaacccgggggagaggggcacgggcgagaggctcgggtcgcagtaggagaggcgagccgcaggcacttaccgtgtggctcgtttgcccttgcgccgggcgggagccgagccgacggcgcggggcggcggccctgcgcagccagcctggtccgcctcgggcggcggccgcagcagcggagcccgcgggcggcgtacgggcggagggcggcagctcccgcggagcctcctccccaggcgggagcgggcggagcgggaggggtgggcgtgaggacccgagccgccgccaccgccgcagcccggggattccgatcgcgcccggccgccggcgggagaggaccccgaggaccgagaacccagcgccggcccgccactccccgccgcttaattaccttcgcctccgcccccggggggagcctcctgcaagtcgccccctctcggagcccgcacccagagggggaattccttcccgttgacgtcctcttccgaaatgcaaaagatcagtgactttgacaggtagatgagggggagggagtaagggtgggcggagaggaagagaggatgagaaaggtgcctctccctccaaaaatatagtgatattaataatgagatctcagccttcggaggtcgtgccagcccagtcccctgctcgccggctctcctccgcgcctcctcgctccgctgcctctgacacttctcgccttaaacttttactgagggatattttttcttttttctatttctatttcttttttttttcctctttttttttttttcaagccgcaggacgattttctggttcccggggatcagaaccagcggccaggcggttctatgccgcttggcaccgctttcattttatttcagatgaagacgttgagcttagtcagaaggggcataaatcaggacaattagcattggcgccaagaagatcctctaataccaatttcgcccgggtttccttcgcgcattcctccactcaagtcagaaatgtcactgcacatagcactgatggcagtgagacgcgacgcacccaaagtccgtttgatgaaatatacatggcccacgacgcttctggattgcggctcccggactccccgcccccaccagcggctcccggccgggaccctgctccgagcgggcagcgagctcctggcaaacttaggggccagtgccaattaaagagtgagcgcgagagccggaaagaggagcggcaaagaagcaagcccggggaagccgcagccctcggaggggtggcatgtacgtttcacttaaaaagcagatcttcttctgcaactgccagcaagtggaaggatagcaaaccttatactacctcgagacctgtgcgctccgagcggtcctaactccgtcccgctcgctgttgctgttgctggtgctgctccggctgcagctgctgccgctccacgacctcggggcgctgaggcaacagggccccctccctctactccccatcccccccggctcctccacagaagcgccgtttccagtaactcctcgtgtacctcccacttctgccgccgtccatcccacccctctctcttctgtcccctccccaaaccgttcccaagcacacccttcgccgctggaagtgatcacaatgttgtttttcaacaagcacttcctttgcccggaggcccctacagccctagactggaaactcctcctttagaaattcattcccctttaaaaagttgaagttcaagggagagctgcgcatttcaggcttccttgccttttctaagagaaagacaaatgctccgatgctccaggcttcattccccaccaaggcgggctcagactcacctgggatcactcttagctacacattaacgtcaaacagaaacaaatccgaatttagataagatagggagacttccattagaaagaaagactattgcaacagggaaaacgctctgatctcagaaatctgcaaacctctcaaaaccaaacagaaatcggccttttttttctatatatataagggggagcaagcaataggcaaagccaagtggatgggggaaacaactcacttcaagaccctcttggttgaacaagaaatgtgtctctgtggtccaagaatttggaagataagctaacaatggtgaatgtttcacattttagttcttgctcagatttggggggcaagctaaattccagggacctgctggagagaagcctgactcatgtttggtcaaggcaaagtggcgggtggggggggggtggaagaaatgggcaattgtgaacacttagtcactatgtgtcccacaattaaggcaggaggctgagtaattgggtcatttttctgtgatgactgggggtggtgtggtaaaaggatggatgggggagaagtttgttgagttgggcctataaccaggccctccttggccctgggcagccaggaagtgggcagggatttcaggcacccccagccttccctctaacacctaagaggccacaataagtcgccttcggaatctctgagtgcaggaatctgggattcatgtgctttcctctttcccacctttgtcctgtagtgctgacattgcaaaaaagagttacctgcagggctgaaactcctaccaagggttcttagacagtggccaagtctggctcttccccctgtctctagccatgctcctccaggtttaaaacatactgactatatggagatgttactcaccacctaatcctccttcacaggcccttagatcccagttctttctatgggagccctttgcaataggatataataaacaataccaagagtggccttcttatttctcgttggccccttggcctagatcctgaaatacagacagttctcagcctttcctctctcttgcccttctctctcaagccaagaaagcctttctgaactctcatcctctgctttatctggtcatttaaggcccttctgtagtaaaaataaaataaatctatgcagagattagagaactctcttctggaatataccaagatctttgtgattttggctcccaacctggaaaaatacttgttttcatctgtcaaaatcttggaactgacctcccttcctctcttcctgtatcatccctcattcccaggattcctttgactatgaggcaatcccaagtaagtgtgatatgtaaatgggaacctctccagttaggtaacacctcccactacaggagtgggagagtctttcagaggtgagtttttctgtggaacatgtgctctgacctttgcagaagctcagtgaatcaccaactaaacatgtggatctaaactcaaggaagtaaatcagaatcatcagagacttttcaacattaaaaccccttcccttccagatcttgttctctcctccagcagcaatcaggtggtaaggactttttctccaaaaaagcagttta

SEQ ID NO: 1441 - DNA, 4001 bp, Homo sapiens
gtaatgttttaatctagcaccaataaaggcgattaaaagaagggacttcaaaagctctcgatgtggccaccagatccccaaggccggcaatagggcaagtgtttttttgttttttttgtttgcttttccccaaacaaatataattggcgaaagaaagaaaaaataacgacaagccgcctgagcgatgtgtgtggccaggtgtgcgtgagagagggagagcgcggggcccctgtcagtcggcggatggaggctcagaccccacgcctgggctccggacacaacaagaggacgcatcaccggcccggggcgcacccccgggaagacttgtgtgtgggtgtgagcgtgtgccgctgtgtgtgcgcgtagggctccgcgcgctgcctcctcggggcgctttacaaagttcctcgcccacccggagccttccctcccgcctgtgcatcgcagcgggtggggcggggggcggcggggggtggggaaacccgggggagaggggcacgggcgagaggctcgggtcgcagtaggagaggcgagccgcaggcacttaccgtgtggctcgtttgcccttgcgccgggcgggagccgagccgacggcgcggggcggcggccctgcgcagccagcctggtccgcctcgggcggcggccgcagcagcggagcccgcgggcggcgtacgggcggagggcggcagctcccgcggagcctcctccccaggcgggagcgggcggagcgggaggggtgggcgtgaggacccgagccgccgccaccgccgcagcccggggattccgatcgcgcccggccgccggcgggagaggaccccgaggaccgagaacccagcgccggcccgccactccccgccgcttaattaccttcgcctccgcccccggggggagcctcctgcaagtcgccccctctcggagcccgcacccagagggggaattccttcccgttgacgtcctcttccgaaatgcaaaagatcagtgactttgacaggtagatgagggggagggagtaagggtgggcggagaggaagagaggatgagaaaggtgcctctccctccaaaaatatagtgatattaataatgagatctcagccttcggaggtcgtgccagcccagtcccctgctcgccggctctcctccgcgcctcctcgctccgctgcctctgacacttctcgccttaaacttttactgagggatattttttcttttttctatttctatttcttttttttttcctctttttttttttttcaagccgcaggacgattttctggttcccggggatcagaaccagcggccaggcggttctatgccgcttggcaccgctttcattttatttcagatgaagacgttgagcttagtcagaaggggcataaatcaggacaattagcattggcgccaagaagatcctctaataccaatttcgcccgggtttccttcgcgcattcctccactcaagtcagaaatgtcactgcacatagcactgatggcagtgagacgcgacgcacccaaagtccgtttgatgaaatatacatggcccacgacgcttctggattgcggctcccggactccccgcccccaccagcggctcccggccgggaccctgctccgagcgggcagcgagctcctggcaaacttaggggccagtgccaattaaagagtgagcgcgagagccggaaagaggagcggcaaagaagcaagcccggggaagccgcagccctcggaggggtggcatgtacgtttcacttaaaaagcagatcttcttctgcaactgccagcaagtggaaggatagcaaaccttatactacctcgagacctgtgcgctccgagcggtcctaactccgtcccgctcgctgttgctgttgctggtgctgctccggctgcagctgctgccgctccacgacctcggggcgctgaggcaacagggccccctccctctactccccatcccccccggctcctccacagaagcgccgtttccagtaactcctcgtgtacctcccacttctgccgccgtccatcccacccctctctcttctgtcccctccccaaaccgttcccaagcacacccttcgccgctggaagtgatcacaatgttgtttttcaacaagcacttcctttgcccggaggcccctacagccctagactggaaactcctcctttagaaattcattcccctttaaaaagttgaagttcaagggagagctgcgcatttcaggcttccttgccttttctaagagaaagacaaatgctccgatgctccaggcttcattccccaccaaggcgggctcagactcacctgggatcactcttagctacacattaacgtcaaacagaaacaaatccgaatttagataagatagggagacttccattagaaagaaagactattgcaacagggaaaacgctctgatctcagaaatctgcaaacctctcaaaaccaaacagaaatcggccttttttttctatatatataagggggagcaagcaataggcaaagccaagtggatgggggaaacaactcacttcaagaccctcttggttgaacaagaaatgtgtctctgtggtccaagaatttggaagataagctaacaatggtgaatgtttcacattttagttcttgctcagatttggggggcaagctaaattccagggacctgctggagagaagcctgactcatgtttggtcaaggcaaagtggcgggtggggggggggtggaagaaatgggcaattgtgaacacttagtcactatgtgtcccacaattaaggcaggaggctgagtaattgggtcatttttctgtgatgactgggggtggtgtggtaaaaggatggatgggggagaagtttgttgagttgggcctataaccaggccctccttggccctgggcagccaggaagtgggcagggatttcaggcacccccagccttccctctaacacctaagaggccacaataagtcgccttcggaatctctgagtgcaggaatctgggattcatgtgctttcctctttcccacctttgtcctgtagtgctgacattgcaaaaaagagttacctgcagggctgaaactcctaccaagggttcttagacagtggccaagtctggctcttccccctgtctctagccatgctcctccaggtttaaaacatactgactatatggagatgttactcaccacctaatcctccttcacaggcccttagatcccagttctttctatgggagccctttgcaataggatataataaacaataccaagagtggccttcttatttctcgttggccccttggcctagatcctgaaatacagacagttctcagcctttcctctctcttgcccttctctctcaagccaagaaagcctttctgaactctcatcctctgctttatctggtcatttaaggcccttctgtagtaaaaataaaataaatctatgcagagattagagaactctcttctggaatataccaagatctttgtgattttggctcccaacctggaaaaatacttgttttcatctgtcaaaatcttggaactgacctcccttcctctcttcctgtatcatccctcattcccaggattcctttgactatgaggcaatcccaagtaagtgtgatatgtaaatgggaacctctccagttaggtaacacctcccactacaggagtgggagagtctttcagaggtgagtttttctgtggaacatgtgctctgacctttgcagaagctcagtgaatcaccaactaaacatgtggatctaaactcaaggaagtaaatcagaatcatcagagacttttcaacattaaaaccccttcccttccagatcttgttctctcctccagcagcaatcaggtggtaaggactttttctccaaaaaagcagtttaagtggatttgatatacttccccaaactaacgtgcatatattaaaccagctttcctcaatatacctttgcatatttgtttatatgatatacactgatcagaaattgactttagagtt

SEQ ID NO: 1442 - DNA, 4001 bp, Homo sapiens
gtgggaagatggtttgagcctggaaggtggaggttgcagtgagccaagattgtgccactgcactccaacctgggcaacagagagaggccctgtctcaataagaagagggaaaaaaaagatgggtaaggtggctcacacttataatcccagtattttgggaggcccagatgggaggatcacttgaggctaggagttggagatcagcctgggcaacataacaagagacaggtctctacaaaaaaaaaaaaatacccgggtgtggtggcatgcgcttgtagatccagctattcaggaggttgaagtgggaggatcacttaagcccaggagtttgagaatgcagtgagctataactgtttcactgcactccagcctgggtgacaaagcaagatcctgtctctaaaataaataaataaatggaaaagaaatcatagattactatgtggctctgttgtgattgtctttacatggccataatactgtaaacattgactaatgaaaattacgctgtaactacattaagaagagaaggagaaaagacaaaggtgcgtgggtttgaggacaggtttaagagagctacactgtagaattatttgagtctttcaactacgtgtaggtaagactttgataaagcagaaacaagaaccaccatcaatacaatcacggtaacaggacacctccattaataaaacacacagttgtcttggggtcagcctgctgagtatcaaactgcattccaagtttcaaataaaggattgacaaaccaactttcagaaaacagttctttgcaatacttaggagtgactttagatagcaggcatttctcaaaccaccctcctcctcctcaccccctgctccccaactcccccatccaatgcctgacaaaatcccaaagtctgcaatattagctgtagcctttgctacttacaactaaacataatcattaaaataaagtgaaagagaattctagatccagggttacagcctttgatatctgaacccacactaaacttcaaaattagatttgccttgcaaaggagctgaagaaatcactttctccactcttagcccatctatctttttttagcctatctgatgcagcctacctgtcctttttagtaatgcttgatacatgggtagcgccttggtttaaaagcacctcctcctacacctctcatctgacctcaacgctatcctgcttctcagatgagaactccacaggccacagggttgagggatctgacagacatcaggaggggacagcgacaggaacaagcaagagtgtctgagaagggctcctgtaggtaccaaagcttctccacctctggcctcagctgtggagggaattcgtggggatggagatggggatgggggtggggggatgaacttagatgggaaagaaaggttacaacttcagtttcgctgtcctccaactaaaatttaccattttttttttgcacgatcaatgtagcaaagacccacagtaaggaaatacctgtgactatcaacagaaattagacatctccacttcacatcgcggttgccgcagatctcttgaaataccatttgtgcagaccacaacgtcaacactacagtaggagttaccgctgccgctggcccctgcggtttctgcccttcatcaagaagccagtctaggaccccctcacaagtgtgttctaatcctttaggccctgtgtcttttaaatcacgttttccgggaaggagtacaaactcttcagactaccaagcccgccatttaaattgggaacttcagaggccggagccctggagccggagaccctccccgacagcacaaggtcgcccgcagcccgcgcgcccccaccccctcgacctcttggaggtggggatcccctcagggttacctgggggccccgttaggaacacgtgccgggccatactggtgggcgggggtaggggttgcggtcaggggagcagtccaggttggggtcgcaattcaggtcaggtccggaccagggtcgcgactcaggacccgcccaccgcgtgtcgcaggccccgcccccaagcggtgctttgaccggaagcaccgccctcaagaccacgcatgcgccttctcccgagtccccggtccgcgcctgcgcattcagccctcggcattggcgcctgtgccgcggcagttcctataggcggagcgggttgtacggtctcttaagtttcattctgggttcagggcttttgtggggtatttgcagagataagtgcgtgagaacgtcagttattaaactattgctgcttcaagtcagcgccatcacccaagttctgccccttgactccggacctaggagctgaaattgcccaaggctgccgggacagcccttttgtagaaggtttgtgacctggaagcattcctcaaagggggatgccatgttaatgactccaactttgttctcaaacattcctgcagaatagaatcagctggggagttttaaacttgctctgatgcctgggtttcacctgcagtaatagggagtgtcagaagacaaaattacaagtttagtttaaagatctaattggcttatatttaggatctagaatcgagaaatagatcatttcataaagcaaatagagtgttccaatgagttgtgcagaggaggttggctttatgggcaaaaaaaggctgaagaacaaaacaaagagtgggtatttcaaagttactttccttatagggttaaaacagattggacttcgttattgtactgactcaggttaactacaatctcctgttttttgggaaaacgggcctgtttcaaagttcagtttggttacatggcacttggcacaagtgactccattctggtttggtctagtctgctaggacctagtgcaggaggttagtccaaaacaatggcctcccataaatcttgtttaacatgagtaattggtcttgagcgagtcttgagcacctgtattcttttttcttctttctaaactccaggaagttcctgaagtgcgctagggttgagaaccactggtgtaggcaggcttcccgtcctcagccatgcataggacgcccagttttccctctttactttcacaccaaagtgtataaagatctcctcttgcaaagaattaaatagcttctccgtctcactttaccactgcaagtgttccggccaacgaatgacgtggcagtggccttgggccacatttacctgtaaactctttcagtctaacatgtgtacagcttaatttgtagtcagtcgttccccatcctggctgagaaagcagttcagtgagtgctcaacttaattggtttctgcccacacatggacctcttggtttccctttagcctgagacatatgccagtccaatgattatctaaaaaaacaaagttggatttgtaaaatatagctgtcatcaccatcatttctgcaacatttgtaatgctctattattataacagtatactatttattatcccaactgttaatgtagggccttccaccttgatttattttgcagtccatatatgttgaatacagtgaaaagttgatatagtaaagtaaattcataggaggagcttccaaaaaaaaggaaaaaagtatatgtatctcttgtatcaaaagtactcgttttaaatgttaatcagatagcattttccatcactgaaaagcagtttggatttgcaaggctcaccggaagttgggttcttttgttttgttgctgtgcctggaattctggcatcagtttaagtagctcaaagatacatggaattcagatatggtgaatcaacgtctcacaaaacagaaaaaaagactccatagttgaatgtactttatccatggaaaatgaattatttggatggtagttccacggatatcttcttgttagaaaattcattgatttgatgcttaatttctacagtttcctgtatgtgttattaggtaacaataacaaaaaattaaatagcttatatctcttagagattaacaacaaaagaagatggcataaattgaaacaaatt

SEQ ID NO: 1443 - DNA, 4001 bp, Homo sapiens
gaatcccttgaacctgggaggcggaagttgcagtgagctgagattgtgccactgcagtccagcctgggtgacagagctagactctgtctcaaaaaaaaaaaaaaaaaagatgtcaacactgatgttattaatgacaactgctgatagtgttgatactaatgatgacctgcttagctggaggaattctctttccttcctccaatattgcctggttttgccctaactcagctccattatctgctgaatgatggaagccaggccccctcctctctaaccccttgtcttatagatttctttattattattactattattattattattttaaaaatagtgatgggctctcactatgttacccagggctgatcatgaactcctgggctcaagcgattctctcgcctgagcctcccaaagtactgggattacaagcatgagccaccatgcccagactcatagatttcacatgtcctcaaaaagtccttccagaagtctgacccacatccttcctgttgcagccctgccccctcccttcctcatgtctcctcaaagcatgatccataagcaccttgtgtggcttatccttgaggttgacatccccattcccactgctcagaacaggccaagaggcagagtgggagattttccagagagaaagaaatagaagccaagagagatgagagagagagagagagagagagagagaaagggaagttctagtttggggtgagggggcagagaaagaatctggagggatgaaggtcaggcagcagtaagggcttcctaacacctaaacacagagtgacacagataccccccaccgctataccaccgctatctacagctgcgtggcttccgggggtgggacaatcgtcttaaggctttccatgacgtgagtcctcgccagaactaaggctgtgggtaaggcgacatttcctgcccccggggccagggtgagaggagagatgatgagttgctgagtgtgcacacctttccggaacacatacacacaccctgctctgggatcccttgtgaggctgccctcatggagttccccctggcccagatatgtccccaaggtaagtgtgaagttgaaggatatgggtgggagggggcacaaagacccccatccccctgccctccctcctgggcttgagctcccacttcagggatgaggggccccaccctaagccagagctggcaaagctgattggcagggtgaccacaaccctgcctggggctccatgcccactcatccctgaggataaaggtgacagggtttgttgagggcttctcagagaggagagaggagggagcaggaggatgaagggagaaggaggcagaagatcctggaccagaagaagggcctgccctgaagtgatctgcctccctgaccatccgaaggccagcctgactcccagcctctccttctaggcacctggtgtccctcacaacctcctctggcagcattagccccccatgccgccttggctacttaacctcatgcctgagaaactcccctgctgcccttctgcgtttttcctgtcgttaagactgtcccagccctccagatcccctgagcctgggaggaggggtgggaggcagagacagacatagttcctctctgagaaaccccggcagccctctttgtgctcacagggagtcacgaagcccccatcccaaccttcagcaccttccagatcacagacatgacccgcaggagctgccagaacctgggctacactgcggtgagtggaaacctggggcggcagcgtggtgcagctccctcatctctcccaccctcccatggggaaggacttgcagatggacaaaggccactccaagagaaggcaggaatgatccgggtctgccaacgggctggggcacagagagagagaacgaaaatgaggagtacctccttcatgcgccgagttgcccactcactcccttactgctcctaggccctctggaagctcaggctgagtccgcagatgaccagggtgcagtgcattgagtcccagaagcaggcatctgcactctgtgtcagtgaccatttgcccagtgcattccacattcccgtctcagtccttctctcctgcccagtcaataattttccctgcgaactaggtcagtccctcatattatgaagtaagccctccctcattctggcctctagggtgacttcctgcatcatgtttcttcatcctccaggccagggaatgactctgtccatctggaaggctgtgctgcctttcccgcccctcctagagcacagtgtgacagctcactgctgctggattaaaagccctcaggacccagagggcaaaggaaggagagtctctggaagccagaacagctggagctgaagaagggatttaagttagactttaggaaggactttctgggcaattgtaccctaaaatagacaggagaggctgggtatgaggaaaagaaggtggcaggtggatcaaagtcaggagaaggcccactcatcatgctgcttccccctccttgaactcttccctgatccaggcatctccccaggccccggaggctgcctccaacacagggaatgctgagagggcagaggaggtgcctggagaaggaagcctgttcctgcaggccgagacccgggcttggttccagaagacccaggcccactggctcctgcagcacggggcagcccctgcctggttccatggcttcatcacccggaggtgagtcatggaggaggaaattggcccagacaggggcagggcaagtcctgggtctgggtcctgccacctgccaggaatagatgaaggctcccacttctaccagtctggagtagatggaggcgcccactccaggctcccactcccagagttttcctagcctttcactgaggcatctctccaggggagatcattggagaggctccagtccagccctctgtgtacctcagcttcccctctctaggccccattatcctcctgtccctaaggcctcgaatgctggtattttccacctctctctccctccaggcttactccatctttatctcccagccctctcttcttccacccttgcagaatctccctcctccatttctcagcctcatttctccctaactctttgttcacctcctcagttcagctttgacttctgaaatctggaagtccaactactttcccatccctgtagctgcagtagcagcccctgcaggctgccctttcaggatgaggccaggggaggatgcgggggtctcctgaatgggacccctggcccctgtccacgcctaatccctgcagcgggagagcagcgcccacgtgctctctctccccatctccgccctagcctttctctagccgctccagcatgcttgcttgggggtaggggttcctcgtgagagccggggagacagaggcgaggctggaagtgtcagagcagggttcggccccctctctccgtcacccacagggaggcagagaggctgctggagcccaagcctcaggggtgctacttggtgcggttcagcgagagcgcggtgaccttcgtgctgacttacaggtgaggggcgaggccccgcgccgggcgacacaaggcggggctcgggaggggcggggcttgggtctgatcccgtgaggagccgggctcttagctcattccccgggctgctgaaggtggggatcacgcctctcgctggtgaccctggccgaggagcgggagatagtctgatccctaacggcgccctccaggagccggacttgctgccgccacttcctgctggcccagctcagggacgggcgccacgtggtgctgggcgaggacagcgcccacgcgcggctgcaggacctgctgctgcactacaccgcgcacccgctcagcccctacggggagacgctcaccgagcccctcgcccgacaggtacgcgccccagaccctgaccagagagcccagggtctcgggccagcgcccctcccgctcagagcccaggcgcaggacgcggcaccaggcactttctc

SEQ ID NO: 1444 - DNA, 4001 bp, Homo sapiens
gaggcctataaagtaacctccactgactccgagggaggccaagtccctattctacccaccccccagcccctgcccagagggtttcaagctgtagggacccagggagggggtgagaatgcagtgggctggcagggtgtgtgggagctgtcaggccagcgtgctcaaagctgcctcaaagctgcctcattcgtttggattcataatcaatctgtctattcgagtccattatctcctcgttagctctgcgggtgagtgaggagggagggggctgtgcaggcagtggggagggggatgtcaggctgcagccccacccagggggacatctcagctcaccaccctacatgcttgctagtccccagttctggcctgtccactccccctaccactcccatccctaccctgctggacccacttggggcttggaaagagttgggaaacacgagccctgatggggagcactcaggagtctggaccccaatctgaaggcccagggtgatgagagaactggactaggactggcaacctgtctctcatgccccctcccatcatgcagagacctaggcctagaccaagacaaggccatctcctctactcctggtctccctagagctattagagagagagattgagtgccttcccgttaattaccatgagatacccaaggaactcagtgccaattactgcaagctgctcaagtaacttccagacagtgatgatcctcacctcggataccttccagcccatcacagcacaaggccaaggttccttgtccaccctcgaaaccccaggccacaggaggaggattttctagcagttctcccctcttctagatgtcttgctggccatgatagccatatgtaatattcaagtattttccagccatcaccatatgatgcctgagtacctccaggccagtcattaccgcatactcccataggtttcaccagctgctaaaaagtacttgagtattttgtaaccaattcctgcagaatgtcagagtcctgcagaatgctgaagattcctcccagcttcgtgtaccaaagggaggagggtctctcagcaagggccctgactccccgccccaggtagagagacaaggttggagagggagatgggagtggggagagaaaatccaggagggggtcccatttcccagatccaaatcaacgggttctgggggaaggaatggtaaaaatggaaagaggagagctcaaccactcagctcctcaccgcctcccaccaatgccagccagctcaatccccaattccagaagaaaagctagggttgcctcctcataacaagaaagtgggcgggggctggcttgcccctagaaaaggaaaaaggcagtaagggtgacaaactggggacttctctgctggtaaccatccttctctgtaggacagagcaggggcttctggctgagctccagaaagcgccttctagacggctaggctctctcagacctggtccacggagatttcccccttcgatctccctgaagccggcggcccagctgccctgaacactaggggacatccaggcactgaccataaagcttgctagggcagcggcggctgcggaggaacgcccgggcagcgccgaaggctgcgtggtgccagccttccgccgtgctcgtcctgcctgaccagcaaacaagcagcgagtccgcgccctcggggcactgcaatgcctgcctgtccccgcgcccccccaccgcccgccggacactcacagctcagtcaggttctctgcgccgggcaggtggtggaggctatccagggccccatcccgggtgcatcgcagtcccgaggagccgtgggggcagcaggcatcggggcagggtgcggcgcccgcagatgccagtatcagccaagccagcaggctgcccggccccgcagcccagctgtgccagccaagctgcccgcgccgtccgcctcgcagcatcgcggcggcgcccgcctcgctcaggcggggcagccgtctgtgcgctcccagctgcagctgccaggcctcccccgacatgtgcgctgggcggtgttaaagacccagccgccaggaaagggcggagccagcggcccccgcccggccccgccttgcccctcttctccacccgcttcctactctctgacgcccccccctctgccccctcccctgttaggggcccccagcgtcagccttctccccgaggatccgcctcagctccggcagacgctgaggggccgcagcagaacgcctcggaggtgtctgctgaggccggaggtgggaagctgatacgttatttctctcagcttaaagcagctgcatttttacatttggggaggagggaagatgactgcgttgaggaaaggttgctgtccaggtcatcctagccagccccaggctcagcgctccatcctcgcggcgcgcgtgcctaggggagtgagcatgtcacttggagtaagttaggtagaacattctccgaactctaggaagaaaacgaaaaggactaccaaaggatcaatcgcagaacctggggaggaagacacagacggggcagagaaagggaaggggtcgcctaatccggccgaagggagtccggagagccaagaccgcgcctccaagagaagccacagggtggcgcgagaagcccgcgcgcaaaggcgcgagctccccgcccgcgctgggtgcctgggggtgcgatctgcagcccccagtgagcaacgcctcaggtctcagcttcagtccctgaccccggccagccagcgccggccccggggcaggatagggcaaggcagggcagggctgacatcgatcgcctccctgacaagagcatcgatttattcgtgaagaaattaatagatcttctcttagctcctcggacgcaggagccgcccgcgggtggagctgaggaccgcgcaccttggaggccgagcacctggaaagccccgggatccccagcacccagggcagcagaaggctggtcccaacccctcccaccgcgcaagcctccgtggctgcactaacccatccgtctcaagctggggagagcgaagggaagaggggtgtctcttggcggggagacaggcaaggccccagggagcgggggaaggacgacctcctagaggctcacggttctctccgccaaggccccagcacggatggccccccaagtccccgagacagggacacacagaccgaccgagcagcctgagctcaagaaggtgaccagacggaggcagagccctacacagtgatcgccttcttcctcgggatcttggtcagaaccaagggactaggcggtgacggagcctggcgctaaggggtctccaaagaggacaaggaggcctcctaggaggctgagaggggctcccagaggccaagggctgtccacgttctcccgggtcgaggctgccagaagttaccccgcagatgtcaaggcaccgggaagcagaatctagacacagcgctccccagaagcccgggcgcgctggctgcccctccggcggtgcagccccacttggaagaagcctgtggtggggacaaagggttggcgggagccgctgcagccgcagcgggatttgaggaagctcagttcttggcccaccctccccccgtattttggccttatttccccaacagacctgtcctcccctcagttgtcaggctaaatattttgacttggcgggaggggtggagagaacggaaaggtccctgcgaaccaatctgtttaggcggggggcggggagggcgggagctgggcgcggcccctgcgtgccggccctgggaaggaccgcagccagcactgtcagctggcgctggggggccgcgcgcccggagggatccagggagactctccctgcggagtcccacgcgccccgggacccccgctgccctccttgggagcggtccccagcctgctgctccgccctcagggttggctggcctctcggcctgccttttgctcagaaccctgtgtcattttctccctctggaggcccgagactctccctgtcactgtctg

SEQ ID NO: 1445 - DNA, 4001 bp, Homo sapiens
aggaaaaacatactcggtcctattgatggggccataatctacccctttctccaacatccactctccttcaccaatgaaatgacttcttgaatttcaaaccagctactggctgcaaaagcaaacacaatctggggaagtaactgctgatgtagccaatagggcaaaccatacacacacacacacacacacacacacaccccctcacaaccagcacccaactggatttggcaaaacataataatgcctaaaccacctgctctaaaaggcttgttaaaatatacattatatggccctatcctagaccttcagaataaattactctgggtgtggaaccagagaatgtaagtattttaaacaaacatcccaggtgatccttacgtactttaaactcaagtttgagaaccagttaaccactgctaactaacttttgacaaatttgccatcctttctgggctgccctttccagaaattctcactgcaagttctttttttgtttgtttcgttttgttttgttttgttttgtttttgagacggagtctcgctctgttgcccaggctggagtgcagtggcacgatctcggctcactgcaagctccgcctcctgggttcaggccattctcctgcctcagcctcccgagtagctgggactacaggcgtccgccaccacgcccggctaattttttgtatttttagtagagacggggtttcactgtgttagccaggatggtctcgatctcctgacctcacgatccgcccgcctcggcctcccacagtgctgggattacaggcgtgagccaccgcgcccggctatctcaccgcaagttctatgtgttaggagcaatataagttcatatttcgatcttattcaatcctcacagcagcttgtgaggcaggctgtgttttctacagttctgcaaaaggggaaacaaagtacagagatgaaggaaattgcccaaggtcacacagactgctagactcctacgctcgcaccaaagtaacagggcatgttcttgaaaaggcccccaaaccgaaaggtgtctctggtacagtggacctggtttcacattttccagaatcaaaaactcatcataatgaaatttcaactaaattttagagctggaaaggacctaaatgtcaaaacccaccccgtgccagagctccagtgtgctgggttgccagattcttggagttggggaaatccacacctcatccattcattcaaccacacacatatttaccaaatacctattaagatggggtgccttctacttcctctttccattgcactctattgaacagtcttttcccagcaaaactcaacttaagtcccatccatcttatcccaggacacgacacgattcgtttttccgcgccaactatccatagcctcccttttatttggcaatcatcacagcagtacggtgttgctggctggggttcgcaagtttgcgaccactgtccctgcaatcacggactgacacatctgccagggacaccccgcagtagccccgcaagctcagcgcggtaaagaccacgctggcctctccgccgagcaacgagcgagccgccgcccgccctcctccgctccctgccggcggccaagccggagcccgccccgcgccgcgagagggagccgcactcaccaggcgccccgagctctcccgcgccttcttcaccttcccgtaggtgcctttgcccagggtctccaggaactcgtagcggtgccgcaggttgtgcttgtggtggtgccgcttcaccgcctgcttcttcattaggggcttgggcgacttgatcagcccttccgccagcggccgggctagctctgcggccgagggagtggggccggagcgccgcgcgaaaaccagcgactccatggcgagcaggaggtgagcaagggcggcaggggaatcagtaggctgtgcggggagggctgaagcgcggggcacaggtcccgcaccaggacggggagccacagcagtaccagagcgcgcagtaaagcacagcattccaagttgttataaacgccctgagcccgaggccctggacacgccccccggcgcccattggcctgctcgacggcggcgcgtgaccacggccgtccacattggctctccggggctccaggccccgcctcctccccctcggcgtggccgggaaaggtgtcaatggaacccgcccaccaggaatggggactaggggattccagcgaaggccgcctgaggcccagaagcttactctgagggcccttggagctgcacttgcctctgagtggcgcttggtcctgcttaatgccctgttgttttattgtactctgttctcagttggcaaggggcgatctgagggcactaaaggtcaccaaagtatttcttcatcctgagtaatttgcttgtcccaagccaaaatctataattgcttgaccacttcattgagtccataaaggagaaagggagctgggatggaacagaggcagaatccagcctagtgggagggttagtgcagagctgtcctatggttcgagttcacttgtcttcagttagatcaaccttacttggatattggaatccaatggccctggaaacttcttccttcttcctcaaagagggcttcttaggcgaatcgcttgaggtccaggagttcaagaccaacctagccaacatgacgaaatcccatctccactaaagatacaaaattagccgggcgtggtggtgcgcgcttgtaatcccagctactctggaggctgaggcagaagaatcgcttgaacccaggaggcagaggtttcagtgaatcaagatggcgccactgcactccagcctgggcaacaaagtgaggctccgtttcaaaaaaaaagagggcttctaaggtttagtagattccctcaaccacttagtggaatttatttaggatgtgtcggctggaggtggagagaacccgaagggatacatatttatttaacatttttacatgccgactatctaacctgtgtccctaagtctgaaaatggttgctccacccaaggttttcttgtgattttggtgccaggagcactggtggtaggttatgaggtttgacttgagacggagtctccctctgtcgcccaggctggagtgcagtggtgcgatctctgctcactgcaagctccgcctcccgggttcacgccattctcctgcctcagcctctccgagtagctgggactacaggcgcccgccaccacgcccggctaattttttgtatttttagtagagacagggtttcaccatggtcttgatctcctgacctcgtgatccgcccgcctcggcctcccaaagtactgggattacaagcgtgagccactgcgcccagcttgacttagtttttgaggcctggagttgctaggtccagaatctccactctgagtgctcatttacagtgaaatgagaatggccataggttttccttcttgctttaaatggcagaaagggaacatttcccctttggccatcttgataacctaatcctgtgaaatgagtattattctgtccaaggccacacaactggtaataaagtggcgggatttagaccctggtcctgaggaagagaatagaggacaatagacctggatcctcttccctgagggaaaccccttctgccagccagtttagggccctggatggattctagctatgctggagagccagccttcccctcaggccttcaggaggatggtgcctcccctgtgtatccagggcatgctgaggatggagaaggacccacccccagtggctgcccacttttctacttccactgatcctttgattatttttctagtgtgagttacagatgtctccatccctccatggagctctttatctcctttgtgactggagaggatccatcttacacaggaaaccaatgtatcgctcccaaatttggagggccacaggaggtggcagctggtttggcattcttccctccaccagcctccccttttgctgtgggttttctgtgcaaataggatgaggccca

SEQ ID NO: 1446 - DNA, 4001 bp, Homo sapiens
agatgagataagaacgtcaccacaataaaataaagtcatcaaaacttagtgaactaaaatttaaaaggtagaggaattatttttcctaatttgacctaatttgaccacacagtaattacttccagaagacaaaagatccaatccaggtaaaataaatctttattttattattttacctgatcctaaagaaaatattctacgtgagttgatggatacattggtcaagttttatgccaaaaaaattacgcaaactatactctgaaagagctatccagactccttgccaaaaggccagcataactttcagagtagagatcgtgagttaccacagatgctgattgaaacagagctaacagcagctttctcctcattcccaccccgtgtgtaggagtacgcagtctcataccaccaccagttggaggatgatctagtctggagacagaacggtgtagaacaaaacccttgccagggtcccaaacctctctttagaactctaattaaaggtacttccgtttcccacacaacttggaatgaaggggaagcaacgactgttaaaacatttaaaaactaagcctttatctatttatttagaaaacacactatgcaaagaagccaattccttacattaaaaatatttatttgcaacagctctcctttttaaggcctcaacagattggactaaaccacacccctccataaatggcacattccatacaatagcctggagaatggcataggacgattccaccgacagctgggggaatagcaaacttgttgaaattccgagaatgaagtctgatggttacccgaacctagcccttttattactaaagtcactcggggacaagagggttacaaaaatatcccgagacgcgtacgcgggtgagagtggaacgagaaccacacgggatttgggccgtgctgttaacccgcacctccctgagtacggacatttccccgaggaaggacatttctagtcggagagaaagagcgaactttggggttaactctctcaaaactctgaggtggggagagaggcagcagcccattattttccaggatccagtcccgaactctcacttttgcccggggggaaaaaaacgggtcccgcccacgctcggcccgatccgggaggcggggcctgcagcgaccccgaaggacagaggcggggccggttggcagtgctgcccctccccctttgccaggaacacccccgtccgctacagagagggctcagggcccccacccccgcgccagtcgctgggggaaggggcaatacgggtgcctccgcccctcctcgctgaaggtggggagtggagctcgagtccgcccgcctccccgcgctggctccaaggggacggccccgaggaggtggggcctcttgggggcgctgacttcacacccctccccctccggccgctggcggctcagggacaccccgcccgctctagtgcggtgggtgggggaggcagctgagcagaccggagccctgcagcggcgcggggcggggaggggcgcgcgcacgggcgcgcagccaccacccccgcgcgccagcagggccccccacgctcaagggtgcgcgcgggccccgaaagggaggaggccgcgcgcggcaccggggatggcggactctagccttctgtcccccactcttttcaccactcgcccccatccccctccaacccgctccaggcctcagactccgcactgacctgacaggccgcgacatgttcgctgtcgaaacaggaccgagtcgagaagccaaagaccaggaccccccccaccccgcgcgctcggcgccccaccccccccgaacttcagccgatgggaccgctgctgccgaaccccgagctgctggcttctcaaactccgctgctctttggttcagggctcctggaacagacgagccccccgctcccccgtctcttcaaaatggatgaatcaaaccagccgaaaatgcgccaaagccgccgtgcaaccaaacccactagggtttgtgcgctcctccccaacacgcctgctcattggagacttctgccagatgcgcccagatcattagtccgtttgaatcatcacgtcttccaggccccgccctgctctctgataggctccaccttcaccgtgggggtcctgttagtcaagatgctctgagagcgcacggccgcaaaacaaaaatggtcgctgcttagcccgccccctggtttccactccagagttgcagattcgtctggggtcgtatcttagaaagactagaaaaaaagatttatgtagggttcagcgttgctcagtgttagtttaatggtgtttcatctcgtctgccttgatcaccttgaaaatcctctaatagcaaaacccgtgggagaggcagcagattcgtcactgcggggctgctacagaattggagggaaattccttaggttcaaaaaatttgaccttaaacctacaagccccttaccctggcttcggcattaaccctcagggaccaaatgaggctgctggagtagagaggcaggatcataatcaaggaatatcttcacccccaattaccattctccattctggaccttgagatccacttcagggtcattaaagtcccagtctggtgcattactattttaagaaaagagtcaggtgtacaataactaagagcatgagctcaggggccacaaggtatttcaggtggaatcccaggtccactacttaatggtggtataactttccttctctgtgcctcagttttctcatctgtaaaatgggaaacaagggtacctaactgcataggcttattagtattaaatgagttgatatatctatcaaaagtctttaggatagtctctggctcacagtaagtgctacgtaagtgttaaatccaagttttaaaagatgattccgtccctgggtagagatgggtggagctggctcaagaccctatgaattctattgatttacccttgcactttgaaaaacaaaacaaagactcttcgaagtcatataactgaaagtaacgcacatcatttcacttaaatccgtgagcatttgttggatgcctaatactctcaaaggcagagctcaggattcctatgtgaatggctaaggctgagtctgctatcgaaaatagacgtcaatccctgtcacagtcaaagcgatcatttttgtttggtggctgtgcgctctcagagcatcttgactaacaggaccccacggtgaaggtggggcctatcagagagtagggtggggcctggaagacgtgatgattcaaacggactaatgatctgggcgcatctggcagaagtctccaatgagcagtcagttaacaaccaattgaagatacactttccaaacaacaacaacaaaaaacacaccacatctgcctcctgaaagtctccctttgtaaaatctggcttcccaaaaagaagagaatagcacagtccaccagtgaagcattaaacaaattaatatcttttgtctcttccatgtcattccaccctctgtccctcttatttttatttttaatttttattttttcgagacggagtctcactcactatgctccccaggctggattgcagtggcacgatctctgcacactgaaacttccaccacccgggttcaagcgattctcctgcctcagcctcccaagtagctgggattacaggcgtgctccaccatgcccagctaattttggtattttattgtggagatggggtttcaccatgttggccaggctggtcttgaactcttgacctcaagtgatctgcctgccttggcctcccaaagtgctggcattacaggagtgagccaccgcacccgtcccccgcaatttttttaaattgtggttaaaaaaaaaatacataacataaatgtaccactttaactgtctctaagtgtacagttaagtggcgttaagtacattcacattgttatgcaaccatcaccacgattcaacaccagaactttctcattttcccaaactgaaactctgtgcccattaaacactaact

SEQ ID NO: 1447 - DNA, 4001 bp, Homo sapiens
aggtgggcgggtcacttgaggtcaggagttcaagaccagcctggccaacatggtgaaaccccgtctctactaaaaacacaaaaattagctagattacaggtggtgggcacctgtaatcccagctacttgggaggctgaggcagagaatcacttgaacccgggaagcagaggttgcagtgagccaagatcgtgccaccgcactccagcctgggtgagagactcttgtctaaacaaaaaaaaagacactggctaagttaccgggtcaaagcaagaaggaggagagcaaatgaagccacttcaaaggaggataagatggattaattctggctggagtacaagtgtagccaacggtttgagtatcagatggacatatattaccttttgactttgcagaagtttcttaactctgtacaacaggaataagatgcagtacctatttctagggacctggtgaggatcatgaggtcaaggaggtgaggcctttagcaatgtatggcacagagcaagagacccactggcagagggtaaacaccttacaaataggaaccatgaaccatggcttagtctgtctgccacctgcaatgctgggcaccagatatggctaaaggtacataatcagtaaaattcttgctgaatgaaacaatctagtggtgactcaaggtcagcacacacaaaccctttatttgcccaagagtgggtctaaatctgattaaatctgatgctagaacatatctcaatggtttccgttcttgcttctagacagtttttcaatttgctcaaaaatgaactcgctcccaaatccagttttgtgcgaacagtttagaggaatggagacaggaaggcttttcacacttgcaaatgagaaacactctccccaccacaaagggcttagaagtccttggtcaccagacacctaggttacataggaatagaaagttcaatggaaacctacctccagtaagacacaatcagccatggactctgggaagcacactgacctgtctaggtgagaaccatgttgcatgatctaggcaaatccttgccacttctctggctctgagaatgagagttctgatcctgacagacttttctaccgttaactttgtgtttgttccaaaaaaaccaactccagaatctgtaacagttggcccttattgtcgagtgtgggacacacatcaatcacacgacaaatacttgttgaatgaaaaagccttattactgagaacttacggttcttaactactctctggaaaccggtattcgcagctgtctcacagataaggaaactcaggcttggagagatgtaaaggttccaagttggtaggtggtggaaactaatcgtgaacacaggcctcctattcccccattcaaggcctaacaagaccacgtgctaacatcagcccgctcccctaccacacacattcgacggctcgccccaagccttggtggatccaaatcacgatatttgcgacggttcttactaagggatgctccttggaagccgccatcaaagtggaaacgggggtgggggcatatgtgaaactaaagggggatcctaagctcagggatgcgataatttgctactactgaggggcgccgggggcccgggactgatgcgaaccgggtgagacctgctggcgggtggccaggccggaagctgggcgcagtgagaatgtaggggcatcccagaagcccgcgagccgctggggtgggtctcagccctcgaaggcagagaagggcggaaggagcgtggccaaggccgccgggtgggccgacgccgcgcgggccgttacctcctgcacgccgccctcgtgctgctgagccatggccagcaacatgccgtcgaaccgctcctcctcctgctctccgcccatcgcgccggctccgatccacgtcccggagctctgcactctagtcccgcgctctctacgctcctgcgggtcgcgccgggcccaacgactctagtcgtccgccttccgcagcggagccggaaacacgcacgcgcgcggctgcccaggcccgcctccacctcctctcttcccgccttcctcccggtttgcggccattgaccgtgcggcaagcaacccgcttcgccgaccattggtcgacattcggagccaatcaacaagcgcgtccacgaagcggtaggcggagccgtgggcccgagagtttggcatgagttgctatggtcacccgatgccgtggagacttctagaaagccctggactcaaatctggcagggttggaagttaaaaagggacaagttttgcccctctcccttgctagcgacccccccagcttgtagagcagtgaagctgaaagtagccttactcatctcttccaatcctagaagggacttaccacaggacagcctcctcctcatcgacctcactgcgtacttgactagggccagcttcatgggagtacaaattgcagtcgcacagcacccaggcttagaaaggctccacgcttgatttcatggccttctgttatagtcttgaaattcttaataattttggaataaggagacccacattttcattttgcactgggcccaggaaattatgacaggtgctgaaattgaccttcacttctgttaatgcggggacaggacccagccatccaagctaatccctccacttgtgcaatgaatctcatcatcttagtcttttcaggaactctatccctgttaattatccctttttttagcttatgcatcacaaatatctttcttcttcccttcaatttacaaacacgctttaatatctttttgtttgtttttagagatggggttcttgcattgtcacccaagctggagtgcagtggcaccatcttggcttacggcagccttgaactcctggactcaagccatcttccccacttcagcctccagagtagctgggactacaggctcacatcaccacgccctgctgtttttttttttttgttttttgttttttgttttttggtagagatggagtctgtgttgcccaggctaagtctcaaaccctggtctcaagcactcctcctgcctcagcctctcaaagtgctgggattacaggtgtgagccaccatgcccagccctgtttttatattattattccatggccccactttcttctgctgctacctctccaattttcagctctcatttgcagcaaacttgtttgcttgtttttctactccctcacctcccatctctctacagtatattctagtctatctattcttctttttttttttagaccaagtctcactctgttgcccaggctggagtgcagtgacacgatctcagctcactgcaacctctgcctcccaggtttaagtgattctcagcctcccaagtagctgggattacaggcaccactacgcctaactaatttttttttgtatttttagtagaggggttttcaccatgttggccaggctcgtttcaaactcctgacctcaagtgatccacctgcctcggcctcgcaacgcgctaggattacaggcatgagccactgcgcccggcctgttctagtctattttttaaaggctctgatatggttacagtgctacatattgccaaagccaatgaaccactattatcttactcaacttctcaggtgcatttgacacagttgacgccttcttctttccttttttcctttaggtttctcttttggttggaattgcgtgttccccacttcagactagagacttctccctttagattagagattcctggagttgatctgtgtcttctccctcagactgagggctcttgagggcagggccttgcacttgcacgggcccatcctaggcactgggagcaaccccagcaatgtcttcatagcgtcaaatacatatttttttttcttttaacatgcaaaagcaaaattctaaaattgcaattggttaagactactatttcttcccactctatctcactttcccttgaatcaggtgatatcagagatgccatgaggatttggtgatccagctaaggtgaagttgag

SEQ ID NO: 1448 - DNA, 4001 bp, Homo sapiens
tgtcagccacataagggcgctcacctcatttgggtttggttggatccgggcctggggtcagacatggtgacccctcagtcattgcctctccctgggctgcctgttcgtgatcaaaacctacccgcaggtttcatggagaaaggcaggagcaaggggaaagggcattgcatattcttcgttatctctgactacccccgccacccccgcccagctcctaatcacagtcagaaccaggttgcttgggctcccctgagccctgtttccttccctcactgccagccctacctgcaactgctgctgtgattcctgggagatcacgagtagatacagaacaatgtgatggtatttgggtaaaccccagctcagcctaggagggtaggcagactaggaaaagaaaacagcaaaagtgagaactttccgtcactttttttttttttttaagatggagtttcgctcttgtcgcccaggctggcatgcaatggcgtgatcttggctcactgcaacctctgcctcctgggttcaagcaattctccagcctcagcctccagagtagctgggattacaggcgcctgccgccacgcccagctaaaatttttgtatttttagtagagacggggtttcgccatgttgtccaggctggtctcaaacttctgacctcaggtgatccgcccacctcagcctcccaaagtgttgggattacaggcgtgagccaccgcacccggccctttgtgtcactttttgagactttgttaatacagctttagggtgaaacaaaatggtggccaaaagctgagggcgtggatggtacagatgacacagcagggacatgggtgagggttatggatttggggattccagcccacttatgtgctattgtttcccttgtagccaaggcaggtaggggctgatctatggaggagcttctcccagctacttgtctcacctcccataaacccagagggacccaagagaactggccctggggcaggtgtagtccactctcctcccaaagttctcgaagccctccgtccagcagctgggagtcagagaagacacatcagaggggccagtgcctgactcttccaagtccttttgcttgcctctccctcagcccacacccaagatggtcccaggcatgggtctcttggctcaggttggatcagctgactggttacctcctcctcaagttccacgtgcccacctgcaacaacagtggggccagtaggtgaatggtggtggtcttggccagggagcccccactcactgttgacactcctctcccctccagtggacacagagggagttgcagtcccttgtgactatgaacatgccacattttggggcccactttatccttctgagactgggaaaaacattgttgcggggaaagggcaaatttcttctctgtacttggggccttgtccccagaatactcacccgggggtacccagaggttgggggaaacgctcagggtgcgtgcccttcgggttagcaagacagtcttgtcgctggactgcagaatgacggccacacccaggtccacacctcgatctgtgggcagctcagccccagggaccctgggccgctcctccagggccgcaaaagggcagaaagggggtcgctggcagaaggaagccagctgggttaaggcttcagaagggcggcactgggtgggcgtgacttccaaaaatggggctacaccgcgcgttgggggcggggtcctcgccgccagttcccacccgatttcagtccccatctttggcccttcactgcccccgctctggggcccccttctgccgacctggagcggaagcctagcggaggcgcctgggaagggcctgctcgagaggacaagccgtcctcgcttcaagctgcagtgaatgggccacgtcccgagccctggtccggctcccaggaggccacacacactccgtgcgaagctcaccgactccggacgccgggacaggagcagctgcacccgcacctcggccataacgcgactctggagtcgctgcggcccgcctggcgccctctggtggcctagagaagcttcccctcggaacgttccgcggggtcgtagcggggtttccgaaagtccccggggaaataagggcacatcttttgaggatgacccatgggtataatattaaaccacaaagaagaatacctctaaatgctcagctcctattccttcctatcttctctgtttaggacaatgacccccagaccgaatgacttcaggacccacatgttacttccaaccagccctaagctgaactgtaagcatcctctacagcactatgcacacctgttacagcaggcatcacttcgaattaattatctccaagcgaaacacaccaaataacattttcgataccacttctcctttcacttcactcaaatggcaaccaagtatgcagatgctatctccttaaacttcctcaaacccatgttctctccagccttcattcattgccctagtttaagccttcctcgtattttgcctgaaatattattgcaagtctccaaatagtcttgcccctaccagttcattctctacagtgctgccagagtgatgttttgttttgagagtctcactctacagcccagacaggagtgcactggtgtgatcccagctcactgcaacctccatctcccaggttgaagcgattctcgtgctttagcttccgaagtagtagctgggattacagggcgcccaccaccacgcgcggcctttttttttttttgagacggagtctcgctctgtcacccaggctggagtgcagtggcgccatctcagctcactgcaacctccacctccctggttcaagcgcttctcccgtctcagcctcctgagtagctgtgattacagatgtgcactacccacacctggctaatttttaaatttttttgtaacgatgaaatctcactgttgcccaggctgttcttgaactcctggcttcaactgatcctcccagtgtgttgggattacaggatttaggcaccatcaaaattatcttctagctgttttgaaatgtacagtaaattaataactatgccaccctgatctatccaacaccagtcttacttcttcaaactgtattatctgtgcccactaatcaacctctcttcatcctccccatccttcctagcctctggtaactaccaatctattctttattttcttgagatccacttttttagctcctatgtgagacagaacatgcaatatttgtttctgtgcttggtttattttacttaacataatgacctccaattccatccatgttgctgccaatgacaggatttcattcattcttatggctgaataatacattttctttagcctttcatctattgatgggcacttaggttgattccatgttttggctatcgtgaatactgctgcaataaacatgggagtgcaggtatctttttgatacattgatttctttccttttggagatatatatatacccagtagtggaactgctggagcatagttctgtttttagttttttgaggaacctctgtagtcttccacagtggctgtaccaatttacattcccaacagtgtaccaggcagggctctcctttttccacatcctcactagcattcattctttcttcttgataaaagtaatgaattggggtgagatgttatctcattgattttgatttccatttctctgattagtgatgttgaacattttttgatgtatctgtcggccatttgtgtatcttctttcgaaaactacctattaagatcttttggccatttttaagttggattgttctttttgctattgtttgagctccttatatattctggttacgaatcccttgttaagatagtttgcaaataaagcatcctcatctttcaaactatacattgtcactctctgtgttcccttccctgcctgacccttttccctttctggcctctctgtacatagtgtttactcttctactgtagcacccctaatacttcctggtactta

SEQ ID NO: 1449 - DNA, 4001 bp, Homo sapiens
tgaccgtcttgcatcaaggcggcttctccctgttctttttttccccctttccctctctttttttttggtcaccatctgctgtgtcacttgtgttcttgttgtataaattgattatttgaaacttaagcaaggatttgtactttctactattaaatttcatgattgcaagctttccttttagagctaggacgttttgtctatttttttttctttgaggcagggtctcagtttgtcatccaggctggagtgcagtgtggcacaatcacagctcactgcagcctcgacctcccaggctcaagctatcctcctgcctcagcctctcaagtagccaggacgacagcaggcacacactaccacgccctgttaatttgtgtgtgtgtggagatagggtctcactatgttgcccagtctggtcttgaacttctgggctcaagtgatcctcccacctcaacctcccaaagtgctgggatacaagcataagccaccttgccaggccacagagctgggatcttttggaatccagattctgatgcatcacatattagatgttcccttcagcataaatatgcattctacattttcatctaagtcacagccttaaaaactgttcataaaaggactggaccaaagaaagacttcagaaaaagtcacttttccaaaaaagctgcatctgaattagagagtattgcaatagaaagcgtaggtgtaaagtatcttcataattattatcacttgttcctctcttctctaatgtttggcactctgctatcagattaatccttataaaaacacttaacgcatcatataatatttgtatgaaaatacttcaattactcaccttacccaccacatcaaattcaaatttttctgctaggcttctaaaccctttaataattgaatgaaatttctgctccaagttagtctcctaactttcccaaacttccagtatttccttttggaacctcctccaatatccaaattctatcattctttcgaagtacaatttcagttacaatttattcattaacgagagatgaagacactttccaactacatagtttgagctcctaggtgggataaagtatataaatgacttaatatatatgcagtaatactctgtctaacgagtagcaaagattaacctataattactcatctggtttctcatttatttgcagcaccacgatgctgagcagagtgagtaggtactaaaagtactctgttaaattttacacacttcgttttgttaaaataaactatttgtggacatcacagttccacgaggcagagattaaacaaaaataaacagaaatggctcccaacttcaatgaattaagtaaaacgttccttgaacttttaaaaggaacaatgatggcgttatgcatgcgtagtgctatatatgcgctgctcttttcctttgaattttggattaggtgtgatatttttaccttttcattcatggttttggatttggttaagaaacgtttggcaacggagatgtgtaaaaagctgacaagcatctgcagccaaataaaccacattaccaccgcctttccaaaaatcacacataaatgtatgcctaacttgaacaatttcagctcaagctcgtcttcttcggtctatgctgcaccagaaaacacccgttagtttagtaggaactgagctctggttgtttctgggactaacatcaaataaaaagtaacgacgggcccgcccctcacctcccaggctctggtttcttccgcctcctcccaccgctgagcacgacgaaaacaccgccaggcccagcgtcccggcacctgcccgcgccttgggatggagaaggcgtctgtctgcaggcttccttcctccgtcctctcgcgctcacctacagtgccggccgccgacaggaagacggcgagttcggggagcagctacaagcaaagtcaaaaatcagcaaacgtcaaccgtcatcacttttcaaacttgccgcctcctactggaagtcccgccccattccgccaagcccacgtccaaccgcgacggatgccggttgggctcaagagacgccaggcaggtgggactggagttgtcatggaaggggcagggcgcagggcggaaccattgctcgcggagctggcgtcgagtcggaacctcggactgcaggaagtgggagcaccgcggtttcggggaagagaccggggttgagcgtctagcccatctctgcgtgacttccgccagcgtttagagcgttttcggggtccgagttgaagagcaaaaccaagtgaaggaaacttcactaagttcagggtgacaagggaggaagtacagaggtaatttatagaattccagagtaataataacttgttgaacattgattatgtgccgggttttgttagatgcttataagcatcatctcatttagacttcattaaaggggagaaaagggatagtggagagatactatcatcccctcaggtgagggctctgaatcagagaatgcagttctctgcgcacagtagttcacaagtagcatagctgggatatgaacacacatcctctgactctgtgctcataagcacgacttcaagaggtggaaggaacataacagttcatctggtcaaatcctctcgctttcaccgatatgaaaactggactcagagagaagtgatttgttagaagttatacagtaagtgggactgtaaagtagaaaccaggtctcctgattttagcttctccctcttcgatcagtgcttttcacctctgaactgttccccaaatttgcacattcctgagtgagttgcattcttcagataaggggccctgaaatctgtatttttttacatggtattttgtttgtttgttttggcaagagtggaaacactgcatttaacacaagttaggaagccatggcaggcctggttgtcaggggagaaagccattaagttttattgaggtttgggacaggagaagacgtaataggacttgtatctggtcacagagtagagcatcatctggtgacagtcgtgtgttggatggggaacctgaactgaattatgtgaaaaaagtgctagaaaggttgtattgaatgtagacacaaattccgctgctttgtcctgtcctgaagaactaaacctattgatagtgaagtctataccaattctaaataaaaatacatttcatatcattagttcagggcttttgtctttcctttcaatgtctatttactgatgtaagtctcaaagtcggaatctagtaagacccaaaaggacattaagaaaatagattttaaaaaaatattagagtcagtgaggaaagcagaaaaaagagacctgtctcattgacacttgccaaatcaaattgattactgatacatgcataatttccaccaaattatatgtccttagaggcagggaagggaaccatagcgtagtgactgagagcacatctctacggtcaaagggagttggattgaaatccctgatcacaccatttactacctaggtggacttaggcgagctatttaacctaactgagctcgtttctgcatctttaaaatagggtgacagttctatctgctttatacggtatcatgaagattaagtgaattagttcctgtagagtgcttaattaagtgcctggcaaaattgtgagtacttgaaaagtattagctgttattttgactattattatttatacatggtccctaggaaaataccttgcaagtggcaagtgctcaacaaatgtctaaattgtcgttgagaatctagaaaaaaaaccaagcgatttatgtgaaagccaagattagaatggaccatggagaaagagaaaaatgaggcaaaggaagaaaagagcaagacaaccattttgttatatcaacaataaatattgtttatttgggggttaatattactattgatgtgataaattgagttatattagaagtaaattatttatttaaaaaatgagtgtttattcaaattaccttaattagaaggttaaatctgactttttaaaacttt

SEQ ID NO: 1450 - DNA, 4001 bp, Homo sapiens
ttggcttcaatcccatagactctagtattgaaatgcatgcctgtattcacttaaactccttataattctgcctccttagctgtgaaataaggcttaactagaccagtgttttttttttttttttttcaaacagcgggtcattttgcagatctcaacatttttgaaagacagaatataaaacatcagcttttaccatatgttgtggtcaaatacattttataaatattggcttagatgagatttaagctcatctagctttaggtgcttaagagtccaccagacctggccggagcagtggctcatgtctataatctcagcactttgggaggccgaagcgggaagactgcttgagaccaggagttcaagaccagcctggggaacgtggcaagaccttgtctctacaaaaaaaattttaaattagccgggcattgtggcaccagcctgtagcctgggcgacagagagtgagaccctgtctctttaaaaaaaaaaaaaaaaaaactatcagatctgtacaaccaagcaagaaatcgaacaggttacgagcatcagctgttacatggtcctcaacagcagatatcacagtaaaaactttatttcttgctcaccctcttaacatttagaatattgtaaagtcaccagaataaaaggtagtctatgtcttatcacgagaattaaatgagaagatgcacatacagaagggctaagggctttgtttcctgacagaggataacaaaggtttttcttcaaatgatcacaagaagagatttaaataaaacaacacacagtaaataaagtatgcttttattctccaacttttcgcaaaaggaatagaaaacactgacaagatcagcactttgaaaagaacttttcaaaatatgccaaaaaaagtcaaagatacagtgtattctttcaaaaccacttctcctttaaagtactgaaaaattttacagataaattttaaccataatttcaagacacaatactttgtgtttcctgcagggaaaaattcattttttatagatgaattcagagaaaactatgcagaaacactaaagttttaggttaattatgaacatggtgtgtgttgggggtggggaggggtgtgtgtgtgtgatgattttactggtgctccaaacgagcagttttagtaactaaactatcacagtactcttagctcacttatgtaaagccttttccttataatttacctagaaagttaaattccgtagctagaaaccctttaattaccaatcatcagatattaatgtcagttggtatgttaggcattaaacaatgatctttcagggttgtaggtcctcattatcaccatcaccttacatctgcatcgtggcaattcataataactcctctggctcaggtgagatatattatcgccatttcacagatgaagaaaatcacgagtgacttacaccagatcacacgggtagtaggtgggaagtaggtaaacactgatgcaaatccagtttgtacttcacttctgcacaaaggtatccatgaaaaatgcaaagtggggaatcaactgatcaactgataatcaaaacgaagcagatactacctgcagcagtggaaaaggtctattttccaatactgtggcattctattccgccgccccggttccaaaggcttctaaagacaacaacctatccggcccactgcggcccgtgaggctgttggttgccagacccaaccagggagatcacttaccgcgagcttagcgagctacgccggccgaccggcgagaagagcactggggagctgactgcagaccccaggggcagacccttcctgctagccgtccggggcgtggagccgggcccgagtccggccagcgggccccttcgggacccggtacccggggtccgcggagaaggggcggctgggaacatgactccaaggagcagcgactaggacagcgagggatctggccgtcaggttgcagcctggcctgcgcgcggaacttaaacacctaagggaagagatggcgcgcgatgatgacgtcaaacgcaatggctcccgcgggttgtggtcggagcgctggcgggggcgggatcgtgacgttaagggcggtgcccagtcagcgaggtaggtcgggaaggcagccggcggccccagatctagaaccgctgcagtgccgagcttccagggacgtgaagccggaaagccaggcgcccttcttgactgcgcctaggtggaactggccctccagcagcttgaacgtagcctcttttcacactggtagttcctgaacctcttgtgaaatgaaagatgttcctcattccaagctgaggacggagaaaagccgtaaagctgacactggtatcgcactgtgatatttgttgttttctaggtttgccattttcccattcaactttgcgcagtctcatccacgctgatgacgccacaaatccgtgtctctaacctggatccagctcaaaacccccagacccctatcattcagctccctaggggacaatttcagctggaagtcctgcgaactcctcacaatccacttatgaaaagcgcattcatgttttcctttaggacccctctcctaccaccatctctgttccagcttggtaaaactggccagttgtccaaggcaaagagaagagctctatctgcagtcatccctcacacctacctccaccctaagatcatggtatacgttgtaaggtcctacgtgtctgtactagatcacacatttgcactgcctctgccctggttctggtacttacctttccctcaaccactgcgtagcctcttctgccagcgggagggagtaggggagatggggagagggttccttacctgtgtctagtcttcctccactctatcttctcactgccaacacaatgaattaaggcaaacgtaatgctgctcttgggcctgtaaatgcttcagtggctgaccattgccagtaggttatttgctaagctcctttgcaaggtcctatgtgatctaagtcaggttggcttttccgtccgtgttgtacttccagcacttcccacttgcactccacattccgagaacttaaaaacccaaatctccctccagtgcccatgtccatgtttctctcacctggaatgcactccctgccttgttggtccagaaggcgcctaccttccgcatcaagttagttctgtgctgccttctcagtgaaaccttccacaggattaggtcccccttatcctttgtcctctctgctcctgtgtgtagactgtatttttatcctgcataatagtttgttttcataattgtctgtcaagtacttccttttaaatgtcttgacagcaagagcagtgactttgttacctttgtggcacacagtaacagacacatagtagactttcattcaacgtgtgttgaaataagggaatggttaagtaaacattgacgtattcacatgtgggagaccacagtgtgggtgtcagttgttgacattcccctgggaagccagtcatctatctatgcaccagtggcatctgagcagtcatcttgccaaggttacataggctagctgctttactccttctcccacctgggtgtctaacccaacttggcagcttgttgagtcttatagctctgagagcccagtgcatttcctccctgtttcattcttacaaggaggggtgtgaaataggcaatagagagtattaatagttgtgtctgagaggattggtgggatcaattttattcttgtgctttgttggactggttagtggtttccccagcatcctaatgtaaaagctgttgtttgcaggagctagaatgacttgtcagccacctttgagcaagaacttgcctggagtccaaatgtatggctattgaaggatagtaagcagacagcactaaaagtcatccattcgttatggatttagtgagtacctaccatgtgccaggctatgtgataattgctaaggcttataactaaacaaagcccatgggtcctaccctcatggagattacagaccaatgagaa

SEQ ID NO: 1451 - DNA, 4001 bp, Homo sapiens
atattcttccctcagtatgcagaaatacgactgatgtgtttctagtaatgagaggggactttctcatactctgaggaaagtttccttcaatcctagaaaccaggcttctgatatctaggatggaaaaggtgcctaaattatgaggtgtgagtccaactcaaaataccaaaaacattcataaatatttttattcttatttattattatgtttttgagaccgagtcactttgttgcccaagctgaagtgcagcagggcgatctcagctcactgcaacattcgcctccagggttcaagcgattctcctgcctcagcctctcgagtagctgagattacaggtgtctgccactatgcccgactaatttttgtatttttagtagggatgggctttcatcatgttggccaggctggtcttgaactcctgacttcaagtgatctgcctgccccggcctcccaaagtgctgggattacaggcgtgagccactgcgcccggccgaatgtttttattttaaatagagacggggtctcactatgttgatccggctggtctcaaactcctggcctcaagtaatcctcctgccttggcctcccaaagtgctgggattacaggcgtgagccaccatgcctggcctcattaatatttttggagtgatagaagaaatggctttcaatgctggaaagatgccttgcatcaccctcacggtcaggaaacacacacgtcacactggatcatcttacaagctcactttccttatacttcctcataaaatgagaggtgaatttatactcggaacaaacctcattgcttctcctaggagatggcaaaggggtatctactccatctaggatgaatgcactggcatcctgaagctcacttcggttaggttctctcataccttaggcaaccacataacccatcattgggtcctctcacaccagaaaatcatgtctcttcatcttcagtcaggaagtcattatcccggagttgtgtgtaccccctgtcctcacacttcaagcgggtacccttttataaatggggcaattttgataatacagacagatctcatctccacccacgataaatcttctcatattcccagaagtttacacttcatagtctctgggcctcactttcctcgtctgtgaaatgggagtaatagtacttacttcataagactgcaaaaagcgaatgagttaacacatgtaaagtgcttagttaacccccaatacttggctgttgtgttttaagtccttctcacattgaatagctcatctatagttagtggggaccctcgcaccccaagttttcctgttcctacagaaatttcctcagatatggggaacttcctcttactctagttgtttacattggaagtcatcagtacctgtggcctccaacacagggcttccctttaccctgacggctgctcatagtgaccaccccttcccaacacacacagagaagaggccagtcccacatcccgagaattcctcacacgtctggaagattgtcacacagctggaggatataccacatgagtaggacacgccacacccaagggtctgctcctcgccaccttcactgacaccacactctcctcccctaccggctaggccccttcacgcggccccacacggtattcctgtgggatcttacagagggaacccccctcacccttactggatggtagtgagggtgcatatccttgtcacccaccacccctcaccaagtgtagcagccccgctgggcctccagcaggaaaggcacccggcctggctctcggccgaagggtagcaacacctgtggcacgttaagtttgttggccagggtcccacgcaaaaccagaaacaacaacaggaggcggtgtagacgcaagaagaaaaagagcccgaagcctcggcgtcttgatgacgccggacagccagtcatggcgactgccaggtctcgggttcccgctcaactacagccggctcacagctccatcagccaatccacaggcgtgacgtcagcagagggggatgggacctgcttcttgctcggatgtgtgggcatttttaaatgcagtccttcagcaagccaatataatggaaacttttggcacaaacccagctaaaacacctcaaactctcttaaagggctttcctaaatactggatggcagacctttttaacagtaaggaacaagcagaaaagtctaaaaaaaaccctttaatttcttccagttttaatttcttctgttgcacactgtttatcttaacaccacaccctccgcccgacaaaaaaactttttgcaatgatttccagttagcattggtccatgcctatcaacggaaaattgtgcagtctctgggataaacagctcgactttgtcaagggaaccgtgtatttttactagaagtcagattcacgtccggcctccaggccagaatgcaggaaatgccagacactggcgtctcaaaagcagctttcaaagttatccactcacacagccggcctctaagcaaatactcttgagagcacttgttgttttctccaaatatccaaacagaatataaactcaaagctgtttcagtacagttggttaaaaccacgcatttatagtagtgatcagcattatatattgttttaaggagcataaatccatagtttataaggattgatatggttgtgaaggaaaatgtatatagttcagcctgagatgtcagtgttaacctataaaaggcccagcacattaagtgttctttctaatcttcatgtttactctgacaatacttatctccattttacagatgataaaactaaacatttgctctatattaaatcctgttgctccagctgggtgcggtggctcacgcccgtaatcccagcattttgggaagctgaggcaggtggatcacctgaaggtcaggagttcgagaccagcctggccaacatggtgaagccctgtctctacttaaaatataaaaaattacccgggcatggtggcaggtgcctgtaatcccagctactcgggaggctgaggcaggagaatctcttgaaccaggaggcggaggttgcagtgagccgagatcgagccattacgctccagcccaggcaacaagaatgaaacttcatctcaaaaataataataataaagaataaatcctgttgctaccacccacaaagatgctatttttaacccaaacctcatagcttctgtggagaaagcacatttagttttaataaataaaagtcaaataggtctgagggttggagggactggttctttatttcaaaaagacacttgtcaatattcagtatcaaaacagttgcactattgatttctctttctcccaatcggccccaaagagaccacataaaaggagagtacattttaagccaataagctgcaggatgtacacctaacagacctcctagaaaccttaccagaaaatggggactgggtagggaaggaaacttaaaagatcaacaaactgccagcccacggactgcagaggctgtcacagccagatggggtggccagggtgccacaaacccaaagcaaagtttcaaaataatataaaatttaaaaagttttgtacataagctattcaagatttctccagcactgactgatacaaagcacaattgagatggcacttctagagacagcagcttcaaacccagaaaagggtaatgagatgagtttcacatggctaaatcagtggcaaaaacacagtcttctttctttctttctttcaaggaggcaggaaagcaattaagtggtcacctcaacataagggggacatgatccattctgtaagcagttgtgagggggtagagatgggacaaaattttggtctcagaggtcttaccatcttaatttggtaacttctaatgaaaaaaataaaaaatagaaataacattatccaaagatatcttaaagctgaaaacttgaacagcacattttttgtttttgttgttgtttggctaactcctcctggaatcacctttctggtttagc

SEQ ID NO: 1452 - DNA, 4001 bp, Homo sapiens
taggtatttttcctaatgctatccctcccctagcccgatttttccctttaaaaggatgtcttggccacgcctgtaatcccagcactttgggaggctgaggcgggcagatcacctgaggtcaggagttcgagactagcctggccaacatggtgaaatcccatccctactaaaaatacaaaaagtagccaggcgtgatggcatgcacttgtaatcccacgtactcgggaggctgaggcaggagaatcacttgaacccaggaggcagaggttgcagtgagcagaaaaaaaaaaaaaaattagatgtctctggctgctctgtggggaataggctttaggtaaaagcagaatcagagagatcagttaggaggctattgtaatagtataaggtagagatgatggtttggactaagatggttacagggaaagacagtaagaagtacttggaatatattttgaaagtaaagccaaccaggctgttgacagatggtatacaggaaatgaaagactcagaatgatccttaaggtttttggccttaacaacaggacgaacggtagtatcatttactgagatacagaacactaagaaagggcagatttgaaggaagaaaaaaatcacaaattccacttggccattttaatttggagatatgctgactaggcagctggatatatcaatctgtacttcaagataaaatctggactggagatataaagttagcagtcataaatatacagaggccagtgcagcagcttgcaccggtaatcccagcactttgggaggctgaggcccgatcgcttgagcccaggagttagagaccagccagagtaacatagtggaaccccgtctctacaaataataataataataataaattagccaggtgtggtggtgcacacctgtagtcccagctactggggaggctgaggagggaggatcacttgagtcagggaggccgagggtgcagtgagttatgattgtgcccataaacagccactgcactctagcctgggcaacagagcgagactatgtctcagaaaaataaaaataaaatgaaataaatacatagataatagagtatgtagatactactcaaaggttattacactaaatgagatcacataggaagtatggatagataagaaaggtgtatgaggaaagaggaggaaggggaggtaagagaacagtggcacagagcacttccaacatttacaagttggtaggaaaagatgggtccgaaaaggagattgtttaggggctggtgaagtgaaagaaaaacaaggagaatgtgtagctcacaaattcctaagtgaagaaaattctctcccaccttttaactcagactgcttgcttacattctgaggtatttgccacacactgctttttactgatggtcatgaaaatgagaaaaccgtaggcaaagtgcctgttactgttgccagacccatgttatctcgttttagtgtgtaagttccttgagaacggaaattaacatattatttatgccaccccttctcaaggacctcttacaatgcgagcgtttgaagaccattcctgtgctaacttcacaagccaaagaggttaaaattcaaaggctacctccactctactgaatgatctgcgctgaagacgaccagacaacttgggcagccctaccaagctgcaccctcccaccatccccggcttctccctgagactccgcaccaacgtgggtagggaaggccccggcagcaccaactaaggagaaacagacgcacgcccagacccagactggggaaagaagactagttgagttccacctggatgccacccgacaaaaggggagtggcaccctggggcagcgatcggggcccttggcgaggccaagcggtgcagaatacacacctggatgactcgctgcttgagtttattatccacgaaccctgcaggtctgggcttcatcgcgtcggtcttccaagccacagctcggaccgccagctcctagtcaaccgggggcctcgtaggggttgcccgccgcgatcgccgggccagttgcacctgaaatgcgcccctcctggggcctagcccgcgccgtttccgtcagaataaaagtaatgcgaatgaaggggaaaaaattccgaggagagggagaagacttgaaaacctcagggagtttctaggggccttattttgcaggcctgcccagtggaccctggaagattaggacccctttgaacgcgctcaactttattggttccccgccgggcgaaccaggtgggaggaagttcctaccccggcgcggtgtgcggagacgctgtcaacggcgtcctctggaaaacttggtttgctttcctcaggcgttccagccacacctcattctgatacaaagctagtcttcgcaaaaccagccacggtagatacttggagtgataaaatcagggtaaaaacacaccaccagccgctgcttgctttcccacgtagttatcttacattttagaggcccgacaaaagggctaggtgaaaaagaaaaggaaggacggatttatccagataactaagtcatttgttacttttagaactcgtttgacttacgctgttatcatcggcaggtaatttgttgaatatatccagtgcaggactccttggcccagaattttatcaaacgtttgtatttgccccaagaagtttatcctgcacttagggagacacaaagggacagttaccaagcattaaaaaaaaaatgctggctttagtttctgtcttcttgtttatttcaaccgtgttttgagtattcttatttcaggtcctccttggcttatgacaaggttaagtgcagtgtattaaggggcagaggggagagaaaatggaattaagagaagggcgtgaggccgggcacggtggctcacacctgtaatcccagcactttgggaggccgaggcgggcagatcacttgaggtcaggagttcacgaccagcctggccaacatggtgaaaccttgtctctactaaaaatataaaaattagcactgaattaagtattagatttcccactcaaaatattgatccgtttggttgcaacttcatttcctacttcttcactatgtgtagttttattttttatttttttagttgtaaaatataagaacattcaccatcttaaacattttaaagtgtgcagtttagtgataatacattcataatatgcaaccatcactgccatctagttccagaactcttttcatcttgtacaactaaaactctatactaattaaaaaataactccccattcctccctccccccagcccctggcaactaccattctacttactgtctttatgattttgactacactaacttcctcatataagtggaatcttccagtatttgacttttgtgactggcttgtttcttagcttaatgccctcatatagcatgtgttagaatttccttctttcttttcttttttttttttttttttttttgatacagagtcttgctctgttgcccaggctggagtgcagtggcgcaatctcagctcactgcaaccttcgcctcctgggttcaagagattctaccacctcagcctcccaagtagttgggactacaggtgtgtaccaccacacccggctaattttttgtatttttagtagaaatggcgttttgccatgttggccaggctgatctccaactcctgacctgaggtgatccacctgccttggcctcccaaagtgctgggattacaggtataagccaccgcacctggcctttccttcacttttaaggctgaataaaatttggctcttttgttgccattctgccttttgccatgggatgacacagcaagaaggccctcaccaaataacaactccttgatattggactttccagccttcttgcattcattcaacaagtgtttattgagtgcctaccagtttcagtctctgctctgcgctttaggcttgtggggaaaagtggaagaattataactaactttttataacatttaaaaaatttgattaggtatt

SEQ ID NO: 1453 - DNA, 4001 bp, Homo sapiens
aaacatagtaaattgtttagtatgttagaaggtaactgctatggggtggggggaatagagcaagataaaggaagataaggaatgtgaaggggatgggtcagggttacagtaagaaatagggtgatctctcactgaaaaaaactgacatttaattaaacacttggaggatgtgaggttgttaaccaagccagcatctgaggataagagcatccaacgcaaaagcagccagtgcaaaagccctgagcaggaaacgtgcctggtgttttcaagaaacaaggaggccactgtgggtggagcagtgtaaattagagaggagctaatggggtcagagtatgtatggccttgtagaccatctgatggcctttttcttttaccttgagtaaaggaggaagtcattacaaagttttgggtggaagaatgacatgatctgacttatgctttaaaaagatcattctggctgctataaataagctacatagaattataaactgtagagaattaagggatatcttttaggggactattgcagtaatccaggagaaagtagtgtcttattccaaggtagagcattggaggtggtgacaagtggctggattctggaaatacaagtgctccttgacttaaaatagggttatgtcctgataaacccatcgtatgttgaaagtatcataagttgaaaatgcatataatacacctaccaaacaccatagcttagcctagcctatcttaaacatgctcagacaacttatccgacagttgggtaaaatcatctaacacaaagcctattttataataaagtgttgaatatttcatgtaacttattgatgtcctactgagtgcacatcactttcacaccatcacaaactcaaaaattgtaaatccaagtcagggactatctgtaatttaaaggtagaacccacaggatttcctgatggagtatgagagaaaagagttagaatggaaagaatggagtttctgtcaactgagaggaaaaaggctgcagatggggcagttttgggggcgaggggggaataaataaattagtttgggacagttaactttgaggtgtcctttggatacgtaagaggaaaatgacgaataaacagttgaatatttgagacgagtttgggagatgtctaggatggaactagaaatttgggagtcattggcttataaatggtattgtaagccacgagactggatgagatcaacagtgagtgtatactgagaagagtaaaggttcaaaaacggagtcccgagggcattctaagaagcggggagaaaaggagaaatcagcaaacgagactgaagaagaccggtgtccaggaggccaagtagtgtatttaggaggaaggaggactggtcagtatgtttaagggccagtctttccataatctctgccaaatggaccttctttcatccagtttttatggtcttctgtccagtactgagaccctccccagagggaactgtcgcggccttaccatagttgcttttttttctacggtttacatagcttgtgatttagaattctcctttattagcttaaatactgcagtataatgattaagggtcaggctcctcctggagctggcagagttttccaagggatcccatcctttaccacttttaggtagatttgaagtaaggaaaagtgagagcatcattcattctccggtcagtatccagtcatcacagaacgttagaattaaaagttagcccagcaactggagctacagcaaagcccacactttcaagaggaagagcgtcttttccggcgtcagtccacctaacactcattccattatcagtcagtaattctaggcgtccgtcacctctgccaaaaagcaaaaataggcaagccgcggtgccatctgttccccggcccgctccccatactttcgctcagccgtaccggcgcgccgcaggcagcactggcgggggcctttcctgccgccgacgccggggtcctccctcaggtctcattctgtgcctgtgaacatggcggcgcccgttgtcacggccccgggcagagctctgctgcgggcgggcgctggacggctgcttcggggaggcgtccaggagctactgcggccgcgacatgaagggaacgcccctgacctggcctgcaacttcagcctttctcaaaatcgggtgagggctgagtctggggtagggggtagatacgctcgagtattgtttctggaggcgcactgggacctggagggggccgatgtgggggtggcgggctttccttgaggggctggcggccgtggtggagggagagggtgttccttgtggagactagcttaccgtcgctttcctggccgccagggcacggtcatcgtggagcgctggtggaaggtaccgctggccggggagggccggaagccgcgcctgcaccggcgacatcgcgtctataagctggtggaggacacgaagcatcggcccaaagaaaacctggagctcatcctgacgcagtcggtggagagtaaggcccgggccgaggcgcttcctctcaggctggtccggtttggcatcagctttttctagcccgtccccctcaactatttgccttgctttttctttgtggaaacaatccaactctatatgtgagaagaggaagccataaaaactattgtgattgtgacactggcctccagcattgaaaattaaaacataaaggcagcaacatcattaacagtgtgtggggagaggagcctgacaatttgtgccacagatactgaaatcctccatgggacgacaactccctctatacaggggatattaaatttatacatcaagttctaaagaaactaattagcagtctcttaaatcttgttcctagtgaatatgaattagcatttcttttaggaaaaataagcactgtgagaaactaagaggtgcttctctttttgacatcttttctttagggactcctagatggttctaattcccctgtctctgttctaattgacagatgttggagtccggggtgacctggtctcagtgaagaaatctttaggccggaatcgactccttcctcagggactggctgtatatgcatcccctgaaaacaagaagctgtttgaagaggagaaattggtgagctcaaaggaaggacagagagacttggggagataaaacttcttttctcttgcagcttccttccctttgacatttaacttaacttgaaaatgaaataggaactagaagaacaggaatgcagaagcccagccaatgtccaacataggaatagtttgatgctatttaacatgggctcatttttcttttactgcttttcatctttaactttcttttctagctgagacaagaaggaaaattagagaagatccagaccaaggcaggtgaggcggtgagtagaaacataaaaagtgtttatttgtcacaagacttaccaacctcaccctgagagtctccctgattcccttgaggtctcctgattgcagacccaagagtgggagaaaggggaagtgttgtggctgccccacaaaacaggtatggagacctcttgggagatccctgatgtgttgggtgaagtgccttaaagtaccaagggaggtcccaatctgggaatcagggaacccatggaatagtctgagatgagggctctgccttcaaggatatttacgtacaagttggagagaacatggacacatgagaagataatcagtacaggcacccgccaccatgcccggctaactgttgtatttttggtagagacagggtttcgccatgttggccaggctggtttcaaactcctgggctgaagtgacccactttgggagacccaccttggcctcccaaagtgctgggattacaggcatgagccatcttgcttggcttgcataccctgtgaccctgacatgtttcctctcctttgactcaaactcataattcctttcagacagtgaaatttctaaaaagctgtcgcctggaggtagggatgaagaacaatgtcaaatgggagctgaaccctg

SEQ ID NO: 1454 - DNA, 4001 bp, Homo sapiens
cagaatccagaaagacacctacttggagcagtaaaaatattattggtcgttttctgccctccacccacccaagccaggaaatgaaagttgctaaactagttttggtagatttttcttggaagccaagagattgcacatcactggatgtaagccacagaaggggtctggggagaaaggactactgagatgaacagctagaaagtacttcccgttattcaactatttctggatctgagtccagcttcccatggactcttatcccttgaaccccagatcctggctcagctcacaggcttgtctgcatgccaggtgaatggattgcttatatctagctccagaattagccttatgtactatgacatgatagaagggtgaaatcccctacctattccctccccattctcccatccaggctcagtcacctttcccggttgccttgatccaaggcctgatatgggatatccaggaagagtcgacggtcacagagaaggccgtgccaatgggcagaggtctgggaggtaaggcggaagtgaaagtctaactgtactgggtcctggtggagcagggggtcagtagccagcaccgtcaagttcccagcctggaaaaggagtaaaaatgctcctctagtcttcaaatcagacctcaggcagatgggggtgtgtccgttgaagcaaggtgggcattgatggggagagcctgggagaattggagccaagatcttaaagatgcaataatatcccttagtcccaggaactaatagcctatgcctattgtggagttctcctttatatcaaacaatccagctgaggcagtattactgcctgttgacttcaacccaggagtacaataaccatttaggaacttagaaatgtttacatcagagagcttaggatttaaacaaagctttataatgtgcttcctttctcactaataatttccacttttttcattatatgggttttctctaaattcttctatttaaaatgccatggttacaaccaggcttgttattgcaatatgatatgtgggcaagttctggattccagatcctgcttagcatctttaagcaggatcttggcataaacagctttatgtcccagaagtcctacagagtttgttttacctttgtccccactccctcttttcccaatcctgattttcactaccatctgtatgaccttgattttacagtctgtgggccagaatgcttgtctatatagcaagtagcttttacacatgcgttccaagattccatctacctctgtaattcatcttccaacttgctaatgtccctcctctgcaaggtatgcaagaaaagggttgccctgtcacagcactagctcacagtccacttaccgaatacagttctttaagctggtcgtggttaccctgctcggtgcttttgccctcctggaggcctactagggactcaggagcactggaggcaggaacggggctggagtgtcaagtcctcctcttccttataagtgatgctggttgggaaagagacccaaattagtttatcttggaatctgaggtgggaagatacacagtaccaggctctggcatgatcttctgtattttctgttgtccagcctgtttctatgttcctgggcccaaccagatggaaaaattctaaagttccatgccagctttccaccccctattctgttgttatttcttgccatttgggaaattctttcaaattcttttactttttccttacattttatataaacaactacaaatagagatgaaaacaagtaccttttataacaacgaggcagcatcttctcccggagagtgatccggtacttgtaacagtaaaggtaataggcgtatggtgaccagatcgggtagaggtagttacgtgtttttcccctcttgatataagaaagggagtagacagaggggcgacacctcttacaaggcagtttttcagttcagtgcctccctgtggcaaagtgaagttcacaggtgggtggcagaggtttaggcaacctggtggcattgtgacccagtgggcactatgacatggataaggggtcagcccttatgtcacctcaggactccactctgctgcttatctaccctaatcccttatccaaggctcatattcgactagtatgcatgttatggctgtatgaatgattaaaaaatagaacttgaagacttctgtactggttggccaaaagccctgcctgagcacttgtgcccacccaccctgctcctctgtggacactccccttcccccaaaatccagcaagtaaagagttggtatctgactcttccaaggctctgatccagtggtgacctgattagttggttcccagttcataccagttgagtatttttattatcatccctacccttaataacccaggatccttgtagggtaggaattgcaaactaattgtctaggccccttcaggggcctagacagcttatggaaattagtggagtggcagggtagggctgtagcaaaataggaaagctcacacgttatctaaaggaagtccacacaactcaattccatccagttccatgcaagaatgcagacttgatggtgctgtatcgtatgatttttgaacagaaactggaaagacagttttgtagtaaatctcaccaattttaaaaaatatcgactactgggccgggcacggtggctcacgtctgtaatcccagcgctttgggaggccgaggcgggcggatcacgaggtcaggagatcgagaccatcctggctaacacgatgaaactctgtctgtactaaaaatacaaaaaattagccgggcgtggtggcaggcgcctgtattcccagctacacgggaggctgaggcaggagaatggcgtgaacccaggaggcggagcttgcagtgagctgagatcgtgccactgcactccagcctgggcaacatagcgagactccaactcaaaaaaaaaaaaaaatcaactactaaaaaattgttgataaaaaaacaacattgtaagcaaaatttggttctgggactgccactttgagacctctgcatatttatccattcaacaaatatttattgagggtctactattagccaggcactattctaggtgcttgagatgatacatcagtgaacaaaacaaatccctgccctatggaacgtatcttctaaaagtgagaggacaaacctagaaaataaacatagtaaattgtttagtatgttagaaggtaactgctatggggtggggggaatagagcaagataaaggaagataaggaatgtgaaggggatgggtcagggttacagtaagaaatagggtgatctctcactgaaaaaaactgacatttaattaaacacttggaggatgtgaggttgttaaccaagccagcatctgaggataagagcatccaacgcaaaagcagccagtgcaaaagccctgagcaggaaacgtgcctggtgttttcaagaaacaaggaggccactgtgggtggagcagtgtaaattagagaggagctaatggggtcagagtatgtatggccttgtagaccatctgatggcctttttcttttaccttgagtaaaggaggaagtcattacaaagttttgggtggaagaatgacatgatctgacttatgctttaaaaagatcattctggctgctataaataagctacatagaattataaactgtagagaattaagggatatcttttaggggactattgcagtaatccaggagaaagtagtgtcttattccaaggtagagcattggaggtggtgacaagtggctggattctggaaatacaagtgctccttgacttaaaatagggttatgtcctgataaacccatcgtatgttgaaagtatcataagttgaaaatgcatataatacacctaccaaacaccatagcttagcctagcctatcttaaacatgctcagacaacttatccgacagttgggtaaaatcatctaacacaaagcctattttataataaagtgttgaatatttcatgtaacttattgat

SEQ ID NO: 1455 - DNA, 4001 bp, Homo sapiens
tttaggggactattgcagtaatccaggagaaagtagtgtcttattccaaggtagagcattggaggtggtgacaagtggctggattctggaaatacaagtgctccttgacttaaaatagggttatgtcctgataaacccatcgtatgttgaaagtatcataagttgaaaatgcatataatacacctaccaaacaccatagcttagcctagcctatcttaaacatgctcagacaacttatccgacagttgggtaaaatcatctaacacaaagcctattttataataaagtgttgaatatttcatgtaacttattgatgtcctactgagtgcacatcactttcacaccatcacaaactcaaaaattgtaaatccaagtcagggactatctgtaatttaaaggtagaacccacaggatttcctgatggagtatgagagaaaagagttagaatggaaagaatggagtttctgtcaactgagaggaaaaaggctgcagatggggcagttttgggggcgaggggggaataaataaattagtttgggacagttaactttgaggtgtcctttggatacgtaagaggaaaatgacgaataaacagttgaatatttgagacgagtttgggagatgtctaggatggaactagaaatttgggagtcattggcttataaatggtattgtaagccacgagactggatgagatcaacagtgagtgtatactgagaagagtaaaggttcaaaaacggagtcccgagggcattctaagaagcggggagaaaaggagaaatcagcaaacgagactgaagaagaccggtgtccaggaggccaagtagtgtatttaggaggaaggaggactggtcagtatgtttaagggccagtctttccataatctctgccaaatggaccttctttcatccagtttttatggtcttctgtccagtactgagaccctccccagagggaactgtcgcggccttaccatagttgcttttttttctacggtttacatagcttgtgatttagaattctcctttattagcttaaatactgcagtataatgattaagggtcaggctcctcctggagctggcagagttttccaagggatcccatcctttaccacttttaggtagatttgaagtaaggaaaagtgagagcatcattcattctccggtcagtatccagtcatcacagaacgttagaattaaaagttagcccagcaactggagctacagcaaagcccacactttcaagaggaagagcgtcttttccggcgtcagtccacctaacactcattccattatcagtcagtaattctaggcgtccgtcacctctgccaaaaagcaaaaataggcaagccgcggtgccatctgttccccggcccgctccccatactttcgctcagccgtaccggcgcgccgcaggcagcactggcgggggcctttcctgccgccgacgccggggtcctccctcaggtctcattctgtgcctgtgaacatggcggcgcccgttgtcacggccccgggcagagctctgctgcgggcgggcgctggacggctgcttcggggaggcgtccaggagctactgcggccgcgacatgaagggaacgcccctgacctggcctgcaacttcagcctttctcaaaatcgggtgagggctgagtctggggtagggggtagatacgctcgagtattgtttctggaggcgcactgggacctggagggggccgatgtgggggtggcgggctttccttgaggggctggcggccgtggtggagggagagggtgttccttgtggagactagcttaccgtcgctttcctggccgccagggcacggtcatcgtggagcgctggtggaaggtaccgctggccggggagggccggaagccgcgcctgcaccggcgacatcgcgtctataagctggtggaggacacgaagcatcggcccaaagaaaacctggagctcatcctgacgcagtcggtggagagtaaggcccgggccgaggcgcttcctctcaggctggtccggtttggcatcagctttttctagcccgtccccctcaactatttgccttgctttttctttgtggaaacaatccaactctatatgtgagaagaggaagccataaaaactattgtgattgtgacactggcctccagcattgaaaattaaaacataaaggcagcaacatcattaacagtgtgtggggagaggagcctgacaatttgtgccacagatactgaaatcctccatgggacgacaactccctctatacaggggatattaaatttatacatcaagttctaaagaaactaattagcagtctcttaaatcttgttcctagtgaatatgaattagcatttcttttaggaaaaataagcactgtgagaaactaagaggtgcttctctttttgacatcttttctttagggactcctagatggttctaattcccctgtctctgttctaattgacagatgttggagtccggggtgacctggtctcagtgaagaaatctttaggccggaatcgactccttcctcagggactggctgtatatgcatcccctgaaaacaagaagctgtttgaagaggagaaattggtgagctcaaaggaaggacagagagacttggggagataaaacttcttttctcttgcagcttccttccctttgacatttaacttaacttgaaaatgaaataggaactagaagaacaggaatgcagaagcccagccaatgtccaacataggaatagtttgatgctatttaacatgggctcatttttcttttactgcttttcatctttaactttcttttctagctgagacaagaaggaaaattagagaagatccagaccaaggcaggtgaggcggtgagtagaaacataaaaagtgtttatttgtcacaagacttaccaacctcaccctgagagtctccctgattcccttgaggtctcctgattgcagacccaagagtgggagaaaggggaagtgttgtggctgccccacaaaacaggtatggagacctcttgggagatccctgatgtgttgggtgaagtgccttaaagtaccaagggaggtcccaatctgggaatcagggaacccatggaatagtctgagatgagggctctgccttcaaggatatttacgtacaagttggagagaacatggacacatgagaagataatcagtacaggcacccgccaccatgcccggctaactgttgtatttttggtagagacagggtttcgccatgttggccaggctggtttcaaactcctgggctgaagtgacccactttgggagacccaccttggcctcccaaagtgctgggattacaggcatgagccatcttgcttggcttgcataccctgtgaccctgacatgtttcctctcctttgactcaaactcataattcctttcagacagtgaaatttctaaaaagctgtcgcctggaggtagggatgaagaacaatgtcaaatgggagctgaaccctgaaatagttgcccgccacttctttaagaatgtgagtgagtgttcccaaaaaccactctacccctgaggtggaagctgcctctggaaaggaggcctgggattgatccctttgttaggaaggggtgtgatcatccagttgtagttaaggaaagtattcttggttagtttgcaggaatatgggaaggaaatggctaaggactaaggatggtcacatagaatttgaagactgataggaaaaggtggtggtttccatttatttcctgtctacctagggaaatgctggggatttgtgactcactggagaattgttacttttgtggatgaagtggttttggcctcaagccctgtttctctttgtgaatctacctccctttctgagaaatcagaattgaatttctctactaccgtctatgaaggtgtatgcccttctctcccatggaatcagccagagtagacaccccagttttattcatccctgtgcagggaatcctgtaaccctctttatgaggttcc

SEQ ID NO: 1456 - DNA, 4001 bp, Homo sapiens
cagcctccccacccacagcagggctctggggctggggaggacctgggcaggggcctgcccacagcagggaccggggtccgagtttcaccctttctgggaatttgcctctatgggctcctcccaggactcaaaagggctactttgacatcaactctgcagggcccatgagctctgggctgtccccagcactctccaaagtcatacagtcaggccaggtgtggtggcaagcacatgtaatcccagcactgtgggaggcagaggtgggaggatcccttgagcccaggagttcgaggccagcctgggcaacatgtgagacccccatctctacaaaaacaattaaaacaaattaactcgacatggtggcaggtgcctgctgtcccagctactcaagagactgaagcaggaggatggcttgagcccaggaggtcaaagctgcagtgagctgtgagtatgccactgccctccagcctgggcaacagagcaaggcccagtctcttaaaaaaaaaaaatcatatagcaggtctgtgggttccccaaaagcagaacggggcatcctctcccccaacctctgccacacccagatccccagctggccctgccagggtcacagtggaacagatgaggcagcatgtgtgggtagcctctctgggcctagaggaccgggacaggtcagggagctcccgttactgcctgtgctgaagggacagaggtgcacaggctgaccttggcctgggaagagcgggtagagactgaggtcctcatcagctgccagggacggcactatagccctgcattctgtcgcctggtgcaggcccaggaggccgactgcagggtctggggggctcatggcagccccatcaggaggcgtccccaccggtcagcaggcctagggccagagaggggctcaccaagcaaagacacttgagggttcaggagtcatcctcctccctgacaacccgtatcacagatgaagaaacaggccgagcaggaagggggccaccacggtcacccgtggggctcccaggaatccatcgggcactgggacatctgcagaggctgtcttttttctctgccacgttttgggtctgggcaccccacgagcttccccaggagggggagacttcagcctcccaggaaagccttttacccaccatggaccacacttgggctcctcagccccttgaggcctcattccaacgctgtgggacgctccccccccccccaccaaaccatgccccgggtgacaggccccacccacagccgcccacccctcagcagcccctccaccctgactgttgcagaactttgccactctggtcttccaggggcccgggaccatcacagggaagagtccagagtgggaggcagctcccagggtgccacctcgctggccctccccacccctacactgacagacaacctgggcagcctgtgctcccgtgcccttccagcatgaagttccaagggcagcgccccagggctgtgcttcaccttagaccccaccggaggcttcaagcgttctggggaaattttttcctggagtcaggtgtcagcgcccctctggctgtcccctctgctgagccaacaggcctaaaatagccccagctgtcagcgggcatctatctcagcagtgctgggggcagggccagccagacccccaggccgctctctgagcaagggtcaactccggggtagaggggacggtgggtgcagggcaccgccccggctaccccgcagccccaggccagcctagtggctccatccccatgtgagcagcccagctccggggctcagagggagcagaggctggaaccccagccccgccacagggagctgcactgtggccagaccctgaaggcttccccactccccagacatgacctttagtggagccaccctccagggcacagaacagcccccaccctgcccggctctgtctcctcacctctctctatgggggctctgggcagcacgcaggctgggggcacaggctgggaggcaggggctgccgggtctcacctccctccgagggcccaggaccagcaggctgcctaccagcagcccacactccggccgctcctcaaactggacggggacaaaaggacaggcggacactgtcagctggagaagcctgggcccgcccccaccccaccccctgtgccggccaggccggcccagcccagccccaaaatagcccgggtgtcactgtcccggattcagtttcaccctcggccctgtgggaggcaaagggcagatgcttggggccacagcaagggagagggggacaaatgcctgtgtccttagcaatgatggaggccaggggtcacagccagggatgggggaccctgtgtcctcagcagtgatgccagccagggggcaacggccagggatggggaacagacacctgtgtcctcagcagtgatgaaggtcgggggccatggccagggacagggaacacctgtgtcctcagcagtgatgcaggccgggggccacagccagggacggggggaccctgtgtcctcagcagtgatggaggccagggttgcctgtgttctcagcagtgatgcaggccagggcccacagccagggaccgagagacccttgtccttagcagtgatgcgggctggggaccacagccagggatggggggaccccatgtccttagcagtgatgcgggccaggggccgtagctggcctactctccccttcaaaccagcatcctggcatgtggggcaggaaggagcctgggggacccaggaaggctctgagggagacaagggaccaccccaagaggagcccaggatggatcttgaggcagccccagtactgcccccagaggggacccaggacccacctgagggccagcggtggagggatgggggcaggagcctggtgcaccctgcttggccaggcccaggccactgcccacccgggggctctcctggaacactcagctgggtctcagagtcatccttacatgggagcacaggagtgtcctgtgagaacccagcctgaccggggggagggaccagccctggggaggggatgctgatggcaccctgcttcatacccaagaggggctggccctgtccccacggccctggccaggaagaagtgtggaccgggcactgggcaggccccaacgggggaagagcagccagagagggccacccagtgggagccctgtgcctttccatggagggcccaggtccagaggaggagccgagtctctacccacagaggcctccatggagggaggagggagccaggacggcatgtgaggcgggaccctgcaccccgcacctgggggcatttatcctgcggtgtgctgccaacagggccccagctaccagcaccagggagccaaagaaggggccggccgggcaggatctggagctgggcccaggaggacagctcaggctgtggcaggagggagggtggggaagatgggggtgctcagaatctgctctgtgcctccaggcttcgccccatccctgatccagtgccaggcctctatgtgtcctcacagcgtacctcaggctcttccgggcaatggccaacatctctcatgtgtcctcaatcagaaggagggtgaggggtctctggagtaacggttatgccattctgcagccttatctcatgactgatcacttccaaaagctcacgttctaatcctgtcaccttgggggtgagcatttcaacgtgtgaatctccgggacacacattcagtccacagcaccagggagaaaggaaaggctggaaggagagcccactcccccaccaggagcttggccctgagctgccccagccatgcagaagtgtgtgtgcattgtgtgtgctcgaatacgtgccccaccccctcccggacagggccgtggagggtgcagagaagatggctgtgcgggccagccccttgcagggcctcctggacctgggagaagcaatgcccccacagcctccaggagtggcctgccctcctgaccctcttcactgctgcctgc

SEQ ID NO: 1457 - DNA, 4001 bp, Homo sapiens
aaaaaattagccaggcgtggtggcccttgcctgtagtcccagctactcaggaggctgaggcaggaggatcacttaggaccaagagttcaaggctgcagtgagctacaactgcattattgcattccaggctgggtgacagagagagaccctgtctctcattaaaaaaaagaaggaagaaaggaagaaaggaaggaaggaaggagagagaaaaggaaaaggaaaaggaaaggagaggaagtagaggaagaggagaggagaaaagaggagaggagagaaggaaagaaacaaaggaagaaaggaagggaaggagggagggaaaagaagagaaagaaagaaaggaaagaaagaaagaaagaaagaaagaaagaaagaaagaaagaaagaataggatgcctataaagttatttgtctgaggttactctgctagcagcagaatagacacagaaccagagaacttgtcttcgtagaaagaaaggaagaagaaaaagagagagagagaaaagaagacagaaaacaagaagaaatagaaaacctgaacagactgataaaaaatcacgattgaatcagtaatgaaaaatctccaaagaaaactccaagactggatggttttaccaatgaattctactgaacctttaaaaaagaaataataccaattattctcaaactattacaaaaaaatgaagcacagagaactcttaactcattctatgagatcagcataaccttaataccaaaaccaaagacacaaaaaaagaaaactacatgacaatatccctgatgaacatagacacaaaaatcctcaacaaaatactagcaaaccaaatgcaacagtacatcaaaaagataatacatcataatcaagtggggtttactccagagattcaaggatgatccaacatacaaaaattaataatgtgatacatcacaccaaaagaatgtcaaaaactatgtgatcatagaaagagagggaggaagggagggaaggggagggaagggatgagatgggatgaagaaggaaggagaaagaaagagaaagagaggaaggaaggaaggaaggagagagagagagagagaaagaaagaaagagagaaagaaagacagacagaaagacggacgatgcctataaagtcatttgcctgaggtcactctgctaggagcagaatacacacagaatccgagaacttcaaagtctttgctctttccaccaaactacagtctatgctcttcacacaggtcccaaggccacccaattgccagtaaaaactttttcaccttttaaaaatttaggattaggctttaacattaacttctaaatgtatcaagtttaacatacaaacagtacaactgctgttaggggccattaattttactaattgaacatcagcaaaaatttcaaagtactaacaatatgaaagaataccaggatagccatataataccacttttataaaggatttttaaatagaagagtatactaatgtgtctgctaaggtaaatctttaacaataatggtggatacatccccataccctgcaaatcctgaaacctgcaatgcagctataatatacactgttgctcagaacctgaagcaatgatttacaccacaggagttaccacaaactcaaagtcaaattgcaaaaacaaagccacactgagatggggctgctagactgatggactatgtgaacaggtcccacatactgccctcccaaaactctcaatccaattgttgcatgtaagattcaaattcatgttccagcaaaattataaattattagtaaatggaactttagggttgtgaattacgagaaggataaatgttaaatctgccaatcatagaatccagcatactaggaatataaaaaaaagattataattagtccatcaaacttaacatactagctatcagtagtactaaaagaagttggttatatagaggagctatgctttttttcctatgaacataaaaatattcccttcaaaagctaatgtgggctgggcatggtggctcatgcctataatcccagcactttgggaggccgaggtgggtggatcatctgaggtcaggagttcgagcccagcctggccaacatggtgaaaccctgtctctactaaaaatacaaaaattagccaggcgtggtggtgggcacctgtaatctcagctactcgggaggctgaggcaggagaattgctggaacccgaagctaatatgaatgtttcaattatgtacatatctaaatgtgaattgcaaatccactaacatcagaataataagaatggggaggccgggcgcggtggctcatgcctgtaatcccagcactttgggaggccgagacgggcggatcacgaggtcaggagatcgagaccatcctggctaacacggtgaaaccccgtctctactaaaaatacaaaaattagccgggcatggtggcgcgtgcctgtagtcccagctacacaggaggctgaggcaggagaatggcgtgaacccgggaggcggagcttgcagtgagtcgagatcgcgccactgcactccagcctgggcgacagagcgaaactccgtctcaaaaaaaaaaaaaaaaaaagaaaaaaaaaaagaatggggagatgatgatgtagctttaaaaagtgtactcaatattttaacttgcttttgattaaaaaaattttttaatacagattactgcgatggtataaattgttatgtttcccaaaagctgcaatcgttattaatgggtaagatactgtaactcagccttttttaaacgtaatgaagtctgttagagtaatagctgagaagcatataaactagtgtagtttatataaatagtacctactaaaggagctattatatagtatttaacactaataatattttgattatggctaaattatttaaaatactcatagatatcaacaaaaaatactaactttaaaatgttaacaaagtttactcattctggcaggagaagttcacttggaattaatttttttaaaaatcctccctgaaattcttaattgttgacaaatttgctaaatttgatagtgttctaaaacgtttttctagagccaagcatggtggctcacacctgtaatcccagcacttcgggaagccaaagacagtggatcacttgagttcaggagtttgaaactagcctgggcaacatggcaaaaccctgtctctaaaaaaacaataccaaaaattagcaaggcatcatggcatgtgcctgcaggcccacctactagggaggctgaggtaggaggactgcttgagcccaagaggctgaggctgcaggtgagccatgactgtgccactgcaccccagcctgggcaacacagtgagactctgtctaaaaaaaaaaaaaaaaatctgagtagcaactgaaaaattttcatccaataataaaagatgatatactgcttgaaaatatagataggtagctataaaagatgacgtatctgctatatcttgatatcttattactatatcagttgaagatacgcaaaaaagtacttattttatactcataacttttttttctggaatttcattcaaaagcagatcctcaaatagcatttcacaacgatcagcaactgtgttcaatatatccctctttactgcctacagggaaaaacacacaaaaaacacagtaagaaataaaatactttagatttacaatatttaactaacaaaaaaaataatttgctttccagtacaatcatgcccactaaataactgatacatcattcaatgttttatttccacttatttagcacacttattaacaaatttatagtttaatgataaatttatctaaatagttaaaaacagataaatgaataaaatttcacatctaaaaaaataattgcagtgttccaaattagatactaatatgtataacagtggaacacttactaaacttgtatagccatcatttttaaaaaggcacaaaatagatactctacatatgaaaatcttcacaccaattatatggtacatttgg

SEQ ID NO: 1458 - DNA, 4001 bp, Homo sapiens
gaggcggacgttgcagtgagccgagatcgcgccactgcactccactgcggcagagcgagactccatctcaaaaaaaaaaaaaagccatgagatactaaaacataaatataaaaatctacaaagcaaaaagtaacacacaaacttgcctttattcagtcaggttttaatactcataagttcaatttagattcaaaagatgaaaactgttctggacaaggaaatgagtgatgaatgagctagctaaaagcacagactacaattctaaagagagagagcagaccgcgaccagatcactaaattccattgttctaaagtttgtcacaaggaacttttgggatagaaaaactacactataaatacacatccattgtgaaataagaagatgaaaaagagaagcaaaaagcaaatcataaacatgatcatgacattcttactataagcagaatatcaaactaatttcaaaagcagacaggttttctgcagtttgtttctttttccttttttttttttttttttgagacagagtctcgcgctgtcgcccaggctggagtgcagtggcgcgatctcggctcacggcaagctccgcctcctgggttcacgccattctcctgcctcagcctcccgagtagctgggactacgggcgcccgccaccacgcccggataactttttgtatttgttttagtagagacggggtttcaccgtgttggccaggatggtctcgatctcctaacctcgtgatccgcccgcctcggcctcccaaagtgctgggattacaggcgtgagccaccgcgcccggcccggtttgtttctttaaccttaactcagttgcacttaaaactccaagaacctcattcattcaaaaacacttgaaaccgtactatgcgttgcgtgatgaggaaactgtcttcgaaatagattttatccccaacagcagccccagtatggttattctcagtaaacaacaagcaccaccactcactaaccacctacattcggtgccaccttaatggccctgcgtttacttaatctcgtattacaaccaccccaaagtgatgattactgttacagttatcagtaaggaatccaggaaggttcagtgacctagacaaggccacacagcgggttcagtggcagagctgggactgaacacaagtcggcctttagcactctccacgaccctaggtcaatcccgcactacaggggtcgcctataggggctggaacctagaggaatcctggagaaggaattatttcctgaggattcctgtaatatacctcacttacgaagcccccagggcttcctacaatctgatatatcacatgatgggcgattaaaaaccagcccaatgattaagaggtcactatttctgaaagaaatgcaaccatatccaggaacggcccggtcaggacttcgttctgcacaagcccacctcacgctaacatttgccctgatgtcccggggaccacacccttcctaagagtgagtctcgccgcccttttcccaggccaggtagtcagcctgagggaggtggagggtttgcgcggagggggctgggtgggcgcgagggccttttacttccgggacccaccactgccctcacctccagaccgctaagggctcccgcggtaaacgcccagcagcagctaggctccccacaaagtcgcccccaacccaaaaggcgtacttacgcccccgccgctgcgtccgcacgtcgtcgtgacgacagcccgccgtcgccgcgatataaaaaaagggtcagaggcgccacggctgctgcaatggaaaccgtggcaatccttcttgtgctctgagtcggctaggagggagcgggacgcagggggcactacagtgggtagactaggaaggaaggcaagggacgcgaggtgggaaccaggcgaattcctagacctgcttgccgcagaagagtgcccgctcaagtggaacaaaagcgcagctagtaaccggctagtggcttctctggcaacggcggccccacccctcccgtcaggcccgcagcaggctgccgattggtccgggttagggacggcgggcagcgcctatagctattggagagggtgaggaacggggcagggagggcagcttcgtgtctatccttgtttctcgggtaaacatttttttttaagcgtttgtttatggacaaggacagcatttgtgtacgttaccgaaaatcataaccgagcccaactagaaaaaaaggaaataaagccaattccgagttttctggcgcttggcctggttgtgccctgcttttgctttttaaagagaagatttgaaaacgtgaaggcaactgcgaccggaagaaacctccttttaaatgtatagtagtatttttagctgagatgcctccctgggcctcaggttttttcctgttaaatgaggaagcctgaggatgttctgcaaggtgccttcagggtctcaaagtctttcgtatctgtgccacagccagctggtctggtttataaagtcctgaagaagcaaagcaagattttaattggaaaaatatcttcattcaatgcctctacttaatattcatgttaagaatcgtacaccaacctatgaagttcacaagtagagtaactgtcaactaagccataaccgtggcatgctgctacctaaataattggtttcactaaagcactccagcaatgtttttccaccagtactgtaattgtccctttcataatttaaagcgggagacagaattagtaaattttttagtaaagggccagtgatatggttaggctctgagtccccgaccacatcccatcttgaattgtaatccccataatccccacgtgtcaagagagaaaccaggtgaaggtaattgaatcatgggggcagttccataatccccacgtgtcaagagagagaccagatgaaggtaatggaatcatgggggccgtttacccccatgctagtgagttctcaagctatctgatggttttgtaaggggctctttcccctccactgggcacttctccttaacgaagaaggtgtcctgcttccccttcaccttccgtcatgattgtaagtttcctgaggcctccccagcgacgctgaactgtgagtcaattaaacccctttcctttataaattacccagtctcaggcaattctttatagcagtatgaaaatgtgctcatacagccagataatattttattaataggttttgcaggtcatatggtctctgtgatactatttaactctgccattgtcttaccaagaaaagccatagatgatacataaacataaacatatgagctcactaaagtacgtttgtgtgcaggatgcaacactacagtgttgggtagaaattgtgatttctatcttcatggcaacaaatggggactagaatgtaaaaatagcaggcaatgaaatagaataaagatacttgaatacaaataatacttcaaaattaaaaagcaacattttagataacctgtttgcagaggacaaacagaaggttaaatgaaagtgtgatggagaatcaccacctttacatctttgcactctttaatagtgccactaatcactggaattcccctaggactatggtattgcctttggtttaatcttttagtagataagggcagttccaaaggcttccactttgtcttcctattataatagccatgagtcaaaaagccaatgtcaagatgctgtaaatctcctttaaggttatgacattcaggtctcttcattagttctggtaaattttttgctgtacaaattaagtagaatcttagcagactatccatttcaattataggggcagtgattaattatcaactcctaaagatcccccttagtcaaacaatatgatacaccctgctggtatcatggtatcaacagatatctcatctctgatggctcagtggtatcacttggcctctatcactttgggatcttactatttccattagggaattagggatttcatgcaatggcagcatctttatccccaggcttatagaat

SEQ ID NO: 1459 - DNA, 4001 bp, Homo sapiens
atttactggtttattttcagtagccatagtgaaaccttttctacattttctgcttttgttcttcttcttattattattttcttcttcttattattttcttattattattattttttttgcaaaggggggaatcaaaagtaagaattgtctgtgtcaaaacatatacagacatacagcaatgctttatatttttcaactaacaatttttcaatcagtaagtaaagatatttaatttacttgtaagataactagaaatcctaagagaatcatgtataattttggaaatttcattctcatcagtcaacaataaaaaaaaaccaagccaatgtctatatacacaaaaaatatacatgtcagaatcaaggtgcaaagtttgaaatataactcattcattagtacctcagtttacattcattatcctgcaagagttaattcaacaatgatgttgttgaaatctggtacttggacattgaaaaaaaaattggctcagtaaatattagataatataagtttatgttttgtaattgtttattgatgtctatctcttgctttctttataactccaaatctcttttacatccttcctgccaggccacttcatgcaggtagggaagaggatctcagcaatggaggctctggggttccataagtaacctaagggaaatgaaaatgtaaaagcaggtcaaagtgtggcttgtatgtgctctgctggtgccttaagcactgggagaatctggaaaattatttaactttttggtcagactatactcagttgattaacattggttgatagattattattagtaacagcaaataacacttggaaatggagggctacttttctttccatatctgactttttctgatccactggagtaacccacatgaaagtgaaaacccctagttttgcttctgtaccttttatttcagggcagaggaattattttctaagaaattccttttatttgaatttgtaaatttctatttcaaaaaacaatagttttcatttttctttgaaatatcaaacatgttgctcactgaaccttgcttcaaactatcaggaaatactttgttagaaagtagggaggattaaaaagccattaattttagatgaatgaagattatacaagacagtcttgtgataggaagtcttcataaaatattaaaaatacaggaagatgtttttatcaagtaagttttctattgctcatgtttcttagctttcttaaaggaattttgggcaggccttaaattggcgagttttttcattcatttatgcttaaaagatgttagtttctttgagtgaattcattgcaaatagtcacaggcattgcattccaaggaagaatctgctgtagcagaactagatttgacagaatatactttgtagcttactttgtgggaaaaattatgaagatttttacagatattaaaataagtaaaagaataagaaacaaaacatatatatatatatatttttaagaattgcccaagcttccaagtaatatagttaaagcttttcacccttaagaatttaatgactctggtattctctttcatagctcatttctcaagcagtccatttttggggtataactataaagtgtttataaataaatatgatgaaagttaccacatagttactacatttttgaagctgacctgtaaaggcagaagcaaaatcttagcctttgcaatttacaaaacaaagcccactaaatgcacttacttctcaagatggccaaacccaccgcagtaacttactaaggtatccggagtcgacagcctcgtggtgttcagtcccaccaaggatgggagagtttgggacatccagtttgagatcattgccatggtactaagcacagcgccaagcttcagcagtggaggactcattgctgtggagctaatgagttttcatagtgactgattaagatcccggtgccgggctggcagcgggaggcgtgactgcagcgcgccacatctacagcatgaaaagagatcaacttccccagctctaatcacccaggaaagcttcggaacctccttcccccatcctcgtgggaagtgccctgcccttctttttcctcccttaccagacattttgctggatcatcaaacaaaatattcttgataggcttggttggtaattatcagagagcagaggttggagggaggcggaaacttgagctttcccagctccactttagttagttaccatcaacagaatccatttcctctggggtttgtgtaagtataatcagctactctttatctttcattaaaaaaaaaaaatacacctttaaatggaggtctgccaaagtgcacatttcaaacaccaaacttaatatctacagatttctctgggcaaggacagagtgcttttaggaagaacatgaaaataaagtctgcaaataattttccagatgatcatattgagagtaggagataatttttttttttagaaagtaacctaaaattagcatcattgctttaaaaatatagtcaaagattaatagctactgcttgtggcaaacattacctttaggcatcttacacctgaacagacagaaaagagaaaagacagccttgcagaaaaacttctgttacagaaattttatatgtgtttccagttttgcttttgagaatgaaggctttgcttcgtaggtgttcagtcacacaggaaactcagttaactctattttcagtttgtgaggaatgacggactgatatggaaagtctgtatcttgagagaacatgtgatttagtataaagggcacaggacttggactcaggaagtctgggatctagtatttgttctcctctagttagccatatgactggccggtgacaagattccttggcttcagttttttctacaatataaggatgttggaaaatatgctctccaaggtcccttccagctctcaaattcaatgatctgtttattagattacattagcaagtgtggtatatagaatccagggtttatgggtaactttattatattgttttcataaatactataaattttccacatccaaatctcaggttccaaatgaaagaaatcagaggtctttgtcttatccaatatatgtgttttaaagtaaaaatataaagagaagacacaaaacaaaatatggatgaatgaaaattaaatgaaaagaaattggttacaaaaaggaaaagtattgttttgatttcttaggagaattctggacttgtttgtatttggaatcttcagccaaagatatatatttttcttaaatagttttggcaggagaaataaataaaatgtccttaataaaactgaaagagatacatatttatagtgtgtgtatattttactttcaaaaacagctttaaactggggtggatgctaaaagactcctcaaatcttccttgcaactattagcttagaatccaggccatttttttttttcaaaatatatccaaatgactttaatcaactcttattttttaaccacagtgcccacaaaaccaaatattattacttttctattctttcaaaaatcatgccatatgaaaaaccaataaaggcacaatattttatgtattaaacttagcagaaagccctgtgaaattttacattagtattacaatgtgttaatgacaaaaagcaaagtggatttacaaatctaatgttgaaaaatacacctggaactctatcttactttaataaagaaggggggtgtcttttcaagagcttaatttccaaaattgaaagaaaatatacatataattactagataatttaagaaatgaggtggcagatggtaattatacttattattgagctatcagcctacaaaatagtagcatttttagaagaatataagattgaatgtcaggggaaaacagtgctctgatttgcaaattataaagaaaggaagaaatagagaaaaacaatacaaatggaatgcttcttgtaattttccagagatgcaaattactacactaaagaattgaagtagaacaatggt

SEQ ID NO: 1460 - DNA, 4001 bp, Homo sapiens
ccaagaatattcccaaatcatatggaatgtattcaaaagttttaaacaatatcatataaaaagagtggcagtggatagaatgtgtcactacagggtgcagagtcaagaagaaaaaaaattaaatataaaaacaaaatcaacactttttcctaagtgtaaaatgctttaaagctacaccttagtatataaaatatgcctttaagattattaagatgacattcacacagagtgaagcgtttacatcaataataccagtacaatcaaagctttaaaataaaatgaatttattctcatcaggtccttctaaatatgaaagagtacagaaataattacaaatatatacgacatgattctaagttttaactgtatactatattaggcctacaaatatcacaaccacagtattaaattatgcttggttacatcttagttctattcagtaatgaaaggaaacttaatttgtctacactacacacatgatgtaaagctttaaaaataactttataatattccaaaatatagcttgtattagttttatagcatggaatcattcttcctatattgtcaaattgctgttggccagttaaataagtaaaataataaattgtatctcttactctttttcaccaggtggcttatctcttattccctgtcattatgattttcttagaaggctgaagctttcaaattatctcactttgtcatcaagacttttctcagacatcgttgaaaatatttgtccatattttcctgtctttttatcaaaggagtttagcgttcactttcattgccagtactagataattttcagagttcaacgtctatgagttaactcatccttcctattgccctccttagtttgttaaggttctcacttcctgtttcttaacactgataatcagaacttcctcagtgccccctaattttcttaatgaaaaggaagaaacaaacacaagctcctttcaccaacgcctctcagccatggcagagagtatagctctgctgctctgccatgtgttttacaagcagcatcccaaatgttttggacacaaaccgcagcacgtctgcgatgggagtattattgaccaggatcagctggaaaacgcttccctgctttcaacaaagaaacggttcaccatgtcctaatacatgtttataaattgcattgtttctactgcaaactcctttgcattacccgtccgacttcaaaagagagcattaagcagttggacacggaataagctaaattccccggagagccgcattgcccgctgcccatgcacattatattttctcctagtccctccccccgcgcagtaggactctaccttgaggagctattcctccggtagttcaccttgttatgttccaagcagtggggatacgccagacaccataaggtagctgaaagagctgtctctcgtcccgtttttgacatatttatttgcatttctgttaggtttgttacatattgcacatttatttcaaacaagactcaaaatattgttcataccttggaaggatctaatccggcaaacaaagacagcagcaggaggttgagaaggttggacgtcgcctgcattctgatctgggtttttgcccctctttactctcttttatgtaggctctccactcactgcagagacctttccctcgtcagttgcactttctgcctgccagtcagagccgagtggaagcagaggcggcggcagcagcagtagcaataacagcagcagcggcagcggcggcagccgccctggggggcgatcattccgcaggcattctcagagctaggagtccgggagctctagagagtgggttgggctgcagtgggcgctggccgcggtgctgaagcgcctccaacccgcgcgccccagtttaccctctcccccgctgctatatagctagcccacctcaaaagttttgacccaaggaatagataaagggattaactgctgagagaggtgtggagacctggacaacggatatgacatcactacagctcctgggggtttcggggggatattttgcggggaatttgttaaccaaacaaggattgactctcgtgctccagttcagcatttgccggcaacttgagctgcagagaagtaaagagtcagctaaatacaggattatgaaacaaatagtgcactagaaccttctgctgtcattgacagaggacttgatattgtatttagtgctttaaacaaagtttgcagtgcagactatcagtgtgtgtcatccaaggcacacgattttcagctgttattgatagatgaatgtggtaatttatagatatgtgcagtcatttatgaatagcttattaaagttatatgttttggttaggtattaatgtgtatctatctatctagggatttggtcatctaaaaacactatgcataaataaataaagaggcttatattcttcttttagttataaatggtatattccattagtgatccccccagctgaaatatcccccccatatgcacagccatacctggaaatatagtttttctatcagtctgacttgtgtttttacttgaagaagaattcactgatagatggatagcgggatgggaagagtgtttatttctaagctttcaaacacttctgtaatctagggctcaagaaaaggcagaatagctgcctcacaagagcaaagaaagggtaaatggcaaactctcttaccctgcatcattcaaccttactggagcaatttcatttctttgaatatggaaaaagtgttctcaataatataaaaaggaagaagttggtagccaccctgaaacatccctctcgtacaattatgcctgtaatatttccatcttctattgatttttctagaaattataattcctaagggttaaaatatatagatagactgggtctgtggacattgcttccttttacttcgacatttaaaagacaatgaattgagatatcagacacataccgagtatgaaatctccatcaacctttcactgaaaatatatcctattttttaatataagaaatctcaattaggactcaaatgcatttgaaagttattgtccccaagaatttacatcatattgcatctgttttaatcctaatattataaatgtgtgtatagttacttgaggtctttattttctataaacataaatggcatgaagttcactacatctgataattctttttgaaggagtggatcatacaaaatagagattgcaaaatcatagaaagaaagtgaaattacttataatggtgttaatttaataatcttaacagccataaccatatttagaagtttccattattttgaggtaatagataaaactatagagttgtaccactctctggggtaacttcctagaacatatttgtcagagtttttttctttttacatttgcttcttaacctaaacttttctacctatcaacatctacatacttatctatctatgtaggataaaatcagcataatttttaaaaaatcacacatagaaattgttgaaaattctgcatccatttttaaatatttcacatgactgtgcagattgaaaatgaatttgcagaggtgtgttggctgaatgattataataatacatttttattatccattctctaaatacattttttgttatttgtatttacacatgcttttccctcttcccaagaagtcttctaccatcttttttacatctctacctctcaattagcagacagtagtacattatacttgtttgagtagaggaagctgtatttaacagacacacacagtaatatgaaaatataataatatcaattttatcacttcaagataaacagatattcttataatgaaaataatgttttttttctggaaacagaattattctgatctcatacatggtttacaatattagtgactgtaccaaaacttttatgtgggcacagttttttttctctttaactctccttttttatggcactggaatgtcatttgtaacaagaagttaataagaaggcaaattcta

SEQ ID NO: 1461 - DNA, 4001 bp, Homo sapiens
ctcttgaactcctgacctcgtgatctgcccgcctcggcctcccaaagtgctgggattacaggcgtgagccaccgcgcccggcctacccatgtatctcttatggtctttatctataaatgggtattagggtgttttgaagattgagtcagaaaaaacaagtttaagtacttggtaaacggacactttacgaagcccatcactatcatgggttactcgggcccccactgacagtctgccctagctgcctgcatctgcattcccactctcccctcccagtacactccgtcatgttctcagtctctctgtttgggggtcacctcacattcatcacacatgcttctgttctgacttcaccccatgctcccgcctggtgtcccaccctctgccataaagtatctcccgatgggatatgccatctgcctcctggtcaacatatccggctgttttcacattccaattctgacagacagccacatagacaagagatactttttacaaccctgaaaccaaaaacaactttgttttctttcttctcaagaagtcgagcggcatcttcccttccttcacctctcctttctcctgatttgatgacctttaagcaccctatgattttgcgaggagaacctatatccttccattaagaaaatattccgatacatgaaaaatcaaaagccctttccattggtaatggaaggaaaaacagctgccctcaaacacttcagcaaggaccagcttctggctctcaccaccatccagggcaagaagggcggtcgtggcactctgcatcctacctgagataaaacgttctcctggttgtccgcctcgttttgcagagtctcgtcctccgcaggcgccactgtctgcgcatctgggggctcgcttgtccctgtgaggacaatgctggacacccaggccggaaccacaatcagagcgaagtagagaactagcagccgaggcttggccatgaggggcgcgataagagtgtcctcagccccttcagagaatggctggggcggggggtctcggcaaggacttctgcgagagggtgtcctcgctagagcccgaaagtggctgctgagagcaccttctaaagctgggtgcggctgagcgggacgggagggtgcgccccagagactctgggcatctccttcccgacgcgagcagccctcgactgtgcagccccagtggagagccggacgcaaggaagaggggatgacggagaaggtggaggcgggcacgggctagctgagcgagtcgcccgcaggagggctcaggtggctggaaggcgttcggacagacgcccgcggtgcgcgccgggacgggcggcggggagcctcgggacgcacggggaccggacacggggagggaagaggcggtggcggcgcgggctgctgggcgagggctgctgggctagggagccgcggagagctcgcgcggaaggagggcggagcctctattgtgccggggcggcggagatgcagccagtgaccgcgcggaggaggaggacctggaagcgcacagggctcgggcggaggggtacccggcggaccccgtccccgctgggactcagctgccgcgcgccggctgagggtgacgttggaagggctttactttcttctcatctgatcgcaagtgagtgaagagaagttactccgagcggcgtccctgaagttttggggttcgaccattcttggcgagaagagcgactttccatcgcaggcacccagcgctcgctccaaggctgagctagttagggatctgcggcatcgtcctttagcacacctggggcaggggagaaggcgcgtttgttcccaggcgtttcttttccctgacttaactctgggcgagttctcgggcagctttgaacttagcgccgttggtagctgcttgcctgccacggctttagaacctagtaatacctccacccagaggaaaatcattgaattccttcctagagtgtgtcctgagttgtgtaaacgttgaaagttaggggaatgactgtacatctccgacactctccgcgagtccccatggggaaagctactgcctgataaatgattaccaaagggaacagctcttcctgtcttcctggtttgggacaaatctccgggtctctgttaccagattatctctaagagggagtccactttcaatagtgtgcaattatgttactatgtccctcaattactgaggacaaccttttataaacctacagtgaagattaccaatatgtgaatttaaggaagggcactgtgccatcctggacaactgtcactcggaatattgaacagagccaggccccttcaaaggatattatgcacccttgggaaattcaaacaccttgcttcttatgctgaggaataagggttgtaataaactaaggaaactagcgcatataagtaatagttgacataagtataataataacccttattagtatattttaatcttcaaaaaattcagtttatggacaaaaattcaatgctctgggtgtctaggtttgtggggacatcatgcacacaccctcctctgtgtaagctatcaaatcttttctgaaactatatgggggtaaacattgataaaatgtggtgtatttgattgtttgtttgagacagagtcttgctctgccacccaggctggagtgcagtggcgggatgatcttggctcactgcaacctccgcctcctgggttcaagtgattctcgtgcctcgaccttcagagtacctgggattacaggcgcacgccaccatgcccgtttaattttttgtatttttactagagttggggtttcgccgtgttgccaggctggtctcgacctcctggcctcaagccatccatccgccttgccctcccaaagcactgggattacaggggtgagccactgtgccccaccgataaagtgtagttttaaaattcagttaaggggcggagtgtggtggctcacccctgtaatctctactgaaaatacaaaaattagcctagcctggtggcatgcacctgtaatcccagctactctagaggctgaggcagaagaatcgcttgaaccctggaggcagaggttacagtgagccgagatccgccactgcactatagcctgggctacagagcaatacttggtctcaaaaaaaaaaaaaaaatcaattacagtaagcattgaatgttgattaagtgcaagacaacaagctaggttgctagacatttaatgggaagatgagatagtccacatcttacaaagtgggcgtgggagtcaggaggtaagcagaacaagcactgaaattgtgaggcagagtaagaacatatctcatggggtttaaataaggaataggtcacttctagtggaaaggtcagtgtggatttcatgaaagcatgatactgaagatgactgggatgatgggaggtttcaacaaaacagtggataaggcaacatgatgggagggggggccatggcaggggagagaaagagagcattctgggcaaagacataatcctgaatgtgcatattcatatttcagatggctgctcacttctcagggcagccttccttgactccaccaccagcataatttctctattaaatgctcccataataccatgtacctctttttcatagaagcaggagagatggatatttatattcctcctttgtgggttgttttgggggtgcctgtcttccccaccagactataaattcaagagggcaaggaccttgttagttttgctcaccattacatcttcagagtttaaccagtgcctagaacaaagtggacactaaataaatattggttgaatgaatggaaattacgaattgtccaactgggtgtaggctcagttacctttataaataccatctctgtatccattagggtgcatttgactgcaagtgatagaaaatccttctaggaatgtctcagtcaaatatacatttattatcccactctaagaagacaagcttggctgtttaaaatttaattcagcaactcagtgatgtcagcgaggaccca

SEQ ID NO: 1462 - DNA, 4001 bp, Homo sapiens
ttcctcatcagctgccaggtcgatgtaggtgtctgctgtcaagccgtagggggggatcagcccctctgctgggaatactgagctgtccaccactgttcggtttgccaggtggaatttgattagctgcaaagtgttctccatctcaccacctccaccaggtcttccaggaggcctccgagcaaaataaagaaagccaccatataccagctgccctgtgcctacccaggggaagggcacccggactcgggaagctttccgggcagccatggcaagggtgaagtcacgcagccttgggaagacaaaggctgtgtcattctgtgtcccatctaacacgtagatcttctctgtttgccccagtggatccttggtccatagaccagctgggccaccaaatcgcttcagaatcttcattgatctcacttgagagattgtgtagccacagtctgatgagaaaagcacaggaaaaggaaatagaggcaagaattagatgcctccagcaggaactcccccagggtgggtgatctggagaatagtgagcatttgcccagtggttgcctccaatcttagggagaattgagaaagagcgggtaccacagcggcctggatccccagaacctctccttaatagacctggcattacagaggtttccctaaaacagattccagaagacagagccacaatggactgggacaaagcgaaaaaaagagtaagaagcaaggaaggaagaatatcggttctgagaagagttaggggcctgctttcagattatttacctgtcaccatatcgtacttctcattccttcttcccttgcctttggtcccagggcctccagtcaccttctcatcaaactctacacagggcagagctgggttctgggtctccagatagtctacctcccgctccagacgatccactctcccggagatggtgtcggcctcagttctgagtgcctcccgctccttctctgccacctccagcagtggcagcatcttgttcttgaagtcccgcagctcagcagcatgccgactactctggtcctggcactgggccagccgttcctgaagggatgggggatcaggagggaggctgcagggttacaactcccaggcagggagaggcccaactcgggagtcaggaatgggaaaaaaagagcaaactcagccaggcttcaatatccccttccactcctgcagaaaaggaaaccagatgtgcagaggtgctaaatgtgcaaagagcctagctgagattcacctaggcccctaccccgactccatgtcctccagcctgtgttctctgtgagcagtgccactgagccatctgagcctctaggcaggtctaagcgcatgaaggtgtgaagaggtctctgctcccttagcaattatcctctcggacactaaaatgctacggatctcaacctgttaaaaagacaggaagttatagattccccgggaacctccaacttcaacagaatcatcaccttctctggagatgcagccccacaattttggctctcgtttccactctgcccccttattctatctaatcccagaggtaaaacgcaaaagtcgatttgctttggaattgttctatgtggggtaagaggagggcttgtcattccgaaggtcctcttattaagagagaattttctgtagactctaacagagccctttcttgttatccccagatccctaacaaactggttgaaccaatagccctggaatccttctaggcggggctagaagagaaaggggtccctcacctctaaagcagctagtcggcgttccatgtactccacaaggtggtgctgctgtccttggaggggtcccgaccatgacaaaaggaacaagatgaggagaggggtgctgggccccatggcagcctggagagtggtgccagagtagaaggaacgtacagtcagcctcttcccctcaagcccgagggttagctttggaggcggggtgggggcggtgccttctctcctgatctctgggtctctctcactactctggaatgctttcagttctctttacaacccccaccccctcctttccgccaggattgatcaaacacagatggccccattgcacagcagccagaagccttaaccacctcccgcctaggctgtagggtcctctggaggggaaagagatggaaacccgaaagcagaggccttctaggcagtcaagcagggaagctagctgcagaaagcagagaccccagagaaaactcagcaaacgccattcctgttttaggaaagtttcaccagtgctgacttaagaaactgacatttttcattaatctttccctttccctgcaatagagtgggttttcagccttgttcagtagaagctgggagctggggaggtgaggcttgaagggaggaagcaggaaaacaatggcccaagtggtcaagcccaacttattctaaagctcattggcgccaccttgtgctaagcagctggtgtcatctctcatgataatacagaaactaaggcttagacttcaccccatgaggaaaattttccacaaaagccaaatatattgaatttacaggggttttcaccactgaaatgcatatttcccccaagactatccaattactactttgggggctatgcaaatatctgatttagcccaaggaagaaaatataactgagattaaaaaaaaaaaaaaaacaggtcactgagaagttagtaaattaactcgatcgtctggaagttaaggctgacagcagcgctgttttacatggctttcctttgcttgaaagaggccagatatagtctctcaccaaaactgaggagtgttcagtgagttcacactaatttactatacattcatgtattgcgggggggcggaatctgatatatatatatatgttgttgcagtctagatcaatgtattctgacttccttaccactgggagaaaagactattggttatttctcttggttgtggtccaaaagggtatttctgagtgtttctcatttctatatcccaactaaggctgcaggagcccaaaatgaattaatggccaccataaggtagacttgggccataaggtagacacacgggccgaaaaaaaaaatcaaatagagcatttactcagagacctgcagtcattaatcgaaacaaacccctatttctttatcgggagaaattctattcactttagaatcaacagaatctgatgagaggttccttctgtaaaaaggaccatgactctaacagtacagtttgaaaggaggggaaaaatagcagcttcctgtggttactcatcttttcattctgctactgctatctggcaaaacatatgaggaaacaaagcttaattagccggtctcagaagtcttctacctctttcaaagggtcagatccagatgatgtgaagtaaggaccctggacactgcattcttgggaagtattccctgccaaaccctattcatttccagtatggagatttgtgtgaagaatgaaattgtctctagtactctactgatgttcaaatacaatatgcttagccactttcaaagatgtcatttattgatcccctttatatcctataacagaagtcaaaaacagccacataagtcagaaaatttacccattttattgatgcattgcaattgctctacattttaccatattatgtagaaaatactgaaaatacaagctactttgtaaaaccaaagacaaacattgaatccaaagataaactatgttttacacaatggacccttttcccatagttagtattaaattttaaatatctatttcttttgttaaaatgattattttacatactccctaagtacatctgcattacaaacatagctcagtaattctcagaaactatctgtttctagaggcttgttgtaaaagaaagcgcacaaccaaaaaaagggagaaagcaaaaaaagtttaaatcgcacacaataactagcatatcaaatacatttaataaagtaggaattccattgcaatatcaaggattcaaagca

SEQ ID NO: 1463 - DNA, 4001 bp, Homo sapiens
gtagagacggggtttcggcaaattgcccaggctagtctcgaactcctggcctcaagtgatctgctcacctcggtctcccaaagtgttgggattataggcctgagccaccgcacctggccagcccagctaattttttaatttttttctgtagacacggtgtgtcactatgttgcccaggctggtttttaactcctgggctcaactgatcatactgcactgcgaagtgttgggattacagtcatgagccaccacgcctggactttcgttggttttccatggcttccacaaactccttcatatggcgaaccaggccctcctactacttctccaggcaccttccccaaccctccttcacccattcctaaattccaaactccctgatttacttacaccccacagaaaaagaaagctctcatctctatgtctatgcacatctattcacactgcttagctctgcacatgacaagcaaactccttctcatttctcatgacttgtgtaaaaattttaaaagaatcctattgacacagaaggtataagcaaaagccccaacactacgcatatataattaaaaccattatcatttctatcactgacaaccaagtgtcgttttgaatagaaacagtgcctgatattttgtaatacccggtttatcctgaagaaagggtaaagaatgagggaagaaatctattcatgcattttcaaggagccaatcactagactacagagcacataagaaaaaaaaaaatcagggctgacatattctcttcaaagagctgtggcaggtcaacaaacatagctggcagacttctaggataacaaaattaatgatgtgagaaaattaaacaatttggattgttagcctctacgaacatttcagatccttaattctttaagtaccatctccgaatgagcaagtgcagcactcactggcactcacagctgaagcctggaagacagttttaacaactcttgctgaaaatgactatttcttctctagtttctatggaaacagctgtcagattggcaaaaataggacatgtactttaaaataatcattcaagcaaagtacacacatgatggaaggctttaaaaaagaattggacggcagcagacttggttcttaagcttccaaatgtcagactacaccccttcaccccggctgagaatgacggagatgaacctaaatccttttagcgagggttgcacgaccttgatcaacgcctgaatgccaaataagggattttcatctccctggactacaatttcttgttgaggattgcacggcacaataaaactgttgctccacacacaggcgacatttaaacagtatacagtgagttctgtagacgagtttacgaggaaattgttaaaactccccggaactgcttagacggggaatgttctggtttgccctgccgagtttaggctggaaaacgtgttcagtttctcctgaagagggaaggggtgaaagagacgaatgcccgacgcgccgggaggcggtcccctctggcagaggtgccgggtgaggagcccgaagccccgcgggtgagaaaccctgctctgaaagcggagccgcggataagggcgggctgagggggagggcaggcggcccacgaaagtactgccacggggcagacacacggggtcaccggcgtgccccgggcaaggctaggggagaaccgggctcccccaggacagatcccctccgtctcccgccccggcgccccccgcccctcccctccacgcagccttatcgcccacccacgcctcctcccgtacccccatccccaaggatccccactccttgcccgggcgcccccgcaggcgctctgcgctccgccccctccccactgccgcactctgcctcctcccctgggcacgatcctactcggaaaagctggggaaaagcgtcaccgtgaggactgactcaagcagaagcgaaagcggtgacaccgcagacccgacctatgcgcaggcgcgcacccgcacttcctgcccgccataccggccggggcgcccttcgctccgcccacacccggcagtcaatacagccgcccagagtcgttctcccagctgccccgggccccgcggagactgtggcgctctagcgcctccgtgtggcttaaggcgggacatggccctgggctgggctgcttgcctaggaacaactttctcccgtctttggtgagttgggtcctctaaagaatgatccacgcaaggctgtgtccgttgtagtctctacggcagtaccggccaaaagggaagagactcgaagactgccaaaagacgaaggcttcctggttctgaatctgcattcatagaaatagtctttggagtatgggaacagtgctttcatatgatttttggagggacgcattttaagaaagatgaagtataatcttaagtgtctggaggttaaagtagctggctccaaaattatgtgtatagtatgtttcattcatttcaccaaaacatatttcttgagcatcaactacattttaagtgccaaggatgtagcagtgaacaagacagacctgaatttcgtgaactttatatcacagtgaggaaagacaggcgattaaaaaaaagtgtacaaataaacacaaataaataaaagtgtacaaataagccagtacaaataaacactggattgtgatggatgagtagtgaggtctcatattagtttattatgtttacactctgtgcacaatgaaaacatctcaaaggacataaacactatgtcaaaggacataaacactatgaacaattttaggtatctcttttggaaaatgtgtaagttactgtttcgtttatcttatgtgtattttatgatttgccttttactttgaaagggatatcctggaaaacccctgacaactggacccctaaaaactgaagtaggaggtccttcagtcttcgtagggtttatctcccaaactctggagtgcacatgtcttaccaaagtttccagcatgctagccacctcttgctcatcttgcctggttagcataatgtcattggtgaaatagatgggtgtgatgttctctggaatttccagttgatccagctccttttggactgcgcagagccattatgtcattatcctgggtccacctgatttccaaaggggccagactggcaagttaagtagagatatggcagggatgaccaaccactcttgtatatttcaggtctttaattatgacattaatctccaccatcatctcactatcccctcagatgaaatatcggttttgatttattatcttcacttggaaagaaggacagcttcagaggcttcccattggctttccccaccatgataactcaagaccaaggaccctgagcttcttaccaatgtggagattgctccagctgcccaatatgtactcccaattatgcactcaggaactaagaaaatgactactggatgggtcagtgtattcctggacccactgtaagctggacattatccaggactctgcttattacctgatccccataagcccccacacttagagaggagccatgtgtgttacatactttgggtaacacctgtgaaatgtctgggtattcctctttcctcaacataaaatcagtcaagaaaatggccgtgggacacagaccaaagagtaatcattaattacagtaaatatttgtttcagtattgcaggattcttctttatagggacccaacaacctcttaagtcaacagattctgtggtctcagtgtgaagataggctcaggtctgagacttgagcaatgagcagtgccttttattaagcaactactccctgcataggataaatagcttcttgtcttcctccagttgtagatgttaggcaacactcttgttggctgcccgtctgtttttcccctagggagaccttatgctattaaagccctccacaacctcctgtggatcaagcccccttggctgctcctctgcccttggcagatgttacagtaattacatcttctggtgtcctcatggttaaa

SEQ ID NO: 1464 - DNA, 4001 bp, Homo sapiens
ggcacgaaaacagaattttccagcacagaaaaggcacttcaaggaaaaaagaactttgatgtctgtgaacaaacacctgttgactaccctggagaacactactgatgatactttaggcttgggcttgaataaccttcttagcattgccgaagaaactgcctgataggtattttacaattaatataaggagtgtaatcccatagtcgtccataccacagcctacatacacttgcagtcccctccctaaatttcaaatgtttgttcaaatgaaattatcagattaaagcttatgaggggcggggaggaaaatattataacctctgaagcaatcaaataaaatctattttcttatttccttcaaaacgccaaaaaatgaatcattacaaatataatatttgggtttgtcatagcatagaggttactgaataagaaaatatttttgataattctacaaagatttttgttctcccaaacctaccaagattaaagcaataaagtatcaatggatttcaggatttaaaaaaggaactttaagccttgagaaatacacatttctatttcaaatctccctacaaatgaaattcctgaggcacacaaaaaaataatttcctttctacgcttccttcaatgatttgctgagttgttgatcatccttcaaaacatcatgtctcagtgaaacttaaatcttccataataagagtactgtcgaaatacatcttcaacaatgaagttctactttaatgaaatctaccgattgcagagctaattacagtatttgttcacctgagatggtattggctgagccatttgtaatctcacccaagattctggtgtgctggaacccatctataagacggaaaatagtaaaaacagcttacagggcacatgccaatttgcattctgaggacctgaatgaaactgtctcattccctagaaagcattcaaaggtttacaagtactaatgagaatttttttttacacattgttattttggttttctactctcattttaggaaacaaatagtagtacatgaatctaatctcatcactccctccaactttcacgagttaatcactttttttcttgaatctcttgactctacaggccctcgtctctttcctcaaagtgtaaaaagccgtggtttcgtgccttgttgagtgatcttaggaggtaaaaacaaataagaaaggaggcgggccggggtttggggtcaacgtggggggcagatgagagaccacaggaatggagtcctggacagcgtggggcgggaggggacggaggaagaggaaggcacccgccatgcggctggggtcgggcagcgttgaggaggcgagcggggagcggggcggtgtagggcggggggcgcggggccgagcgggaagcggtgcggggcgggctggggggcggacgcacggagcgggcagcggggtggggagtggaagtttgcagaggggaggctgccttctcccagtccaactcaccgaagaggctgccgctaaacccgtcccacacgcagcccacggtgtcccacacccagccgttcctcaggcaggacacgaaggtaaaggtgaccccgaagagggacaccagcaggtcgctgaggctgatgttgaccaggaggaggtgagtgggagtgcggagccgctggaacttgtagtagaggacgagcaccagcaggttgttgccgacgcccagcagcccaatggagcccagcagcagcgccaggcgctcgtaggtgccggggctgaagaggggcgcggggctcagtgtccccgccggcgccggcccctcagcgcccgcggccccgccgccgtcccagtagccgtggccgccgctgcggttccccgagtacatggcccggcgccggcgcgcctggcgggcggaggcgctcagcttgcggcggggctcgcggcgcgctccgcactgggtggggttggggctccgccgcctgctctagccattgtgcactgaggggcccgcgctaccgcgcgccgggcccgccctcttcccgccccttccgcccggcgcaccccccgtggccccgcccctccccgcggcctgtcctcgtcgctccgctgctcccggcgcgtcctcttagccccgcccccccgcgggcgcgtcctcgcggctagctcgccccgcccccactggctgggcaccttccgctggtcggcgtggacgcgcgtcgcgggatagcctgggggccagggccgcagggtagcctcgatggctcttcacacccccacctccctgcacccaccttgaaagcttcgtgtccactcacccattcatgcactcacttatacattcatttattcctaagtatttatgagcgcctgcgcccaccacgtgctggcaagaattgggtttctccccttcctgggaagctgtaataacccacaaccagcctacgaagcccatcccgcgtcatacactcaatgtaaacaaaagcaaagaaaacattgaagagctcggggtagtcttaccggaaaactgagaagaaaaacaacaaattgatagacaggtgcctgcctaactacctgactgctagaggacacatgtcccagggctgatacaagagcctgccacccttggagagtctgggatgaaaactctctgaaaatggcattccaatggaactgactttaagccctgggctggaccccaaggccttccaataccgtccttcctgtgcttgaaagcgtgggtagatctttccggtcactgaggcctgctaaagtccttcacaggcagtgaaagattcaacctaaatctagcaggtataggaggcaggtgctatatttagaacagcacacatttcccattgggcctcttctcctgtagtgatgagaatatagtacaagtcaaatataggttgtgaacgtcatcacactctgcaagagctgcttctgcctttgtggttgcacaatccctaaggaggccctacaagaagatcacagtccccagccacacctgcagcctgtcctggacactggtgacgaacacagggtttgtgcaagctaaagaaactgctctccatacgggcgtgcctcacctctgtttgaaagatcagtagggaatgactagcttggatcaatccacattctgaattccctggagagaggatctaataggctggcagcagctctccaccctggtgcactgagcaatagctaaggggcagtgtgctctgcctttgacaccttgattttccttcaaggcttctgctctggactcgccatctgtgagacttcctacccacccaccccttaaaaaacacacacacacttttaattgttaattttagatttgtacaaccactgaacaaaacataactatttaacaagttctatatgtttaatgtcgaaagtgttttctgtgtctagtctacagtaagttctcaataaatagtaatttgaatgaatgaataaagaactcgctatattttttcctattcattcttcattgctgagtcattgcccttataaagctcacattccagtcgtgttgggagaacaaacaaaaattagataaatacgtagggtgtcagccactgacaaatgccatgaagaaataggggtcaggcgtggtggctcattcctgtaaccccagcactttgggaggccgaggcagtaggatttcttaagcccaggagttcaagaccagcctgggcaacaaagtgagaactgccccctaactcttcaaaaaatagaaaattagccaggcaagatggtacatgtctgtggtcccagctactcaggaggttgagccaggagctatgggagatggggcaaggagtttgtaagagttaaagaaagaggaaagaaacactaatagcagctcaacagtcagacagtgttatttggaagaataaacctaagaggggcttctggccgatttcggtcaggagcactctcttacagactaagagtatttaaggattttagagtgagagagcttatcacaggcgtggaatgtttctgtttggagaagaagttta

SEQ ID NO: 1465 - DNA, 4001 bp, Homo sapiens
gatcagtcccgcctgtgcttggggggaattctcccactgttgcttgtgatgagtcatggaaagcacaggaaattcttgtacccgccactctttctggaggagcaaagatctcccagagatcatcaatgccgaagcccactgacacccacacacctcatcccatgctccaacacaccacgttctgcgctgcagagaccccataccctggaattcatactttccaattgaggagattaggtctgtattcttcgaacagggaaactgaggcggatgggaggcagggcaggaagaatgatgcctgggcatccatgactaggctgagactacagttcatctctctaacctctgagtccacgacctgacctatgccctgcatggtggcacccacagcccagagaggtttagggccatgtccttggtccaccagcatgaaggacccattttcaactaacagcaaatacgagggcatctttgttgttttaaagatggaaattttcctctcaacccttactggccatgtctgagcttgtggggctgtatcaggagggctacttctggggcaagctgacgtcttaggctctctgagaaggtcccagcactctccataaactccaagaagagcacctcacttcctgggatgaaaactcaaaatccactcccgcccagaccaacctctgctgcctctggcagaagaaaagactgttagaggaggcaaagagaaaatgggagagggcatttgtgaggagggcgtgagtcttctctgaatcctattcagaattcctgaccagatgggcactggcgaagggaacagagaaccggttggcggcccacagctgtcgcccatgttatccaggaatcactggcaaaggcacacacagctgcacaaacacagggacgacggccactccggatgctctgccgccctcggggtttcaagagcttgacaagaaacaacagtcacattgttacattcagacagaatcacaaactgaccgttagggacaagctcacaccaacagatgagcaccaaatatgacttggtaagggccccacggcgaggtgctgacacccagcaccctcctgtccgccctgcctgcacggtgccctcacaccggtctccccaaaggcccgcggcacctcagagcagctctgcccaccccatgggcatgtttccgacgtccaaacatacagttgtactgtcacaaccatccactcacaaactgtgacagacacacaaactgacgccaaactgtcccacaaagaagcaaggggatgccaacagatgatcaaatgtaatttagtcaaccgcggcgcactcccccccccgcaccacacacacacatacacacgatgacacacattcctgtgttcccctcgatgtaagtggcctcgcctctcgctgggccccaggtgcccctgcaggaaatgcggaggcgcggggagtccagggaacgggcttggggtctcaagttcgtgatccccaccctcaccccgggctccagccctgcggcgccggcccgcagcggactcaccggacgatgccgaacatgacaagcacgttgcccagcagccccacggcgcacacggccgagtagagcgcggtgatggcgattgccagggcgagggacgaggcgctccgcgcgcctggcggccccgacgcattggcgccagcgctggggcaggcgctagggtaggcgtccgaggcgttggcgaagagcgggggctgcagctcggcgccggcggagggggccggttccatggctgccggccggctccgccgcgtccctctccaccgtgcgccctgggcgcggggatccgacgcgaggggagcggcaaggcagaggccgcggccccgacgccgccggctgccgcgccccggccgccccgctgtctctgcgcctcgtccgcctgcctcgccgcccgcaccggcccagcccccggcgtccgcccgctctcctcgcccggagcgctgtgagccaggagcagccgcaggctcctcggacgcgcccgccgcgcgcaccacgtggcccggaggcggccgccagtctgcgcccgcgaccgggggcggacgctgcaccaccggctcggagctgggcaggggaggcctcccgccccctccctagggatgctccgccggctcgagtgcgaccccgtcccaacctggactcccctcccacccccttgccactttggtgtcagagggacctgggtgtggatcccgcctcccgcccctgcactaacaggcggagtgaccttgtgtaagtcacttaacctccctcagcttcattctctttgtctgtgagatgaggaaaatcgtaccacctccctcagagggtggttggggagattgaataaaatgattcgaacaaagagcttagagcagtgccctgcggacagttacatgctccgtaaataacctatattatccgtgcctttcttgcaccccattcattcgctcaacaaaaattctgagggtgcctaatagaagagccgggtatttggggggaccctctagtacacaaaaccagatgcagcctctgcttcctggggcttacagcccagtgcaggagagagagcgagcaaccctaaaatgacattaagatataggtacgaattgagaaagtggcagggtctacaaaacccaggggtcaggacagcttccctggggaaacgacacttgaggtgaggtgtgaagtttggggaagaactaacttaaggaagtaacaagggaagaggattccggataaaggaagcagagggactgaaaggaagccaggaagaggagaaggcaggaagtgagggggcgatgaggtggtgggcaggctcttgaagaccaccttaaggagcactctggctgcagtgcgagcagatagaaggggggcacttggctaagtcatccttgccacaccccttccaagacctaaccattccagattagagccatccttcttcttggggtgcctagcctttccagaacattctaccaagcattactttgctccaggcactgtgataagcactttatccatgcaccaacactttggtgtagcttctattattattgtccccatgttacagatttagtgctcagcactaaattatcccatatagtaattatttctatccgaactggtctccctccttaaagggaccaggtctgattgacccctgcatccaggagagggctggggtcacagcaggtgctcaagaaatactttttggataataaagatcccaaagggaactggagtggaacaatattaggggttctgagctctaggctctggggcaatgctcttggatctgtgtgtggctggacaaggagctctccctcatctcaccctctagcttgaatcatccatatatgtgcaaggctcctaccctttcccagaaaaaagcaaagccagaattcccaagctcaccctcttctccattttctccaccccacttagctgctgtccagccacttctaccaactacagcaagccccccaccccagggctttcccactcaaccacctaaggacttatcagaaagatttttgctgtggtcacctgctgccaaaactctctccctttcccaaagggcctggtactcagaaacttttctagtgccagcagagagaaattgggataggaagaaggagggctactttattggaattctggtcccctccctaaccctccaagccaagttttttcctacctcaggacatttgtacatgctattccttccactcggaaggctgggccaataccccagcctaagcgttatttacccctcaaatttcagcttaaatatcacttcctttgtgaaaccttccctgatccccaccccacctccaactagcccagctctccttattatgcagtagcatcacgtacttcttctttacatattaatagtttcccatgtatttattgtgtaatcattggattttttgtgcatcaccttcacacaaaaaagtattgtgtaaaactaaccattgaatactatgctca

SEQ ID NO: 1466 - DNA, 4001 bp, Homo sapiens
cagaggcagaacttcaaaggaatcgccttccctgggcatctgctcctctctcctcttcctctccttccttgggagagaagctgtccctgtctcctgcagcaccaaggccagcagactcaggaaagccaggagcctcatggggagtcagatgggactgagaatcccttcagcggctggtcctggcaagtgggcacgaggaagggcagcgatctgagggacaggctctccagagtgttgtgggaatggctcgcagatttactccacttcccacccccacacttgcagactcagtgctctcatcacatgcacaaattccctaccagctgggactatgtcttggggggtatctcctagcagccccctccctccaccgccccacttgagtgtttttacacgctcacccaaacactgatattcactcacagaggcatgtgcagacacatctcaacacagacacattcacaagagtccccttgtttacaaacgaggcacacactggtgcatgcacacagatgtcctctcttaaacaaccccatgctcagaacatgactgctagtcactaagctcgatttagagaatgtcaacatcaaataatcttatggggtctttttgtttgtttgtttttttgagacgaagtttcattcttgtttcccgggctggagtgcagtggtgcgatcttggctcactgcaacctccgccttctgggttcaagcgaatctcctgcctcagcctcctgagtagctgggattacaggcacccaccatgcctggctaatttttgtatttttagtagagaaggggtttcaccatattggccaggctggtgtcgaactcctgaccttaggtgatccacccaccctggcttcccaaagtgctggaattacaggtgtgagccaccgcgcccagttgactcttgtggttttttataaagatcatccattcatgcatttgctcaacaaacatttatgggtgtctattgagttccaggcacaggacttgtctctgtgggtacagaatgaatgaggcacagcccttcctaggagcacctagtctctttaggagacatggacttacaatgaaacatacaatgtaaaaaagaatgttagtttatgaaatatacttctaaatgcagctttttagaaacagattattacagataaaagagttctttgtgtgtgattgcatgagtgtgtacgcatctggaaatttccttagatacctgtgtatatttgtgtgtgtgtgcacacagatgcctgcgtatgtatgtgatatgcatgtgagtacaaatgttcatgtagttcgtatatgtatagacgggtcaggaaatgcatgtggtgtggttttgtatccaggcataagtgtatacaacagtcatacccagtgtaggcttaacacagccctccccaaagctagctgcacaagtttctagtagactctccctctttctttcttttaaaattttttttatcttttaatttttattttattttctatttttaagacggtgtcactctgttgcccagcctggagtgttatggcatgatctcagctcactgaagccttaacctcctgggctcaggcagtcctcctgcctcagcctcccaagtagctgggactacaggcgtgtgttaccatgcccagttaacctccccaccctttcttaattttagctgggcaagggggcaagcctctagcagtagcaagaggtgtttcttcaccttacctcccatacctcaccccaaacgaattacataatctcaaaaaaaatttttctaagagagtttagtgcccacccaaaagtcttgtccaacttctttggccagaggcctaaactctcttcattttcccttcccaatcccctgccccagccaaacactttgccctcatttgcgcaccgatggccagaggcctcaaccttgagccttaccccttcaatgcttctggatcctggatggagagccctgcagcttccagaaaggtggggactctggtggaggctgtctgaactggggcttgggttagacagtggtgcccgggggagggcaaggagttggccaggcctgcgaccaatcagacttctcattccttctgatgtccagctgtttcccctcctctttcctcagggggtcccctgccccattcctgtatttgacaaaagagaattctccccccaccttccgcttcaccccccacctccagctcctgctctctctcctcttactctgtcagctccttctttcttttccttgtccactctcctgataaggccacatctttgaggaacagggagtgccatcccctgcaaggaaggggccccatccctcagattctgagtcctcagagaaggctggagtcgggggatatggagagatagagcttgtctttgcagcttctttctccagccagagagtgacaaggcttcagcttcatagccagaatccaaagataaaaataggtggaaatgaggcacttcaccctcacctagagcgccagcacagagaccataattgaataaaatcaccagagacaggagctgcaggcctaggtagttcaaagagaaggtgtatgggggatgagatcggatttgaaagccaacttcaagttcacagatgatgatcatgaggatacgggaaattctctaaatctgctaggaggaaaccaaatggaaattgggaggtgggccctagaaaggatcataaacaccagtagacattgtgtagggtctcgggggcctgggaagtatcctctcccgcaccctcagagatgtacagtcgtccctcagtaaccatgggggattggttctgcacgtccagtggataccaaatccacatatgctgaggtcttttatataaaatggtgaatttgcacataacctacgcacatcctcctgtgtacttcaaatcatctctagattacctataacaccaaacacaatgcttacacctcactccattcacatggattccacatagtactggcacacagcaaattcaagttttcctttttggaacgttgtgaattttttttttttctgaatattttcaatctgtggttggttgaatccacggatgtggaacccacagatacagagggccaacggcattcatctggaaacactcccctttccttggtgcctcgagcaggctgccgagcaagtccttgctgaaggcagaggtggggtggctaaggagtcttccccagcttctgccagcctgtgccctggcgcccacccaggtttctcagtgactctccttgttccctactcctttccaccaaccagatactgaattccagctgtgaggccccctaaagatctagtccaagtccttgtggtatagatgaggagagtgaggcccaaagaggtgacgtgacttgccctaggtcacacagagccagggccaatgcctagattttttgactccctggtcagagagttttctttagttcatatgaccctccccatttccaccttcttccccaggagtcctgaatccgtgtgtttccaggccctcagagcagatggcttggcagaactcatctctgccctggcacaccaggtgaagaggcagatctaatagcctggccctcgagggcagcatttggcttgctgtgttcctgggctccagctggtgcaagagggggcttccctcagcccaagagcctggtcaccagagaagagcatgttcttgtacccctggcagccccccacctgggaaaagacaccatcagaggctctgctgggtggagggaaagatagccctggatcctggagggcatccagtaggcagatggcacatttggcgggctgtatgcctccatcttctctccacagcctgggctttgcagccagaggccctccacccccacagccagcctaggcaatctccccgctcccaccccacacatttattcctgggagaaatgcaaatgcgagtgttcattcactctccctgccgcctgctcccactctccctccctgctttcccagagacatacgctcct

SEQ ID NO: 1467 - DNA, 4001 bp, Homo sapiens
ctttggaattctttcttatcattcagacaatctcttgtgttttaaaaacagtttgcatcacaggtcccctcctcttaagacttccctaacatctccaacagtctctctctcttcccctttccttttctttctttttctgagttcttctttaattgtgtgtaaacaccacttaccataaagaactgaaaccatactgtcaaatgcttgtttttaccactaggcttgtagcttcctgaagccagacaagaaagcttttttaatctttatttctccaggacctagcacagaggctagttcatagctcttgcccattatgtgttttctgatttagccaaatttgaaaggatccaggagtatctcagattatgccctcaaaacactgtcatgatgactgtagaattgccagcatctctaattaaactgtgtatgctcaccatctttaataagcagttttgctagaatctgggataaattaacacatccaggagagaacatctatttctcctgggctatctaatcctgaggccactttccctccccacacagtaacttattacttgacatgtcataaacatactccaatagggaatccagtttcagaagccctggtgctctagtataggaagaaagggattataggaaaaagattttaagtgtgtcttggattctattttctcaaggggctttctattgccttcattaggtggagattcacaaagaaaccaaaaggtcagtaaaaaattctcagcccatactactttctggccttttatttaggcatatcttatccttgtttgtctatttatccccaaaaatagggataacactccatccagtaactttatttaaagcttcagactcccagttgtatgaaactgctattcctcttttgcctcttatttaaggggcaggtctctaggagccaagtgtttgtgagtttacacctcatattcctgcctagtgtggatgttgacagcctcaggagaactcttcctacatggtcaggaaaacttcccaccaacagccctgcacagagcatctttgacctctttatttctcagggtgtataccacagggttcagtaggggagtgatgacagtgtaggtcaccgagatcagctggtcatgttctctggtgttctctgacttgggcttgaggtaggcaatggaggcacagctgtagtggacaatgaccacagtgaggtgggatgcacaggtggcaaaagccttcttccggccctcaactgaagcaatcttgaggattgtagagataatgagaacataagaaatgaaaaccagacccataggtacaacaagcaccagcacactgataatcaaagtcaggatttcattgacagtggtgtcaatgcaggagagcttcatcacagggcggatgtcacagaagaagtggggcacctttctagcacagaagggtaacctgaatacagatgtcacttgcgttattgctacaatcagcccaatgctgcaggcccccaggacaagttggatacgcagcctcttgttcataataaccatgtatctcagggggttgcagatggccacatagcggtcatatcccattgctgtgagcaggaagcagttagtgatgccaaaggttacaaaaaagaacatctgtgtggcacaccctgccaatgatatgggctggctcatacctacgaggctggagagcattcttgggagaatgaccaatgtatatacagtctctgaagtggacagcatgctcaggaagaagtacatgggtgtgtgaagatgaagatccattcggatgatggtcacaatgatgatattgcctgctaaggttaagatgtatagtgcaaggaacacgccaaaaagggtgatctgctgctcatggaagctagagaaaccttggaaaacaaagtcagtgatgagagtaaagttctctcttttcatggattggttcccaaatctgaaacataaaagcataaaagtcacatagtcccagtaaagcagtagaagcacatttctgaaattgattgaagttcaatagttctcagttacaaatctggtgatgtatttcctagtggattaagttaatccctgggtttacttatctttacttaaaatatttttactctgtgaccatctgttataattttccatgcatcatagaatcatatagtctcactttttcactgtataaccatacatgctcctacttcatatctactcttcctccctgacatctggaatggcttctcttttctcctcttatttctttcctactcttcagagatgagtgcacattttcaggccttcataaaaccgtattacactcagaggttctcatgtttatttggattatttttaccccattattgctgcctcacctcatacaaacacttagcaactttataataccttttacatcttttcatatttcactagctccaaattatgcatggattgggtgcttgaaaataatttgtttagggatggactagtgatgtcttttctttcaagactatgaatcatcctccttgcgcatcctttaagaattagaagcaaagtagaaaggttcatcttgtcttcaagaagaaaaaggaaaatcttagccaaccaccagcctctccccacttctgtctgagtgatggaagtctgctgacagttcagagcactgattcacgtatgttataaactatgctacatctttaccttccctaaactagaaggcaaatttatagccaatacaactttgtgagtaagcctacacccactctgcagagataaacaattgtatcaggaaagatacagcaaatttaagtgtccctcacctaaagcaaaagcaaaccctgaatataaaaaaacagctacaccaaagatacatcattttgttgaaggaaggggatcagttcaatttatgtaatatttcacatttttatctctttaaacagtaagcttctctagggtatttaaattatattctgatttgcttatgcatattcagaaagagaagttttgcataaagtaaatcacatcaatgatgaaggttagtacgcacggagactttcttcaagttcataaaaatctatttaaaagaagttgatgaccagctgttaatcatttacactaagaatgctaaaaagaaagtaaagctgcaatagagaatattttccaataaagaaaatcatttgatactaaaatatatgtctaaagacatttgtcttctgtgaggcttctgagcaaaaactatgtagtagtccagccacggagtggtatggtgcctctatggtgaaatcagaaatgcttggcagagcttttaactgttacaataatgagcacagaagctcttggccattcacgatgtgaaatgtcctgcaaaacttgtggtgattctgcccaaggaagaattcccttcttccaaataccaataaagttcccattgagaaacacacggctaaaatatcatcttatctggctgaaacttgtctgtcttgaggtagaagaatggctattatgatttggttagcatcctccccactcttggaagtctataattcttcaaaggaaatggaaggaagagcaaatatagcttatgaagacctgtccagctgtgataggacctgaaatactacaataaattaaagtcagctcatatgtaatgagccccatttcagtccttcttctaaagaccactcacatgactctgcttagcactgaggcacaacgggaaagctgggctggaggaggccgaggagtaaagattgaaatgtcaggctcccttggccacaatggataggcatagggtgaccaaggtgagcaaggtgaccaagagtgcctacggcaggacctgaggctgagcaggcagggcataaacacacactagtaggaatatagtcaggtttgagagtcataggcattcttgataacccctctgtgtggaaaagtctttgaagccagaggagatgctctcccaggatcaggcagctgggcttctgggggtcactccctgaagacattctg

SEQ ID NO: 1468 - DNA, 4001 bp, Homo sapiens
ttactgatcctttcaacctccatcctttttactcttgtgttgaatgtatgaaaagtgttagccttttcagcatgttcgtcttttcaatctgagttttctgatccaggcatctcaggaatatggacagttcacgtctgtgttctctgtagctgatgctgctttgctctttcccacatctgcactctttactcctaggtcagttagagcagttccatcaacttggaaggtctgcctctagcttttttttttttttttttttacaagaaagcctgcaacatccacagaaatgcatatgtgtgtgtgtatcttctaacttatttgcttaaaatgtggcacaaattattctgacacccttaacagtcaactagaaaatctttctgggatggtttccaaacattttgctcattagctttttagaaccctgctggactttatgtttcttttttttttttttttttttttgagacccagtctagctctgccacccaggctggagtgcagtggcgcaatctcggctcactgcaacctccgcctcccaggttcacgagattctcctgcctcagcctcctgagtagctacaattaaaggcatgtgccaccatgcccagctaatttttgcatttttagtagagatggagtttcaccacgttggtcaagcttatctcgaactcttgacctcatgatctgcccacttcagcctcccaaagtgctgggattacagacgtgagccactgcacctggccagactttatgttttaatggagttgtataactgaaaatattctcaaggtatgtgtaactgtgtgcatgtgtatgtgagtgcataatccaggcatgcatttttttcctacattcataagtgtatgctaagctattttctaactgttctggagcagggcgtagaagatcacaacaacctcaaacagaaacctccagttttagcactcagttcaatttagtctagtcttcttgatcccatacataagggcattattgaaagagcattaaaaattagtacatatttataaacgcaaaggaaaagccttcacaacctctcttcattaaggagacagagttttttgccccacggctctgtgcagagcatctttgacctccttgttcttcaggctgtacacaacagggttcagtaggggagtgatgagtgtaggtcactgagatgagtctgtcctgtcccagggaactctgggacttaggcttcaggtagatgatggaggcacagccatagtggatgatgaccactgtgaggtgggaggcgcaggtggcaaaggccttcttctgaccttcagctgaggcaatcttaagaatggtggagatgatgaggacataggagataaagaccaggcccataggtagaacaaggacacagacgctgacaacaaagttgattatctcattgacagtggtgtctgtgcaggccagcttcagcaggtgtctcacatcacagaagaagtgggagatgacaaaggcatcacagaatggcaggccaaacacagatgttacttggacaatggccatgccaaggccaatccccagtgatccagaggccagttggatacaggccctcttacccatgatgactgaataccttagggggttgcagatggccacatagcggtcatatcccatgactgtgagcaggaagcagttgttgatgccaaaggtgagatagaagaagagctgagtggcacagctttgggtggcaatgggctgatgaggattcaagagaccagaaagcatatggggaatgatggccacagtgtagcaggtctcagagatggatagcatgcacaggaagaagtacatgggggtgtgaagatgatggtccaggcgaataatggtcatgataatcacattgccagagagagtcagcaggtacaaagttaggaagacaacaaagaagacaagtttgtgctgccgcctgaagctggagaaaccttcaaagaggaactcagtcacaaaagtggaatttagctttggcatcaaggtaggtctaggtttgaaagagctgggcagaggaaagaaacatatgatgagttaatcatgaaacagagtaggctggaccaaggctttcagtaaaaagcatgtccatcctctgagcaatgccctagacctgttgtctacttgctcagaataatcacctgtccccaccctcttctttggaagcatagaaggctaccctgggaccctgggattgagagcagagatagtgatcagaaggtggtaacaaactgaaagagatctgtagaaacaactccctggttcctttttttaaaaattattattatatacctagaggtatatgatccagaggtgtgcttgctggatcatatggaggtcagaggaatatccatactgttttccacagtggctacatcattttacattcccacccacagtgcacaagggttccaatttctcaacatcctctccaacacttgttatcttttgattatagattaaaaataaataaatactagccaccctaactgttatgaggtgatatcacattgtggttatgatttgcatttccctgatgattagtgacactgaccatattttcatatatctgaattaaaatcaaaatctagaagagatgtttgcattcccatgttcattacagcaccattcacaatagccaaattgtggaaacaacccaggtgtccactggtagatgaatgaataaagaaaatgtggtatttacatagaatgtaatgttattaagccttaaaaaaaaaaaaggaaatcctgccctttgcaacaacagggatgagcctggagaacattattctaaatggtataagccagtcacaggaggacaaatactgcatgattccacttatatgaggtatttaaaatagtcaaagtcatagaagcaggaaatagaatggtgattactggggaacaagaaaggggaagtggggagttgttgttcaattcatgtaaagtttcaattatgcaagataattagttctagagagctgctgtacagcataattcttgtagtaaacaatattgtaatatgcacttaaaattttttaagatggtatatctcatattaagtgccttaccacaaaacaaaacaaaaagcaaagggacacaaagaaatgtttaaaggtgatagatatgtttgttaccttaattatgatgatggtttcacagatgtatgtatatggccaaactcattaaattgtacacattaaatatatgtagtgtattatatatccattgtacttcaataaagctgtttaaagaaagaaagaaacaactacctggccattgaaggagtgggcctaggtcaaggaagaagcaggtgattcatcaaatgtgcccagctctacagttccttctcaatacactcctgaattacttctcaaggatccagtgaggaatagtgaagaatagaagatgtgagactgattgatatccttttcacactgtcatcagtttccaatgccaaatgccctgtgagagtcctgagaatgcttctcctccccagaaccctaggtcctggtcttcacttatctaagccctgcatctacaatactcagtgaccatcaaagagtagaaaagggaacacttctactgatgactttttctagaaaccttgtaataaatatcacctaggatcataaaaaatggtttgatatggcattgcaatatttagattgtctccttgaattttaatcaaaggtagaaaagacagcaaaatgaatctgagggtgactctttaagtaaggaataggtttttctagtatgagagcaaagataatattcacttaatcagagaacgatgaatcgtcctgttttttttttacttcacttatgcatattccaagttatgttggggatacaaataagctgatccaccttccttttatcttacctcaagtagacccagcatgagaggttgtacttgcgcagattaacctcgctccttatacccacatctactcctgataatactcaccatgtttaaccatc

SEQ ID NO: 1469 - DNA, 4001 bp, Homo sapiens
gtagatgtcatgagtgtgtgaaaacagatgtttccatacctgtgtctcttagaaagtaccttccagctctgtctcagagtagagataaactctggtgggaagattcataaaacaaaatattcccacaatgtttcccattgagggtatacaataatgtagcacagttatgcttattttacaaataaatatctggagaaatatgaagcttgcacagtttgctgagagaatggaagttaatggcatttaccttggaccctagaattagtataaccaatatctaagacaacaacttcaatgtcactgaagctactacatataaattaaaaatctaaaaagctaccataagttgaaaagagacgagtcttcatgaaaagtgcatctggataaaaatgtagtttcagagaaaagccaccagtatgtgttctttctgcttatcccctagggaacagcagagatttctgccttggttgcacagaaggaaggaatacacatagaaatgaacactatttgaggagcgaatacagctggataataaaagaagagacttttttttcaaagctgttcatttttcaatccgcaagaattaagatataattacaaaatgactgtcacatggaatattatttgactcctgagaatgaaagctttcttttttatgtaagcagagagaaataaaggttggtgtctctgcggcttatttccctaacaccgctgccacctatgttcccactgtctctactccacatcccctaaccagacaagctcaaagatttgactgtcagagagttcaggtaaaatgggagccaaaaagctttcaaaactgaaatcttcaagcacagaaacaagtagtcttaatccagcttggagtgattcttgtatctggtaacaaaattcaccagagcagaaatcctgctttctgccatgcctagaacactaaacagacaagcatttctattctttgacagtattctcaacaaatattatatttgatgaatttgtgtattgtggcatgtttgtgagtagacacactacactgggctaatggtctcttaatgaaataatccaatccattaagaaatatttctgcccacaactctgcatagggcatcctttacctccttgtttctcagactgtaaacaacagggttcagcaagggagtgatgatggtgtacgtcactgagagaacaaggtctttttctattgaactttctgacttcggcttgaggtaggcaatggaggcacagccacagtggacaataaccacagtgaggtgggagacacaggtggcaaaggtcttcttccggccctcagctgaggcaatttgaaggatggaagagatgacaaggacataggagataaatatcaggcctatgggcacaaaaatcacaaatgaacttacaccataatttattatctcattgatagtggtatcaatgcaagaaagtttcatgactgggtaaatgtcacaaaagaagtggtctaccactgtgccacagaacggcaaattgaacatggctgtcacatggagaactgccatagtcagaccaatgccaaaggacccacacaccagctgggcacatagtcccttgctcatgatgacagtgtatctcaggggtctgcagatggccacatagcggtcataccccattgcagtaagcaggaagcaattattagtggccaagataacaaaaaagaacatttgtgtagcacagcctgccaaggagataggttggttatgaaaaatgaggctcaaaagcattcgtggcacaatgaccagtgtgtacaccgtctctgaactagccagcatgcttaggaagaaatacatgggagtgtggagatgatggtcaatgcagatgatagtcacaatgatgatgttagcaaccagagttaaaatgtagacagttaggaaaaccacaaagagggttatctgatgctttccaaagctagaaaatcccaagaaaatgaattctgacacttctgtgaagttctttctcttcattctgctatatcagtgtctgaaagcaacaaatggagtcaacaaggagtaaattctcaacagcaattggactttaaaacaaagaaaaatgataattgtactgagactgaatccaatttccttctttttgatcatgatgctcatgcagggtccttgcacatgaagagagaagcctacttgtgcctctttggggctttatacatatgaacattgtcactgtggagcaaattactttctgcgcatggagagggcttctgcatgcctgctcacctcacagacattatagtgatgttaggaagggaaaaagacagcaaggagaaagccatgctctatatttcaaccaataataatatccactctttaaaccctcttaacaaggaggactccagtgaagcccatgtcaagaaaaccataaagatgaaagttttgcaaaaaaaaaaaaaaaagatatagcagtttgaaatatttgaagacggaaaactttgagacgtggtcactggatttcataacagggtcaccaaggagcttttacacagtgtttcagttgaattatgaatatagaaacttgattttggagaggtaatgtggtccaaatatgttattgtactctcaaaacagaacaactacaacacaaattctgccattatctctctactaaaattgatcactcaagtcccatcaaagaaatctttttttttttttttttttgctgattctagtaggccttttgagtgaagtcaggaagagagagctgtgacagaaaacgttgtgtagttgccactgtcattataaaggactgggacaacttgaggtgtagaagagactccggagttgagagagaaatctgcagctatctgtagcccaactggcttaactatttttaaaaatatggtgaacatacaattttgagaagcagagacactaatcccttttgtcaaaaagcaagcatgtataaactgtatggagagcatatatctgatcctatggttctctttagtgaccatcttattgttctccctttattttcagaagtattaaaacaggctttctttcccactctccataattccctgcaagttggctttggcatgttcatgcccatgagattgtttgctcaaatgtcaccaaagaattctccattgctaaggccactggactttgttttatctcctttttctcatctttctctgtttaaacacttcgaactcctacctcatggaaacattctctgaccttggtttccatgaaaccacactgtttttctctcttcccagcactcatttcgttaccttccatgaatctgctcattctccctctaccataattacgtatgctcttctctggtacatccttagcccttgtgtgtgcgatttttatgatgattgttctcaaatctctattttcatcaccaatctttttcccaagtctccagcttacctccctcttggcttctctattaatgtttcttgcaatcataataaatttcatatttttgaaagcaaactaaacattaacctttcttatactgataaaaatctctctatttcaatttttctgtcttctttaatgaccttgccattatacctgtacattaatgggtcaacattttggagccatatctattttgacatcacattcagtgggctttttctttaaagttatgcctcctctctgtacaatttctgaattcacaatgacctacttaagactagggtaccaaatcttctagccagaataatgaaacatattcccattctaaaatttatatgaatatgtggaagaccaagaatgctaaaacaattttaggaaagaagtacaaagttaaagaacttacactacttcatttgaagactatggtaatcaacattgtatggtagtgctgcaagtgcaggcaacagaaaaaaatggagagtccaaaagtagacccacatatatagccactgatttttgataaagtgctaaggtatctcagtgacagtattttcaacaaatgttgatagaaaa

SEQ ID NO: 1470 - DNA, 4001 bp, Homo sapiens
gtttactgggactatcttgaaccaggcaataaggcctatgagggcagagaccacatttattttgttcatcacatttatttgttttaaaacaagcaaatagttggttagcttcagagtgtacaaaaggcatatagaaaatggagaataacaaaattagaaatgataatactgaagaggtaggtggaaactagatgatagattcatgacaatgaaggacccttggcattatcttgtagggcaaagggagtcactggagggttttccatgagttttctggtcattctaggaatctagccttctattaatattaactcaagccctttgcttggaattacttgagatatttcagcaagtaggcaatgctagtagcttccttgaagagagcaaattagtatggtgtctcaggaacaaatgtgggggctaagacacactagtatgtgaaggacatacatgtgcatcaggaagagaaccataaagtggttccacctcaaacaaaggaagaacaaaacaaccccaagtaaaggccaagatatttcaatatgtaggttaaggaaatgaattggggacaaaaaggaccaccaagatttgtagcagaatgtgtgggaccaaagttttctgttgtctttaggaaaagaaaagtacggatagatggatttcctgctgttttccttttttttttcttttttctttctttttttttttttggatacatcttttctttcctgatgtatccaagctctctacttcaagacacagctctcatcagtttagatgcatctttgctctcatattagtttttaaattagcaatatttaaagcagtaaaatataattaaatttgttatggaactgtgtgctctgttcccatatctgattagtcttgttaaagtatcatggagagtagaaagccagactgtcttaacttctgtgagcctcattcttctcatatgtaaaatgttcttatgttacagtggagctggacaattaaatgaaaaaaaatgtataaaacacacgttctgcctggcatgtactaggcattagtagtttaaaaaatagctctttaactaagaggatagaaagtttggccgattgttcttcgtagggctgatttgaattccttatttctcagactataaatcattggattgaacaatggggtaaggatggtgtatgacacagatattagggtgtcttggcttgaagtgtaattagtcttgggccttaagtagatgaaagaggcacaactgtagtgaacagttaccacaatgagatgggaggcacaggtggagaaggtcttgtatcttccaacggaggaagggatttttagaatggcagagatgatgcggatgtaggagactaggataagtagcagaggaatgaccaaggcaaatacaccaagcatgaatatgaccagctgactgaagccggagtgctgagatgccagtttaaggacaggggagatgtcacagaagaagtgatggagctggttggaggagtggaagggcagatgaaatactagggaggtggtgaccagggagacagtgaagccacaggcacaggcagcagccattagtcccatacacaccccatgtcccatgagcactgagtagcgcagtgggttacagatggccatatagcgatcatagcccatggctgccagcaggaaggagtgagaggagccaaagaagaggaaggaaaacatttggatggcacagcccaggaaagaaatggtcttcttctgggacagcaggtcaaccagcatcttgggtacaatgacaaaggtatagcaaatctcagagcaagaaaggatggcaaggaagaagtacatgggagtatgaagggctctgtccagcacaatggtggaaatgatgattgcattggtgcccagagtgaacaggtagaggagcaggaagataacaaagagcagctgctgcagcctggccagggatgagaagccgaggacgacgaactctctcaccacagtcttattgacttgctccatggagagcacttctataaaggagagtcagggacagaggtagaaaccaggatccagaaaggagagtggaaatgtacgggaaatttcacacaaagtttgcaggtggcaggcatttccagatatttgatggaattcttcattcccccattaaaatgcctgctaaaagaagaattaggcaaaatatgcaaaagaataactgatagccagtttggaggccttctctaatgtgaagaacaggttatctctctgaccaaggattaggaaatttgctaatagttttccttcttatgtaacagagagattgttgtttttgtcacttactataaacccaaggcaactcactctccaaagtggaaaacgttaacttcagctacctgaagctgatcagaatatagaacgaaagaatgaataatattcagacataatcatgtggacttcagtttatccaaccatgaaatgagaaaggagataaagtattccatggtctctaagtaaagatgtgagcacacatctatttactgggaactttttatatctccaagggaacaataagaaatactattggaagttccacaagttgaaacattgagtcaacagtgaaacaaaaaataacattagccagatgtggtggctcacacctgtaatcccagcactttgagaagccaaggtgggtggattgcttgaggccaggggttcaagaccagcctcggcaacatggcaaaacctggtctttactaaaagtacaaaaattagccaggtatggcagcacacacctgtaatcccagctactcgggaggctgaggcatgagattcacttgagcccgggaggcggaggttgcagtgagccaagattgtgcctctgcactccagactgggtgacacagtgagaatctgtctcaaaaataaataaataaaataaaataaaaataaataacattagtgcattagtataaagaaaaaaattcttctttcaggaagagaatagtcaccagggtggtaaagagagatgactgactttgtggcattttgtaacacacttcacttttccatgctgagctaacttggagaaactcagagaaataagagttttgtagaaatgacagagcttgctacagagtgtgagagagaatggcacacttgggaattttgccagtttcccctctcctgctgtaaaccataggctttgtatcttttgtatgttgttatgttaataagatttcttttgaacattctgccactaaaaatattttgcaaactgccattacaaattatttctaaaatcatcttaggcctaatttttttcactggaacatttttcaataacccaacctaataagtaaaaaaagcactatctggatacaaaatcatccagtatgtcttgctggtatccagtcttcatttatatacttctgaagttactacatcattttgtcttgggaaattattggcatctgctaccagaattttgttgctgttacttttccatttttctattcaatagcaactttttttgtttcctgaatcctaagttaattcatcaggcattcttgaaattcattatatctattcatagaatttggagatgattttttttctttcttacttactagaaactggtcctaaacttagttaatataattacttattttaataacgttagtataactataaagatattactattgtacataaacatagaaaaagtaaacacaatgtatacctccattgatatttgtgtatgagtgtgtgtgtattagttatatgtttttatatacagaaaggtaaaagtttccctacataatacctccttctggacaaatgatttcctgtctattcaaaacaatgaggaaatctaaacttatggtcattgcttagccttgcctcattgctttcccaaaagactttcatttgaatcttctttcaactaatcaacctttaaccgccactaggccctcacttgactgaatatgatgaataatgtaaaccatggaagctggaattct

SEQ ID NO: 1471 - DNA, 4001 bp, Homo sapiens
gagaacagattgattgttccatatgcaaagctttccacttggtgaatatttagtgaaattgacttaatctttagcttgccttgcctggtcatttagggtgattttaggtcttgtcattaatccattcccctgtgaatatcttcagggtatgctgaccaaatttagatgtatgcctctgcatacaaaattagaaatgatcgtatttcattaatacactagaagcatggaaatggataacttttcataattttctaacttgaacattatttggatatatcttatgcatcaaacattgtaatgacgcttaacaagtatctcatttaacaattgtgatctgatgattttggaagactgaggtccagaaaacatctagaaaaatcctagagatagaagcttcctgagtccctagaacagagagttagggttgtgccacattttgcagggttagttttcagcctggctgagattgggtgacagtatttactacagcctaaaattctgaacatacatatgcttccccataatagccatctgttattttttaatcaattgaaaaaaaaccttcaataggcaataattcatgtgagtgtggcaagcagttgtgtttttctaaattttatatttggagatgacgggaaatgatctatgttcctgaacataatgctcaattgcttgatcatttgtgttctgggaattttttcctgtataacttgtggtttacggtttggaaagagcagaatcaagatttttttttttttttttttttgagacagagtcttactctgtcgcccaggctggagtgcagtgacacaatctcactgcaaccttctgcctcctgggttcaagtgattctcctgtctcaggctcctgagtagctgagattacaggagcccaccacagcatccggttaatttgtatattttttggtagagataggatttcactatgttggccaggctggtcttgaagtcctgacctcaggtgatccacctgtctcagccttccaaaatgctgggattacagtcgtgagaaactgcacctggccagaatcaagattaattttacaacagggaaattgttcttctcacaattttacaaagagctgatttgaactctttatttctcaagctataaatcattgggttgaacaatggagttataatagtgtaggatactgatattagagcatcctggcttgaggagtagttggactgaggccttaagtagataaaggaggcacagccatagtggacagtgacaataatgaggtgagatacacaggtagaaaaagctttgcacctacccagtgtggaaggaaactgaagtatggcagagaggatgtgaacataggacaccaagatcaacaataaggggatagccaggaccaatgtacagagcatgaagatgacaatctgactaaagtggttatggtgagatgccagcttgaggacaggagcaatgtcacagaagaagtgatgtagttgattggaggaataaaaaggcaggtgaaataccaaggatgtgatgatctgtgcaacagtgaagccacaggcacaggcagcagccactagtcccatacacaccccatgtcccattagcactgagtagcgcagtgggttacagatggctatgtaacgatcataacccatgactgccagcagaaaggagtgagagcagccaaggaagaggaaggaaaacatttggatggcacagcccaggaaagaaatggtcttcttctgggacagcaggtcaaccagcatcttgggtacaatgatgaaggtgtagcaaatctcagagcaagagaggatggcaaggaagaagtacatggggatatgaagggccctgtccaggacaatggtggaaatgatgattgcattggtgcccagagtgaacaggtagaggagcaggaagataacaaagagcagctgctgcagcctggccagggatgagaagccgaggaagatgacctctctcaccacagtctcattgacccgctccatggagcatacatcatcaggagacaattagggagagaagaggagtcagcaccaaaagaaatccctgaaaataagtagattcacagaaaattgatcatcagcatgcgttctcagattttgaattctgaactcatcttttctcctccctcttgtttttccaagacatgatgttgctaaaatcaggcaagcgttcatcaaactttgagtctccatagtagttctaacaccatagccaaaaagttcttgatacttttcagattcaaacaacccttcacctccattcccatcatgaggctgttgctcagattcttagcctttcactcttagattatcttgcaaagcttgtctttttggctttcttgtatctgtattctctcaaaaaaaaaatctttcctacagttgcaaagtaaaccatctgaatataccatagttgtctataactcaatggttcttaattgtcattctcgttacacctaaacccccactcttagttttagtctctccataacttagattcaaattctcttcaacactgttttccttacctcctggcaggaattgtcagttatacttttattatgctggctcttgtttctgtagctttatcctggtcccaaagtggaaaaaaattatcttcttctttctattcattaatttcaaggtggaatatgtctacactttctctaatacctatatcagagtctttcctctggcagggaggaccacaatctttcttcaggattctgtccattttcatcacttcccttaaatccttctgaagtcacattatggctcctttcccatggccactcttacatctctgcaacccatctttcccgtgatgacagcctaatcttttaaaatataaattgtattatattgcttcactcttcaaaaattttacttatggctatagtatagagttcaaactcttcattgtttccaaaagtctttcctttggggaaataaactatctttctgtgctcattttcagaccttaatgggatgtatcactattgcccaaatatgttctggacttccttgcctctattccttgctcatattagtttgttattcacttttatttacagatattttatggttcttctgaagcctccattaaaatctacctttttgaaagctttcttgctaccttctggtgaaaggagttgtttcttcctcagaactcacataagacattgattgccaaaattatgtgatatttacttaattttgaaatattctaatgaattgttcttatatctattttctctaccagattttgtacctttgaggaaaatatgtgaattttatgtatctttgcctgagttctcctctgcatctagaaccatattaagtacttaacaccttctcaataaataattgttatataaataagagagttaacttgccacattatctattttattcatgggcagcacagacttcttagaactcacagagtaagagaattctcagtgttatttctttctaggcacaagaattgctcagtgtcaagaatgctaagaatgtctgcaccacataaaactaagtctggcccatttaaatctgaaagagaaatctctgtttacaatagaaaactggcactgaagagagcatctggtcatcagaattctgtgtacctaaggtgattcccaattcctagtacatttgctgctctgtagagcaaattagaattcaaataagtgagagaaaaatcataaagataaccttacaattatcccattaaaagtatattattaaaatcaccttaactaatattaataacaaaattaatgacaatgcatttttatgttacctaagaaccaccaaatcaagaatatcagatagtacacatgtattaagcagtgtgattataacaatgtgtcagctactaggtctgcaatgaagatacacatttaaataagacccagtcccgagcctctagttcatgtttcaagggtgagacccattcagaagatattattaaaaatgtggtgattg

SEQ ID NO: 1472 - DNA, 4001 bp, Homo sapiens
ttttgagaaaaaaggggtggaaatataatctttggaggaagctcttgactttcttaatgttttatctctccccaagagtagaaaactgcttcaagatattgatatatatctgctggagataaaggaacacagtggattgctatctgagctcacctgagaaatctgaatgtagaaatctgcagttactggcctgaaataccagtacacagagaaatatgtcagcacttcaactgactatgggtagcaaggattgtcaaaattttcttttggatcacatattgaccatttaggagaaattgtcattgtggaatcacttaaaaataacattttgtccaataagacctttagaaaacatgggacccagataaatgttgaaacctcagaattaggaggaaactttacaagctgtcagctagaggcagattcaaccatatcacaggaaatgtggtagaagttccgagtaaggaattatttcagcagccatgaaagctccctgcataagaaagactcagtgtgcaacatctgaaagcagtattgccagagcatgactgtggcaatgaagcaagatgttccctccacctatccctccctccccagtataatgcttgaagggtcagtcactgaaataagtagagagaaaagtgtttgctgaaagagctaatacataagtcaaccttcactggtaccaatgaaggcttcccagttcaaaattcaacacccagaaaaggcagaaattttagctttaaattaagtttaaattttcagttatcccagtggactaggcatttaaatttgaggagttccctgagattccatatgaggaaatgaaaaacattagcttgtggattaaatttaaagagactgtaaggagaaaaacatattttatgacatgcctcttaaggactcctattatttcaatgaatttgttacagttataatatgcttgtgataaaaaggcattatttattaagaaatctaaaatgtaataatatttcaattatatagttttagagaacctttcttgcccaacacttttctgatagcaagttggacatccttgtttctgaggctataaaccatggggtttagtaatggagtgacaatcgtgtatgtcaccgtcaccagcctgtctttgttggacacatagtttgctgtaggcctcaggtagatgaaggaagcacagccataatgaacaataacaacactgaggtgagaggcgcaggtggaaaacgctttccgtctgccctcagctgagggaatcttcaggatagtcctcagaatgcagagataagaaacacagataaacagaaagggaaccacaagtacaagaactccacaaatgaatatcacaaattcgttaacatctgtgttggtacaagccagaagaatgactgctgagatgtcacagaagtaatgattgactttgttggcgctacaaaaagggaggctgaaaactaaatttactactgtaagagaggccaagaagccaccaattgcacaggcagctgccagttttccacacacctgccagctcataagagtggggtaatgcagagggtgacaaatggcagcatagcgatcataacccatcacacccaatagcaggcagttggtaatggcaaaaccaaggaagaagaacatttgaagagcacaacagttgaaggagattgtcctggccacagaaagtagattgatgagcatcttgggtagaatgacaaaggtgtagaaggtctcagatgttgagagaatgccaaggaagaagtacattggtgtgtggaggcttttatccaggtggatgacactgataatggtgacattgccactaagaatgactagatacagaaaaagaaaaactacaaagagggccagctgaatttcaccaaggctggaaaaacccagcaacaggaattcggtgaccatggtgaggttttctgccaagatctgcaaagggggaaagaagtaaaacatattcaggtatgtgaatataagaatttggggcatgcactcctttgttcctttcaggtggtgacaaagaagaatcttgccttttattcaccttttccggttcctaactacctctcatgttcattggttcatggtcctcttcttccatcttcaaagtcaacaaagttacatctctttctctgactttctgattctctctcccaattttaagaacccttatgattactttgggcccaccagaataatacaagataatatctctattttattgtcagttgactttccttctgcagccttaattccttgagcttgtataatctaacatattctcaggttctggtgattaaaacatagacatctttgggagctcattatttggcctactacaacaagcaacaaaaaatctaaaaatgatattaagaaaacaattcaattcacaatatcataaaaaagcttagtgtcagatttaacaaaaaagtgtgagacatatacagagaaatctctcaaacattgctgggttaaattataaaatatatgactaaatgaagaacacccatgttcatgagtttaaagatgtaataaaataaagagcaattctgaccaaattggtctatgtagtcaacataattcttaacaaatcccagcaggcttttcatctaaaggttgataagatgattataaaatttatatgaaaagaaatcagaattgcccaaatgtgtctagtttaatcactaaatagaggcttttggagcattgtgatccatttaattgtcaccattttagtcctactctaggatctttaagtgtttctggaacacatcacagctctttgaagattgttgatagaaacaattgtaagttgattatttgcattctcaggctgataaagtttaccactctagtaatgcccagttatatttgtaataataattaaaataaccataaacacattttacaaaagaagatattatatacctgaacagagggttgggagataggttctgttgagctcaatatagatggattgaattaggttaatatcacttattccccactttgaacagcaataatgtagacattcaagaaaaatgagcaaacagattatgactaattatctgtatttatatgcagaataagtattttctgaagtgactagaattatccttatcaccttccttctttccttacccatcatcttcatctatagacacacatggagtccagcatgccttaaataaaacatggtccattgtagagtcattgaattctgatacataaactgcttttaggaaaaactttgtgtatggtttatgaaaaaatgaaaattggggtttgaaacttacaatagtttttttctgcagtaaatagtcaaagcaatgtagtatacctttgattttctagtaacagttaattaaatcttagtataagagaagacaagaatactttttagtcaggtagaatcccattaaataaaattagcttatatgaaattttttctaattactgcacataaacctcccctcaggttctaacaggtagaaataagaatctcttctctctgtcaatagtttcttttgctgtgcaaaagctctagtttaattagctcccacttatgaatttttgtttttgctacaattgcttttgggaacttaaccaaaaattctttgccaaggctgatattgagaatagtattccccaggttttcgtctaggatttttagagtttgaggttttacatttaaatttttaatccactttgagttaatttttgtatatggtgaaaagtgagggtccagtttccctcttctgcagatggctagccagctattcccacaccatttattgaatagggcgtccttgttccattgtttgctcttgtcagccttgttgaagatcagatggttgtaggtgtgcagcttgctttcttagttttttattatgttcctttggtctatgtgtctgtatttgcaccagaaccatgctgtttgggttactgtaacgttatagtatagtttgaagttggctagtatgatgctt

SEQ ID NO: 1473 - DNA, 4001 bp, Homo sapiens
aaataacatttcttaaactatgtagcttgaaaatgatagtttagatttaaaatcaatcctgatcagtgtttataattcaaattatattattgtaatcaataaaatgttaggttcttataaatattacactatgatcatcatagagattatggccatttttgcctcttcagagcactgtgttctatttgatcatcaagcatgaggatgtcattattgtttatttttagtctattattaaataaaattacatgatctgaaagacttaaacatatagctaagtgaaaacaaaacaagaactataaataaaaataatgtttaacttatgattaacataataaaaatctagaattatcaacaattctgataatatcgactaacatttttgtcactgtaaaacccagtttcttagtattaatatcttgttctccatttaaggcccagtttaaattttctctcccttcttttcatcccacttattctaaatctttttctctttcagatggaataaatactcattcctttgattctcataacttttatttatattcttttaactgatctgattatcttgcattatcatatttttttcagtgttcatcttttcacctaaccagtcccaaccaccataaactatacatttgttcattttaatttttcctctttgaatgggacttggtacacagatgaatgtattactagatgaatgcctgtgtcccggataaaaatgcttccagccacttcagactctgttctgtctctccaactggaaaagcaattcttgtccttatatttgttttggttgtgtctttccttgaaaaactctcatgcttttctctttttgccaagtgtgaattctttttttttaactagacatcggacaatatagagtgtagattgacttgcattttttttctttttggaataggagaaaataaaaaggcaagagtagtcttaatccttggaaacactgtctgagacatgcattaaaggtcagaaaattttatgcctttgatttcttctgtgactatcctagttaattttattattattttttgttagctcatcttggttgccacaggcattccaagaactcttttcaatgcagtttttacctctttgttcctcagactgtagacaagaggattaagtaagggagtaaccactgtgtaggtcactgccaccaactgatccttgtctgaggcagacttggacttgggccgcagatagatgatagaggcacagccatagtggacaaagaccacagtgagatgtgaggcacaggtgacaaaggccttcttgccctcagctgaggggatcttcaggatggtgttaactatgaagccataggatatgagaattaacagaaaaggcaccataattaccaggatgctgaggctaaataaagccagctctttcacatgggtgtcagtgcaggctaacttgataacaggtgccatgtcacagaaatagtggttaaccctgttggggccacaaaaacgcatgtcacaaatgaggttggtggccaccaaagcaataaagaaacctgtggctcctgagagagaaatcaactccaaccccagccttttgtttatgatgagtgtgtacctcagagggtgacaaattgctacatagcgatcatatcccatcacagcaatgaggaggcagttggtgcaagcaaagccaaggaaaaagaacagctgggtggcacaggccatgaaggagatggtcttggtgtctgagagcaggtggaccagcagctgagggatgatgacaaaagtgtagcaggactcagaaaatgaaaggatgaatagaaagccatacatgggagtgtggagagtccagctgaagcgaataacggccatgatggtcacattggccaccaggattgtcaagtataggagaagaaagatgacaaaaagcagcagctggagctcccccaggctggagaaacccaccaggatgaactgtgtaaccacagtggttttgttgaaacctcgcatctgaagaacttctttctgtgaatgtgtttgaaagagacaaaatgataactatctttgtaatacgaacattttcccaacgccttcactttaagtatattgtcagattcataatgttaacatctctttctcttagtctatctagatatagatgcctctttaatgatttttccaaaaaattattaatctgaagtaacagagaaatgattatctacagtatataaataccccaaagttaaaaggatccaactatttgacaaagtgaaaaaattctctcagtttaagaagaacattacctttaatatggaatagaaaatttaaattatttttcttgtactgtatgtatttggtccttggatgtatattctatcctagtaatttggtttcttttcctaatatcacaatccatttaattagcattattgtaaaggcattaaaacactgtgcctcagagcatgaactcaggaacaagaatgctagagtttgaaacttgcctttgccacttagagctatgaacttcagtgtgacaatttttgtcatttgtaagacataaataataatagaacatattatataggattgttgtaagaacttagatggtatcagtaaagtacttgaaacagcacttaacacatagtaactccaatctatgtgtcagctgcttatgcagttaaggagttgagaggcaaatatcctggtttgatatttgaacactagaagagcctggatccttaaatcaggacagagtttccctgcatttgactcaagtgttcttatccttgagattctttttttaaaattgagcaaaaatttaaatatgcacagttaaagaaagaactgttacttttacattaaaaattattttctttttaatttattttttattagcaactaataattatacctatttatggggtattatgtgatgtttggatacatgtatacattgtgggatgattaaatcagggttctttaataaatctgcccttttttatctaaggagtctatagcctttgaattctctttcatgattctatgacatttgttctgtatgtttctggaactgtgaagggacccaagtgtaaaacctgggtcacaaggttatgatgtatctgtctatgaaacaaaatagattgatgatcactagggataggggtggagcaggaagacttaggttaagtcttctctctattgaagaaaggagaggaaataacgtgaacacaccttgaatctcttgcaaataaaatagccagaaagtgctaaatggaaagagaagagcctatctcaggaacttcccattattttatagtctaggttattcctcctcccagagccctaatcatttttactttcagaatcagcttcagagattcaggagaaaccagatgtaatatttgcacaactcaacatctcccaacttgttggctactttaatggctataagatgttaggagttgtttgacatgacacacttgagtttgttcattgttcatcatctctgttgtggtttatttgcttaggtagttccacacacctgctacaacagctttttcctttgtttcagaccttgcggaaaataagatgctttcatgtaagctacttcattttgactctaacatcctggtagatagcaaaagtgtctgtcgctatctcacgggtaaggcaagtgtactaagtgccctctcctgggcagagtaacccatgaacatcctcatccttgcatttaacatgttgcattgaacatacctctttatatatttggcactctttatagattataagcttctcacatgcaggaataactttttttaattaaaaaatgagtccctagaatatagcatagtttgtgatttatcatgtgctcaaatattttgacttgattagaatgtcaaaaattaaataatatgctcaagtggtagatccagtatcagaattcaagtcttctaacttcaaatccactttctacttaccaaattttatggcacccattctttaccttgtgag

SEQ ID NO: 1474 - DNA, 4001 bp, Homo sapiens
tccctagattgaataaccaattgtcgggagtggaaccaaagcaaaagaaaatgcttgccactaaggaatggctgcagattgaaggtagcagagatttttgtctgcacctgtatcatgaaaataatcccaaagaaagagtgtcatggtcaggggtaaacttaatcagttaatgtgcataataaatttatccactatttcatttatttcataacattcccataagtaacagaactcaaaattacatcaatactcttacatctcttatcagaaatgatttgtctcatgggaggtgcatttcagtgcttcataacatttgcctaaaaaaaatccttaacttttacgtctattattattattattattattattattattattattattatttgagatggagttttgctcttgtcacctgggctggagtgcaatggcatggtctctgctcactctgcctcctgggttcaagctattctcctgcctcagcctcccgagtagctgggattacaggcacccaccaccatgcccagctaatttttgtatttttagtagagatggggttttaccatgttggccaggccggtctcaaacccctggcctcaagtgatctgcccacctcggcctcccaaagtgctgggattacaagcctgagccatggttgacatctttagatatttaaaacatcactcagtgcagtggatttatatgctgttttttccttccacactttttactcaattcatgaatactgcaggacacccggaagttgattatcagaatcttttatctgcagggacattcttcttctgatactggatagtagaagggttggacagcttctctaacaagctaagtagatgcctgtggctacttagttcccagtctgtgtcacttgcttcttacatcccaacctctggaacaaggcaaatggtacaagtttctccaggggtcacaggataaatgcccctattgaattctggggacattgagcccttcttcaaacaagcagcaacaacccaagattattttttcaaggcaactgtgtttcccatcattcttctaaaagcatttttcatgtccttattcctcaggctgaatatgatggggctgaggaagggggtaatgacagtataagggactgctatgagtgtgtcatctcctgaggcttctggcttcaaataaacaatagatgcaaaaccaaagtggattataaccacggtgaggtgggaggcacaggtggtgaaggccttctgcttgccctcagctgaagggatcctgaggacagtagaaataatgaagacatcagtcaggatgatgagcagaagggtacccagcaaaccagacactgagatcagtgttataatgaattctgtgtggttactgtctatacaagacagcctaataactgccagcatatggcagaagaagtgtttgacaaggttgggtctgcagaaagagtccctgaatatcagtgcagtctctgtaagagagataaagaagcctgcagtgcaagcagaggccacaagttgtccacatacaatgttggtcataagcagtggatatcttagagggttacagatggccaggaagcggtcatatcccatcaaagtgagaatgatacagtttgtgccaccaagtcccaagaagaagcacatctgtaagctacaacctgtgactgaaatgcttctgtccttggccagtagatcttccagcatcttggggacgatggtcagcgtatagcaggtctcagagaaggagagtgcactaaggaagagatacataggggtgtggagggacctgtccacccaagttagacccatgatgatcagattacctgcaagggtgagaaggtagagacaaaagaagaccacaaaaagaaatgtctgtacatgtgggtacacagaaaagccaacaagaatgaattccttcaggattgtctggttgatcttcatcgtttgaatgtctgaaatttgaaagaaacaacaataaacattcaacaccattatcttttgataccatcaaaggaaaattgtgatgactaagataaatcatcagaattacaattaccaactgctttttcttgtagtttagcaaaactatgtatatgtaggtaatgtgtttttctcatttttcatccattcattttttcctttattcagcagctaattagtgatgacttagtatatgacatcactatgtatatgacaagaaggcttgctctggcctatttttaaaaggattttatgagcatgtggtataatatgggaggaaacactccagttgatgctcagataaaggaggttcagatgcattaggtgagctttatttggatgagcttctgaacacagagaaaacttttaagtggctaatagagtcagggtccaacacagaaacttccacacaatgtatggtctataaatatttactgcgtaaatatcaagaattgatttccaagtaattttaggacaaaacttggacaatcacttgcaattgttggagaagcccaaagtcattaacccttcttggagaatatatttaggtcctagaattttaaaagaaagttaaaaaaacatgtgtcattatttctgctctgagaagagggaaagaagaaagatagggtagcctaggactcttaggattaatagtaattaattaaatctgtggatggttttgataagcagactatacaagcatagtgcaggtggcaattgagattgtgtctattttgttaattcccagctcagcattcaaagaaaataagtggcatttaataattgtataaatttttcaataatgctacatctgatttaatctcatagtcctctgatttctatagcatgttgttagtccctatatttaacacattgtttcagccctgtagtatattgagctactgttttccctgccccatatgtcaacatatttaataactagcatttgtggggtttatatttttccaaattatttcaaatgtttattgattttactcttcacagcataaatataaagtgaatgggacggttgcgaaatgggtaggacaagtgtgattacttattttagaaataaaattatgtcttggaagtggcatatttgtgactagaagcaaagagatttgacttgaattgtatactcttttcatttatcaatgcttagtgcttcaagaaagagaccataagtcttatatttttgtatttttcagagtaataatatggagcactttaagaaggtaataattcctggtgaatgttagatggatgagttaatcatcaaaaaagtgcttagtatataaatgatttttgttttcctttgttattcagcactgtatagcatttgatttttgagcatggaggttaacagactttccactctaattaggttttgtttaggctaagattaagcattctcatggcagagtctaacttatcactgacagtcagaagacacagtagaaaaaaggtctgaattataagtggttcctaaaataatccacaaccctttggactctactttaaaggtccctttggttctttgtcttcttagaccttacaagtttcttactctctgacagtcatacatgaatcacatgacttaatcttttcttatctcctatcaactctttctccattctgtttccctttcacttactgtatctactcttcttagtgagcagtcatttcccaataagaagaccatttttctgttctcttacctaagggaatattatagaggaccatgtctattataacccggggcttcctcttgaggccttttggtgtgagcctctttagtaaccacattcagtacgagtatctttggtttccaaatctacttgcagatgattgttccacttttctctatgatcagctttctgctacatttcaactgttcagaggcatctttttccttccagaagtattaggcttcaataggttccttctgcttattcctaagccactgcaaaaaattcctcctatcagtagagcacttcatacaccaatgctccc

SEQ ID NO: 1475 - DNA, 4001 bp, Homo sapiens
gaagctgaaaaaaatgttaaataacttacctagagtcacacagctagtaagttgaagagtttggattcaaactcctgcctgacggtcttgtgagttcattacactttctctaataatgtccgccgctatatataaccacattatatgtggaaagtggaataggcagaatagatagttctgcaatagattcaaaagaacagtatccaatttgataagcgacccaaatgagaaaggtctttgacactcaagattctgaagctaccagggaacattaacagttataaaaaaaaataggaagtaaatatattttctgaaatagagtgcacccagcttggaaaatcaatcaaaacaaaaagggcaaagtaacagagtcagagatagtgaggacaactatataaaaagatgattccatgtttttgctactgtcaatagcacaatgaggaatgtataagcacatgtgccccactgtatatgaaataatagttgaaattaaaaaaaataaaaacataaaaagatgaaagacacccagtgggagtaaaaatgacccacctgttcatttaacaaagctttaaactaacctgtcaagctgatattccccaggtttcaaatcttggaagaacattacaggtcaaatagtctaattatgtaatgattttagaaatctctacagtatccctgatgggctccagccagccctgccttgaacttgaacactccaaacttccctcattttgttcagctcaattaaaaaattcttgattatcttaattaaatttttaattctcaatgggtttcagtaactaggggtggcatctaggaggctgaaagttaaaattcagattttgggctcattttgagttgtgcacagtgagcagagcaggaagccccgcctctgcattccaagcagtcagggggaagggcaagaggcaggataaggctttcccagaagattgggggtaggacagctttggcctgaggccttgaatacctggccctttggcttgggttcttggtctatgcccagcctacacagaagaaagtgtcctattggggtaaccttcatcctttacccagcaatctccctctgaaagcattcctcagagctgtctgtatagccctattccttagactataaacaatgggattaaggaggggggtcactacagtataggtcatggcaataagctgatctctctcaagagagtagctggctttgggcctcaggtacacgaaggaagcacagccataatgaataatgaccactgtaaggtgcgaggcacaagtggagaaggccttcttctgcccctcagcagaggggatcctcagtattgctgccaagatgtaggcgtaggagatggtgatgaagaagaaggagaccaagaggaccaaaagactgaggataaagatcctcagctcactcgggcctgtatctccacaggctaggctcagcacaggtggcgtgtcacaaaaaaagtgctggatttcatgggagctgcagaatgagaggtggaaaataactagtgtcattcccagtccaaagaggtatccagtcaggaaggaagtaatgaccagctgggcacagagggtaggattcatgtggctggcatagtggagtggagcacagatggccacatatctgtcaaagcccatggcagccagaaggaagcagttagtacaggcccatgaggcagaaaagaacatctgggcagcacagcccacataggagatagcctggtcccccccagccaggccagagagcattctagggatgatgcccaaagtgtagcaggtctcagagaaggataggaaggaaaggaagaggtacatgggggtgtgcagatggctatccagcctgatggctatgataatgaagacattgctggtcagagtgactagatacagagagaggaacaaggcaaagagaaggagctgcaactccccagaactggagaagcccaggaagacaaaatccctccaggaggttacgttggtctgccccattctgagaggtatatccctgatagatttgttgatttcttccaccttgccagtagatgcctaacttctttaaaaggtggatgatatggattctttttctcttgttcctgttgcaacttaaaaaggcagctctgatttagactctactcaaacttcaaaaaagtatttgttaaattagacacaaatgtatgggtccattcccatatgactgtatgtacatatacacatacacagatgcacaatcacagacattcatatgcacatacttgcacacaaacatatgtatgactacatacatgcaggtgtatatatgctttatagcattcacacataattatgcatatcttacacattcaaaactataaattatacatttgctattaatggccatatccacaaatatatcaggcaggcacatacattacaaacacatatgtatatagatagcatgcaaattcgtagatacacacatcacatataaagatacacacaccacatatacgtttatattgtctttatacatacactatcacataagaatacacatatggacacacccatattgcttgttagaactttgtggggaggtggggaaacttgatcttgatggattttgttttatagatcaggtaacaaagatcaagagaggtgaagtgactttcttgaagtcacacagaaccagtattagaaaacaagtatggtgactcttaatctatccttattttccccatacaatgatgactctctttagagactatggaacacacactaatatgaatatggagtaagaaatagttagttcaacgataatcactttatctatacaacccctcttccaagccattttaccctttccaaattccttgggcagagtagggcaggcttcttttacctgtgaatctatgttaagcacggaagaaaatgtcagggctcaaggcaggttgtgcagcatgcatctctcagcccaaaatcaggtactgctgcctccaaaaactctactctaaaccaaagcataagtcaagggaggattctccactcacctgaacagactcacgctgacctgaagaggctcacaaagcaagtcctgccttttagctcccatgcactagactgcctcccagcaggatagaccacaggagaaagacttgagatgcatcttgaaatctcctactctgagcagtgtgatgtctccaaatgatacaaagaaatcttcttccacacccctagttccaggtggtaaataataccttcttccatccaaacagcttctttctcagaggattctctagtcccaatgggtgctgtctcaggaagcacgtctaattgtgtttttttgtcattagttgggaatatccttttggggaaagcagaaaggggaatgtgaacaagagatactaggatcatgatttaaataataagtattgtatcatgtgctaagtattaaacactaatttttttcacaacataaatctcttttaaaatttacagcagcctagtgagatagtgttaatagttacactttatagaagtgtaactgagcctaatagactttaaataactggtccaaaattacagaactaaggacttatgcttataaatttataccataagatgtataatttaaaaatgaaacaagaattcagctgctccccactgctgtctcaagagcttgatataactactttggatatgtgcctggtttcaaagtcattctgaagaaaattctgatctctttcagggtcaatttattcctgcatcctcatttgtctattccatttttttctcagatgcatcattttaaaagcaactttaccttattttcatcctcttcctttgtttcaacaatgctgcaatatctgcatccagacaagtgatatactttccaccttcagattgttctgaaaccttaaaatgtcccaaaagtctacctacaactaggttaatctgacttgtcactcttaaaatgcatgtctctctgatatacttaatggtgtaaatagttg

SEQ ID NO: 1476 - DNA, 4001 bp, Homo sapiens
tgaataaaataaactataaaagtgatttaagagcctgggcgcggtggctcacccctgtaatcccagcactttgagaggccgaggcgggtggagcttgaggtcaggagttcaagacctgcctgaccaacagggtgaaactctatctctactaaaaaaaaaaaaaatacaaaaattagctgggcctggtggtgcatgcctgtattcccagctactcaggaggctgaagcaggagaatcgcttgaacctgggaggtggaggttgcagtgagccaaaatcgtgccattgcactccagcctgggcgacagagtgagactctgtctcaagaaaataaaaagtgatttaaacattttagtgacatcctctgactctcaggactcacagtagcacagaatactgaggatcttctccttcctccctccctcccttccctcctttcctccctccctccctccctcccttccttcccacaatttcattaaacaaaaaacactaaaacatctaaggtcttgtagatgaatatttggcacttcaaaggccttacttctttcttatctttaggagataatgtaggtcaacaaacattttaaatgtcttcttttttttatttattctttctactgctatttaataagcaccaatggcacccaccaggttttaggtccacaaggccagtctactaagagtacttaaaagatgcagagctttctgtacataaggttatgtaaacaaagggaaatcttattgtagaatgtgaaagtaatgtgtgtgtaatcaccatccactggaattcaatcagattttcctaacaagatgttagaaagtgtctaggacaaaactgacctcaaaatggtttgatggaggcagtttatcttctgaccagttgctagtgaggaaccctcaaaaagctgttgttttgtggcctacagaattcaatgcagttctgacaatgatcttcaggtttaaaggtctgaatctaccattcacttaaccctgaatttaatccactgcatgttctgtgcaattttctttacctaataaaggaacttccttttacttgtactccatagaataccacatttccttctcatgacctttctaacagcttctttgaagtctttgttcctcaagctgtagataactgggttcagcagtggtgtgaccacagtgtagaagacagaaatgatcttgttgatttcaggcaacaggtggggactgggacacacatacatggagatcatggtcccgtagtagagagtgacaacagccaggtgggagccacatgtggaaaaggtctttctccggccagaggtggaagggattctcaatatggaggacacaatgaaaacatagggccccagtgtcagaaaaaaacaaatgcacagcacggcaattgacaggatgaagatggtcacctcggtgatataaactctggaacaggagagctgcatgagtggcgggaggtcgcagaagaaatggttaatctgattgcgcccacagaagtccaacctggaaatcatcagggaaggcagaaagcctgtgctgacccctgtgcaccaggagaccaccaccaacctggcacagagcccacgatgcatgaggaaggggtagcggagtgggctgcagatggccaggtaacggtcataggccatgaaggccaggagaaagcactcggtggcgccgaggaatacgaagaagtagagctgtgccatgcaggcagagaaggagatggcttggccccaggacagcaggttggctaggagaaggggcacagtggtggacgtgtaccagacctccagaaaggagagatgctggaggaacatgtacataggggagtgcagtcgcaggccctggctcaccacggtgatgatgacaacattccctataatggtcaggcagtagatgagcaggaaaatgacaaagagcagggcctgccattcaagaaggttctggaatcctaacagctgaaagttagtcacagtggaggtattttggggctccattgcctgtgggggatgaaaaacattctggaaaagcacaggatgcaaggcgcaaatttatcactggtgatgcttggaacttcagagattaatttttaaatagtttagatctgtatgcacagctttttagaaggataaatgcataattccatatctctttcgtaagaatacattttgaaatcttaagctgaatgtgaatattagatcttgtaaggagactcagcaagtttcattcatctgggttctctgaaatcttgaagtctccttccaaagacaggcaaaaaaggactcttattagtagatcttcagtgttctcaccatacaaaaaagaaaaattgaggtgatgaatatgttaattggattgattgtgatgattatttcacaatgaatacatctacgagaacaaagttgtacactgtaaatatatagtatacaataattatcaactacacctcaataaagctggacaaaaactcagaaaactaacaataacaacaaagctttaaaaaaaatcctgcacggccgggcgcagtggctcacgcctgtaataccagcactttggaaggccgaggcgggcgtatcacgaggtcaagagttcgagaccagcctgagcaacacagtgaaaccccgtctctactaaaaatacaaaaattagctgggtgtagtggtgcctgcctgtaatcccagctacgtgggaggctggggctggagaatcgcttgaatccgggaggcggagattgcagtgagccaagatcgcaccactgcattccagcctgggtgacagggcgagactccgtctcaaaaaaaaaaaaaaaatcatgcacatgtggaagcaaatgcctttcccttctcatctgtgggctttgtctgaaaaagaagccagacacagcacatctcctatgccatcttgggaaagtgtatatattccaccctcaaacaatatttattagtccctgctgtgtgtgtgtgtttgtgtgtgtgtgtttgtgtgtgtgtgtgtgtgtgtgaaggcctgtgctgaactaatctgcctcactccactggtgtcctttcttgcctcatccgataccatactcatgctcagccactataattacaccctcgtgtacaccttttattctttcatttaattcattgtctatagttctggataaagtaaacatccacctgccatacaggagcttctgtgaagttgagggagtgagacaagcaagaatagaacctctttaaaatgtacaaccaacaaactcagtgtgcccttactgctggagagcaatcattctgtatttcccttataaaccaaaaataaaattctaaaccccacaactgactgagcggactcctcctttcagccaaggggatttcaaagaaacctaaaaattctggttcagatcatgatgggaagagggggttggacaaacctcattacactctcctttcttcagaattcaggcataactgagcagcaataacatcaaaaaagagattttaaggctgacgaaacagactctgtagaaataagctaccaaattctaacctgactctagtatagcatcatgacagacagccgaccctgaaggaaatggaaatattttaccacaaaatatatttatttgtcatatttaaaatggccctgcaaagctgtctcttgtgggggaaatctacattctgcggagaatccctttccctctccaggcctttgtctgatcctcaagagattagctgaaagtctagcaccttttaaaggtctcaatagaacatttttcccatctgctgcttctcaggctggcaacatatgagacttcatctacatcataagaaccttggtttccccaacccccctatcttaacccagattctcctttctattgattccaggtcttcagacaataacttaattctttcaaccagttgccaatcaaaaagtctttgcatccacgtatgactgtaaccttcccccattcttggagctgtcctgcctttccagaccaaaccaacgcatag

SEQ ID NO: 1477 - DNA, 4001 bp, Homo sapiens
catttatgatacatttgctagtagatactcatagcaactgccatagtatagacacccatttctcatcccatctatgttacatccaaattttttcaggggtgccaagtgcctaattttagaatatactcttccaattggtacttacaacttgaaatggtgtaataatatagctatagccaatgagatgtagcttatacttactgggttatccttataaaaataataggcagtgcttcatttgcctcatgaaatctctgtccttagccttcattctacttgggttatggatgagacgcctagtaatacaaaagccattcatgatcctagggaaaacaatattgaagggcagaacaagatgactgaaggtgcctgtttcattgatggacccattgaaccgccatacacactattgactgcctgcctaatgtcagactaatgttgcatgaggcataagtgtactcactggtttaaaaggactggagtaatattctgtcactttttcctgaacacatggagactttagagtttgcccaataattttattcagtagagcacgatttttctccaatgaaatctaaataacgtaatgaggttcaaccccagagtagatacctcattatcacaatgctgtaagtgaatgaacccagcctattaagcaagggaaaatttatcacacacactacttctctccagctcacattcacataccaacaaataaatggcacaaaatacacaaaatgttttgtgatatttgcatgtatgatgtgcacatgcacatataggtaaatatttgtgtatatgcatatataagtattcgaagttatgtacatatttttggaaaatgttggaatatatattatgacatatatttatgtgagggtattgtgcatattgctttatgaatattcttcacataaagagtacagaattttggagacaatgagactgctaggaagaaggcaggaataagagggaagggaaaattggagtggaggtaagtatgaaaaaccagtaaaatctgagatgctctagaagatggttctggagtacagaagtgatgttgcatgttgaaactactagtgtttcagaaatgcaaacaccttcctaattcctgcctgcatctccctattctggaagctgtacaccatcgggtttaatgtgggagtcacaagagtatagagtgcagctaccaccttgtctctttcaaatgtatagctggaagcagggcggatataggtgtagattacaggagaatagtaaagggtcaccactgtgagatgagatgagcatgttgagaaggccttcctcttgccttctactgtgcggatacggagaatagcaacaatgataaaaccataggagatgcaggtaagaataaagtcccctatggccagggtaatatcagcaacatacaccatcacctcattgattcttacagggctacaggacaaagccagcaatgggggtatctcacagaagaagtggtcaatggtgtttggcccacagaaagtcaacctcatgataagagctgtgtgcacccaggaattggtgactgcaatagccatgaccatgctgagcaaggctacacacatatggtggttcataatagtactgtaatgaagagggaaacaaatggccacatagcggtcataggccatggtggtgaagagaaccatctcagctcccagagaccatgtgaacaagaagagctgggacatgcagcctgcatatgaaatggtattttctgatgttagcatggtccccagcatcttcggtatgatgcttgttgtgcagatgatgtccacaacagccagtgtcagaaggaaaacatacatgggcgtatgcaaggtgttgttatagattttggcaatgatgatgagcatgttgccgagaaaagccacaagatagacaatgagaaaaaagaggaagataattccctggagttcaggctttttggtgaggcccagaataatgaactcagttacaacgctgtgattcatcctgcttgggtgattgaatggcagtaattgcacagaataaacaactgaaaatggaaagaatccctgtgttgttaggagataacatgaggagtgtgtgtacttagggacttaattcttgattggacacaactttgcagcaggaattcccatttgatggagttctgtattccaggcaatatactctgttttccagactaatcccattctctgatgtatgttcctccattgatgactcaaactgaagccagtggttgagaagaaaaatattttcaaaatgccttcaaatattttgatatcattttcacttaaaacttgtctaaatacacacacacatatatatatatatacacacacatatgtatatattctggatatgcatatatatccaatggagctgtaatacaaattattacatacctcaataatttagttaattgcatggtacatttaggtgtccttgagatatacacgagcaaagatacttgaaataatacaagctgacagggctaattatagtgaggatatttcagatgaaaaatgcccaacctagtattttgaggctgtatattcatgggaacattgactaatgtatcacagtccaaatactaaacaatttaatcaaatgtctgtattagtagtttttcatcggtttgagaagcacattgccaaaattcactggaccagctatttgttttgctgttatataatggcaagataattggatttaaaaatataaaatgtagggttgtgtcttcatttcatcatagctatagactggccatttaagctctgtaagatttggatttattatttctaaacattgaataaattgaaataaatatcagatgttagagagacagagccatgatttctaaaggatacccaagcataaatggcaactggagttttctggaaaataatttctaggacacaagaaaaatctgtgtcctatgttattttcccccaaaacttccatagcattctgttttctgttttcttttactttcttttctaaaaaagatgggggtctcattcttacccaggctggtctcaaactcctgacctcaagagatcctcctgccttgacctcccaaactgcagggattacaggcatgagccactgcacttggttgctgtccgttttcttttatgcttatttattttggtacatttgtatgcacagacagttacacgaattcatggcttttggaactattatgattagatgaatctagtgaaagtattcaaaatagttgtgaatttagtcataaatttatgtttatcaatgttctttaagttttcagagatcatattgtacctctggtatctaaacagagacataaataaaaagtgtttttgagtgtgcgtccacaaatctagtctgttttgctctctcatgccttgtagcctcaataatttgttaaccaaattttagctactgataaattcatctttaactctttaaactggaagaaaaaaatagagcttttgtctaatccataatccatttcagaatctctagctttagtattaatttactcatactgaaggaatgttacagccaccattatttgggtctttgacatgtgacaggctctatgttaggtcctctgcagagatgatacaattttgtcctcacaagcacattgagtctttaatatttttatctttatgtagttgataagcaaacaatgcatgggagtaaaaataatagtaggtagattgtgtgtctcataagtgccaggattaacacctagatcatctgactccaaaaaatttgctattcacctttctactatatactttcaagcaaaacacaaaataatatggcaagtgtacacaaaaactaagaaatataagacagatctgaaagaatatggatttttattttgaatacgagatgatttggaagaggaaaatatagacaagatagttgattcttaaaatttaattcaaatattagaatctttgaaagatctgaactgaagtgatattaactaa

SEQ ID NO: 1478 - DNA, 4001 bp, Homo sapiens
gaaactggaaatttgtagtacagatgctgcagagaaaaataattcacatattcttccaagtttatttcacttaatagattacatgatagaagaaaaaatatctattagtagaagaaagattgagcaatgtatgagataactagaaggaagtccatctagcagaaaatctaatactgggcttccaaataccataataaagactaaggggaaacctcaaaataactataattaaaatgaatatctaaaatagtcaaagcctatatataatatatatatatatttaaatatgtatttaaatatacacatttaaaatgtatacatgggaaccttttaaaactatttatatactgatttgttttgtaactagagcattaggaaagccatgttagggttaataaaacatcaatacaaattaataattattttgacatctgccttcaatgacagttcctttatttctttgagtgctgatatctttctctggcaaaattcaattaatatgcattttctatttgaccttttaccaaaaatgcaaaatgaccatatagaagaaaagaaaacgtcccattcaaattaatttttgagtaagaccacttttttcattttattcttctcagtgacatttaaatagtcaagtcaatacaaggaataaatatggataatttgtcaaagaattctataagacttttttgttcagattgattaggtcataagagagtagaggtttgggttttgtattactgctgctgcttcttcaataagagtttttaagtgagatagtaagttctaaacaaacattctttcttacatcatattaaagataactagaaatcagcttatgtacaccacccaagaaggggtttgggaaatggctccatattgtaaaaattcagaattttacttaagaatagaaaaatgtaattaattgcccaaggaaattttctaataaaataattgctttcatttgtctttttaaatttttacttttaagaattagagataaaaatgaagaattaatgtgtgtacattataaatggtatctattattgaaagaagaaaagcaacagcttttactttttggtgagctttccctttatcaacatccccagagccacctttatggccttgtttctcaaactgtatataatgggattaaaggttgggggcagcatagtgtagaacacagaaattacagcatccaaaatagaaggagactctgaagctggcttcagataagcaatgaatccagtggaaagaaataacacaaccagcaagtgtggaaggcaaatagagtaggcttttgactggccttctgtggaagggatcttcttgactgtagagaagacgtggacataggtaatgatgatgacaataaaacagcagaaatccaaaactacattaataaggatgagtgcaatttctcttattaaattttctgagcaagaaatagctaataactggggaatgtcacagaagaactgatggaccatgttggacccacagtaggataaggagaaggtgccagctgtgtgcatcacagcaatcagacccccatacagccaagacacagtggctctttggacacaggtgctcctgtccatgatgacatcatagtgcagagggtgacatatagcagtatagcggtcaaaggacatcaccgtgaggaggagcagctctgcagatgctgaagaaagcaacaaaaagacctgggaaacacagccaaggaatgaaatggagttgttgtgtatcaaagaattggcgatagatttgggagccgtgactgaaataaggcagagatccaagaaagatagattcttcaagaagaaatacacgggggtgtggagatgatggtccaaagttgtgatcatgataatgaggacattccccatcagggcacacaaataaatcaacaagaagagaatcgaatgcaaaatgcacatatttttattggtagaaaaccccataaggataaattcagtcacgattgtgagatttgccattattgcaggagtaatctgcaggaaaaggagaagactgaagtaaaatatcaatgtccactctttaaatattaaatatatataacacatatattatttagcatactgaaacacacacacgtaccacacgtatggtaattccatgccaatttgccacaaaaaatactttcatctagttcttttttagtgcattgatcaccaagcatttcctgattaatttcatgttattgaggcaatttagttcacataaatgcagttataatattatccaaatatatcttatgaaatatactgaaagattaaaaattttctacggatgttatcaaaacttaaaaacaaagttttcctgcccatctctcttgaaaactcaaaccaacaaaccaatggctactacattgtaccatagtcttgctcttcctacatcttgtcccatgactaacaggacctcagtttcaacacaccttccaagaatttgaacaattaacaattctaaaaacaaaacttaactattacagacctccctcaagctattctacaaagtctttaacctacttactctctaaaaaactttgtttgcaggtattctcacatttgaaattttaataagagattgaactaatggtgcttttttaacaccataatttgcaatcttgtgcctatagtttcataggacacacacatggttactgtaggcaacagatcctataatatatgagctggccgggtgcggtggctcacgcctgtaatcccagcactttgagaggcccaggcaggtggatcgcctgacgtcaggagttcaagaccagccaggacaacatggcgagaccccatctctgctaaaaatacaaaaaattagctgggtgtggtggcgggcacctataatccctgctacttgggaggctgaggcagggtgaatcacttgaacctgggaggcggaggctgcagtgagccgagatcacactattgaactcctgcctgggcaacagagcgaggctctgtctcaaaacaaacaaataaataaatattttgttagccttatattaactgaattactcacttttcttttttaatcccccatctgccactttgacttttttctcatatttaataagttaaactatgttttctctttcaagcttttttctctttcatcatagccaagttgtacaacgacaatgcgtgaccttgcatatcacaatcttaatgtttttatgtccactgctttctctgttcccctctatcccttccaaaaaagtattgcaaattatggggcaggggagaaggatcgccacataatttgaacaaaattcagatggtcttactctgatggaaaactgtggttattcattcgtattgcagtgacatgtgggggctttctaattctacagattgtatacattgaccttaatgtaaatttagtaaaatattaaaactgtacttgacaattttcctcctgcactctcttctttggttctttcttttaaatattgtgcctgttctctctcaggagtgatagataaagaaaaatcacagtgtaaatgttgtttgctgaatttaggagagaagtgatataaactaattttaatctgttagaaaaaaaacccagacatttgaatgaacagttaaaaataaatgttaggatttattccagaaaaagaagtaaaaatattttgagtggtttttaaaaaatcattttaatgatgttcgatttgattaatctctgtggctgttcttgttaaaatattgtgacttcatcttacagcatcactaatagtccccgagtggttgagtaaaaaagcatatgattactaagacagatgtccatacgtgtctctttcttctagtatgagggaaacaaaatggtaagggaaaattgactcaaagacagtggtattgatgattctgtctgactgagctttcttcataatcgtttagaagctggaaagtatagcatgcctttttaagaagtacttcacattttttttttaagattagtcttaagtt

SEQ ID NO: 1479 - DNA, 4001 bp, Homo sapiens
gcttaggctttgaggtgggtgctcccatcaccttttccaactggcatttttttggtcaacgcttaaaatcatgtttcagtgtgactggcttcttatcttgcattttatttttcaaggatatacagtacagagagccctgcttacgatctgaatttgaaagatactataaactagaagtaaacctttgttatattatcctactaagaatttgggattactgattattgcaatataagctaccagataacggctgttactattggccatcaaaataaatctttcagatacatgacaccatcacaaaacaagacaatactattaactcctcaaaggccttaatggatgtatggagaagaagttgataataaattggaatatagggtgtgagccacttaaaacagataataaaataaatgtatccccaaagcacttgaatgcatttttagtaaaatcgtgggctgataagtatgatgtatctagagcttttctttaacataaaagggaagctatgtaaagtgttactaatcccctcatctatgacctgacaaatccactcatcttttcacagtatgcatttcactcatattcttatggtcctccaaaaacatacatttctcatatttaactttgaatgaatgcacaactgaatgttttcatttcttctataatactaaatatggcttttgaaaattaattgacaccatttttattttggacttaccaaaagttgaagagtggatgaatatagaacagaactttaacacaaaatacttttaaagataatattttaggctttatgattttttttagtgagtcattaacttgaaaacatgtactattagaattgtcttcttcataacaccagatttttttacccaatggcatattaaaattattcaaaaacttttgaaaggaaatatcgattttgatacatgatgcattttagtagccttatttattaaatttacaccaattttatctaataaccacaatcaattattacaacttattcctgaaaacatgaatatcacaaaacagcctagggtgagcctctcgggtttcttacacattttctgaataaaaaattctcttcatgattttcttgatggccacctttatttgcttatttctaagactgtaaataatagggttaaagaggggaggcattatggaataaaaaccagaaaggatcagatcctgggtggctgcaggtatcgcaggtggcctgaggtacacagaagagcatgaactgaggaagactgacaccaccaggatgtgagggatgcaggtggaaaaggcctttgttctgtctgctcctcttggaaacccgagcacggtcgaaaagatgtgaatgtaagacctgatgataaagatgaaacagccgccacctacccccagagcagagacaacaatcatgacctcattgctgaaggtgtcagagcaagagagcttcagcagagaggggatgtcacagaagaattgatgaataacgttggaccgacagaagggcagctggaatgtgctgccagtgtgcatgcctgcatagacaagaccactgagtagggaggccagtgtcatctggatgcagattcgagagttcacgatcacagggtagtgaagtggctggcagacagccacatagcggtcatgagccataatggtgagaaacagaagctccacatatacaaaaaaaaccacgaggaagacctgagctacacatcccgccttagaaatggtggtgctgtccagtagggaattgacacatgaggtagggactgtaacagaaatgtagcaggcatccaagatagacagattcctgaggaagaagtacatgggcatgtgaaggctgctgtcacaggtggtgacggtcacaatgaggatgtttcccattagagttaccaaatacaacataaagaaggatgcagaatgtaaaatctgtagtgtccacacatcagaaaacctcatgaggagaaattccatcacggtggttgaattgggcatcggtggatgatgaagcttggacctgggaaacagaaatcctgaacactcacgaagaatcaaatgatggaaagatggttcttaaatatcgtagtcttgatccctttctagttgtaatctacattgttggtccttacatttttgaaggcaactcaagtggtcctctatgaacctacataatattctttatattcaaattgggcagatgctttgttgttgtttctgttgtttagaagttgttcaaaattaaattttatgcaacttagtgtcctccatgggtcagataaagttatttacttatatttgatattaaataaatattttaataagttatttcactcaaatatacttatcgctaattatttatcaatacagattctgatacagagaacaaaactgttcacccacatcatgaagatattgtctttatatgcttaagaattgaatgaacaaatgtatgttctggatagtttcttgaggttctttagatagaggggaaatacacaataatttgtagtgattaaaatcctagctttgatttttagttagctacttcaaaatactggtctccatcatagtgtgaaatgggcattttagttacaggcttagtctccattcctttatagaactctaaaaaatgttctttctgtcatagtgcttcatcaggatgagataagatttataaaatccttaggaaattgtctaggacatcatgaatgttccttaactgtctcttgttattattttcagaaacatcgatattgttattggtatgtaggaatattttgagggcacatactactaccagacatgttctagataaaattcacatatcaatttaagactctcaataatcctgaaagttagtattttattcccttttcacaggaagcaaaaacctgtccagattgaacagctactctttcaccacagtcatccacctcgtgtgcttattctgtaccagttgcattcagcagataacttggagactgtgcccagttgaatgactctgtcagttttcaaataacaggatcaggaaaaataactagtggctactaggattaatacctgggtgatgaaataatctgtacaacaaacacccgtgacacaagtttacctatataacaaacctgcacatgtacctctgcacttaaaataaaggctaatttttaaaaaaagggggaaaaaagaatggcttcatattttcatgatgatgagctaatgataatttttccttatacttttatgttgatgatccaattagaattttaccatctataagtttcatgtattattgtattaggtaaatacagtatgtgtccaaaatatttttaagcaggacaaattatcacatggaaggttcagcagaaccttcactgtagaagagggagacaggaggcttgggctgtatcactcccacttaccagccatgtaaagttggcaacattcttcacccaaggaaaattccctccatctgtaaaagcagaatcatggtgtgtactactgtgatcaatttaaacaatatgggctcattcagtgacgtagtccttgattcactgattgttcaatcaatatatacacctaatgctgctatcacaggagttttgtgaataaatgaaacagaataagtgcctaaatctcatgaaatttaaattttattagaaaagactgacactgaactgttaaacatgtgagaaagaataaaatattccagaaagttttaagtgctttgacaaaaactcacaaggtaatatgctggatgagaaagggtgtgtgtggctgagggaagaacgggagttgattagttaagtggaagtgcttggaagccagcaaactgctatgaaaatataacacatattgtcactctcattccaaactaaggttttctgtttgctttatgtaaagagaagcacactgtgtatctgttgagttgatttaataaattatactaaacttggtatttccaaaccaaataataatttgcacttttgctactctgactt

SEQ ID NO: 1480 - DNA, 4001 bp, Homo sapiens
tttgcaatctctctggaaagtaaaagtgagatttgggatgtaaagtccagtgcctaatggagaggtcagcctcacacacaactgcgatgggctaatgacagttcacacatcaagactcttatcctgaaccaactaagaatatcagtgtttccacgaatcctcttcccatcccatcaagtgaaaatcaggaatagccagtgtacatttcacgagcccagtcacctgagaatggcagacagcccatgtgccaagggactcacgctcaggtgttctgacaaaataatgacaatggcgatgatgataatcaccagcagtgaccaagaactcagacccaggaaagagctctgtatgtattaacacattgaatattaacacaggtgtagaaactgaggcactaaaacccaggaaagagatccgtttctatcaacacattgaatactaacacaaatgcagaaactgaggcactcagtgacaatctcagtagatgcattgatggaaattgtgttaatttcctgacagatttctaaaaataactaagtgaaagagaaatatccttaaaatatttggcaaaatctaaaacatacgttcctgttctaataacccttctgcttgttttatgttcttttttgttgactggctaaatcaggtactaaaactgtgtgcgtgtgtgtgtgtgtgtgtgtgtgtgtgtatgtgtgtgtcctcttccaaaaaattcatactaacaggagtgcaaggctacaggttcaagatgaggtaattaaagcagttcgaacatgtgtggaatgggaaggaataaatcaccacaacaagctgcagttacacaaccttgaaatattttatgaaggtacttttatacttttatacttttagtttttgaagaaacatttgcatttctatctacatatagtagtgcaaatattgtctttctcccattcaacaggttttttttttcaggatttttcatcatttcatcaacaattttttcatctttttttgtcataaagtatttatgcttttttggggttttgttgcagatcttctatagtaaagaccaggatgttctacttttgcagaaaatatatcttcacaaagagtctccacatggctgttttaatctccttattcctaagactatatatgatgggattgaggaagggaggcaaaactgtgtatgtcagagcaatcactaaatcctgaatggacagagcttttgcaattggtcctaaggcagcaaagagccctgtggtaagaaagagcatgatgacaatgagctggggggagcaggtggagaaggcttttgctcgactctgtcctgaagggattctgagcaccgttgagaagatttggaaataggagatcatcatgagaataaagcatcccagaaccaagcatgagctcagggccagggtcaaaaactctacaaagaaaacctcacaggaaaccagggccaacacatgagggatgtcacggaagaactggtggatcacactggatctgcaaacgtgctcccgaaacatgttgccagtgtggacggctgcgtaggaaaagcagcttagccaggtggtgactgccatctgatagcaccctcctgatgtcatcacggctctgtattggagggggtggcaaatggcaacatagcggtcataagacatgacagtaaggaaggccagctcagcagatgcaaaggcagagaaaaaatagacttgagccacacagccaagataagagatggagcttctgcgagtcagggagttacggatggatttaggcacagtgactgagatgtagcacagatccaaaacggagaggttcttcaggaagaagtacatgggtgtgtgaagatgctgatcgagagtgatgactgcaatgatgagcaggttccccaccagcactgccagataaatcagcagaaacagcccggcgtgcagcacctgcagctcccagataccagaaaactccatcagcaggaattctgtcacttttgtgagattgtccatttggcagggaaatctgtgatctgattgttgagaaaaaatatacaatagttttaaatgagacaaaaagtgaacacagtgtggtaggagtaatatcctcctaaattaaattcaatccactggacatcttccacactgcttaaacaaataaaatggtgggagatttttaacatggaaagatcataaaaaatatatgcctaagactatgagttgagtaaccaatttctaaaagcttttgattagtactgtttttctattatatggaacttctcaatcttgaaattaagatttttctcatcaaataatctagggtgcttattaaatatgcagaatttcaagtctcaaggcaaatatactaaataaaaatttgtgggataaaaccaataatttgcttttcatacaagtttctgggtgattttttagtacaaaagtttgtagttttaactgtggttatacatcctgggcagagtcaactgtctttagctatttgttgaataaattgggtggtaagccactttaaaatgaggatttactgtttaagacatggaatgagtatggaatatgattttaaaaccattgataattagctctggtttggagagagggaaatttattttgtgtcaatgtgcaagacatgacaatagttatactaacaatgccattacccatgtgttgcaccttctctgtgcccgatgctattatctctacaggacacaccttggctcaattaatattcataattgtacaataaattaaaatatgccgttattattctttttctcaagataaaacggaggcataacaagatcaaataagttgcccaatgcactgaaagagccagcacctgagccagcatttaaatcaaggcagttcatttccaggatgtgttgctgacctctgcattctaagtttttttcatagaaaataactttgactaacataagctcacaaaaataacttttttctatatattgtttatcatattttgtttattttcactggtattatctatatgtttaaaattagtttttctgcatcaaagtcatgtgtgttagatcctgttcacatgactcaaatattctcactaaaaacaacttattaatttttttcaaactagagccaactttaaacaagtgattttaaaatcaggttactgatcatctaaggtttagttgccttatttcattaatgataaactctattaagcacataaatgctatcccttgctaccaggcaaatgtgaaatgttatttataagacaggtagaacctatgttttatgacaaattttaaagataatgtgaaatgttattttttataggacaggtagaacctatgtttaatgaaaaaatttgaagataatcttttgtccaaatgctataaatgatacagtcactttgaagcatttcattgtatcattaaaacaagtaattgaaaagaattgcactcttggcaaagcgcggtggcgaactcctgtaatcccagcactttcggaggttgaggtaggtggatcacctgaggtgaggagttcgagaccagcctgaccaacatgctgaaatcccgtctctactgaaaatacaaaatagctgagcgtggtggcacatgcctgtaatcccagctactcaggaggttggagcaggagactcgcttgaacctgggaggtggaggtggcagtgagccaagatcgtgccactgcactccagcctgggcaataagggcataactccatctcaaaaaggaaaaacaaaaagaattgtactgtcacacaaagtcaagtgacgagcaatacatatttacaatgaaaatgacaaaggagcactatccctgataaacgacaaactataaaaacacattagcataaacaatgagcaaagtatatgaacaagggctcagaaaactggaaagctaatgacccaataacaattcaaaatgtgttcaactttactagttatggaaatgcaaattaaaactttaacatgatgctattttgtgtccattgctttag

SEQ ID NO: 1481 - DNA, 4001 bp, Homo sapiens
ggtgcacgtgtgtgtttataaggttttaaatattatacatgtgttcgttcaagaaattacagaggtctgtgagcagacattttaattctagaaaaggacaagcagaaatgatcttagttcattctcagatgtaaaattgtagaaaggaaccggaataggttgaataaacaattagattggattggatggttaatatcttaaatggagtctatttaattgaatgacctcaaatataattatttttgcatacagtatgttaattttttgttaggaaagcaagataaaataaaacccaagggattgggcatgaggctttgttttgaaagaagttaatgtattccccatatgaaaaatgcagctgagaacctgatctcttctctaaagatattgtatacccaaagcactcctagttgttgggggagatcagttagcctctgccctataaagatggctgggagattctgagttcctccatgcctgagatcagttagggacacacatgacaaggacatgtgtcaatagaataaaatcattgactgtatttgaagtgagaggggattggaggaaagcatacatactttaaaacttgaataaattattttagtgatttttaagaagactcactatttaaaatgtgttctaccacattgtcgaattaacattagaatttatgcccctttaattctaaatctgaactcacagacaagaagtttaggaaaatttatcttaatatgtagcatttgggaactatatcacagagattctcatcactaaggtatatttgtactggagtcagaaactatttatcagctatgggttgtatgcagactatttaacttccctaagattcactttctgtataaagaatgctatatggtttttatatatttactcagaggatttaatgtgataattcatataaagtgcttaacacgatttccagcataagggagacatttaatagcagttggtttctcttctcactgttattgtgagcatctagtcacactttcttatcaccacattagtattatttaattcagtcactgaggtcattattgctgctgaaagactgtgcacttgagaagcattttctgaagtcccctcttcatatccctgttccttagggtatagatgaaaggattcagcatcggagccaccattgaatacatgatggttgacagagtgtcgctctcaggcatatggggggatgaagggctgaaatagacggcgatggctgtgccgtaaaacaacaccaccactgacaggtggcagctgcaggtggaaacagctctctgcttgccctgagtagaggtgatcttcagaacagtggagaagataagtccataagatacgaggatacagacaaggggcgtgagagccaatagacctcctactgcaaaaatgatcattacattgaaggagacgtcagagcaagagagctgcaggagaggattgagatcacagaagaaatgatggatgatattggaggcacagaaggacagctgtgctattaggacagtatgcaggagggcgtggaggtaagtaacaagccacagtccagccactagctggacacaaaggcacaggttcattctggcggtgtaatgtaaggggtggcaaatcgccacatatctatcatacgccatcacacacagaaggaggctgtccatattcacaaaagaaacgaagaagaagagctgggtgaggcagcctgcaaaagagatagtcttggtgccagtcaagatattcactaccatttgggggactgtagtcgacgtaaagcagatgtcaacaaaggccaagttactaaggaagaagtacataggggaatggaggtgagagtcaaagccaatcgtcgcaatgatgagcatgttccccaaggtggtggctaaatacatacagagaaagagcacagacaggaggtgctgctgctctgctgagctaggaagtcccagaaggacgaattccctgacaactgttagatttcttttttccatattcccaacaaatctagaaaaataagttattaaattgtaaaagccagcagtgttaagtctcttattcatgagagagagacagtgtgtgtgtgtgtgtgtgtgtgtgtgtgtgcatgcgtgcgcaggtaagtagcatccaaacttgcttgcttgaatgctttccaatgacatcttgtgttcatgatattctgtcttcatagtcacatagacatgctggacatgtcagtatcaacttctttcaagactgacttcttcccccaaaagaaaatgcaaattatgtgaataataaccattttaattgggttattttgccttgcctacagtaaccacaaaattcatatcgactttatatataaggttatttgttatttttttagtagtcaagctatttatgcttacccagtagaaatatttacctctaataaataattttcctcccaatctgatgcttatacttatgatggaagatatcctcatgttagctttcttttcttttaacgtatttggtcactgataactgcaagctcacctctgttccttgggttgaccattgctgttttggtctctgctcatcatttggtggagcctctgacttgtgtagtaagtcattgagagcccagtgtttgtggcctgtgctttcaggacccttccttgtagcatcttggtcatactaccttctctagaaggtgccagtattctcccatacctatcaacatttttcatagagtgtcttacttcttgacgtccctcactgtactctccaacttctcacttctgtatcaatccaatttataccttctttttaattataaaaattatcaaattatacaaagtgttgtataacaataagcaagcaaacatacatcattcatgtaatccgtactttccttcagcaaacatttattgagcaatttctatgatccaggtgctgtgcacaatttaggaccaaagtttttttctgactgaagcaaaatttgtgataccttcccaaacgttctccttgacatctgaggcctttctagtcttttcaaacctatattatttcagttatgttatttaagccatatggctatcaagtaaaggacatgttgtagaagtgggaagagatttggaatttttagtccaagtatcattattttctcacaatattccaagagttatctaggacttctattttattgatttgtatgacaaggatcctaatgaaaataacataatgtagcactagataatatacatgttctggttttatgctaagacagctgattaaccctagagaacacaatgcagtgtatttgtttctattacaatgttttgaattccaacttaatcagaaacctcactaacactaattattacattcatcttcctctgattcctgtcaactttaattaagttccatgcacccccttttacccaacttgaagcatgtcaggataaaatctgtacggaaaagaaactatgcatgtatttgcatgcctttgagggagaagcactctttcaaagacagtctccttcccctgtaggcactatcagttacatcatttttattaatctcatactcactatacaatattcctttcatgacaagcataacaattcccctttttcttggtctacttcattgtagttagtgaaattttaaggaaagaattgcgatttattatattgaatccttaggatataacacatatatgcacgtagtttgcacagagttggtgcaaaagagtgcttatggaaacaacaaatgaatgaaaaattctggagaaatcatttgattatataatgaatatatgagttttgcaagatatcttttaattctatattctcatttgcagcacatcatcttaatttcaaaattttctcaactaggatttggaaaaagttagtccaccattgaaatgcttaacagcttcgtcaaaaaacttccatgcattacaactcaaaggattatacattaggtatgtcttcactaaaacaaagaaaaaaatgtatgaatac

SEQ ID NO: 1482 - DNA, 4001 bp, Homo sapiens
cgcttgaacccgaggggcagaggttgcagtgagccaagctcaagccactgcactccagcctgggcgagagaacaagactctatctcaaaaaaacaaaaaaacaaacaaacaaacaaaaaaagaaagaaagaaagaaatgaatggatgatgtgcattgtgtcttaagagaatattttctgaaaatagaggcagagggaaaagcagttgtgtaatcccccttaaaggaacttgtcagaagtgcctgggtggccccgggtgtgcacctcgtgtgtgtgtgtgtgtgtgtggtgtgtggtgtgtttgcatgcacaaaaggtgttacggtgcagaaggaaaagagtcacatcaatagatactcctgtctttgtttcaccctactctcttttctactgccacctgtcatgattttcccttcagatgctgtaagctttgactcttctcttcctcaagataagaaaacagcaatttctttcctgttaatacattattcaatattaataaatttcaatcactggattttcttaaagaaacattattaatcaagcatgaaaaccacgaaaggaaaacaggaacagaaattaagtttgccgatcagcagagatttctgtcagctttcatttttgtttactctcacatgaccagtgtctgtaacagtgtcacacacaaattaaagcattaaaacacctgagtgaaagaaggaataaatgaattatgcatttttctctctgttaactttggttgttatatagattatcttgaggttaaatgtttaagtagattttatttttatggttcacatttcagagtattcaagagggcaagtaaaagcattaaaatgccaggggaacacagatttaagaagcctgaattctattgctttacaagttaaacaagattgataaacactgtttttgtgacttctatacagaaaacacatatttatatctttccagatagttttcaggaacagctttttatgttgttaatgctcaatcaatacagagatctgaagtcatattttctacagcatatccaatatcccaacagtctcctcactgcccccgtcacttccttatttctcaggctgtagataaatgggttcagtagaggtgtgacaatggtgtaaaatactgccaccgccttatcccgtgaaggggaacgcaaggagtgtggccttgtgtaggtaaagagagtggttgcatagaacaggcttgccacaatcaggtgggaggaacaagtggaaacagcttttgcctgtccttttcctgagctcatctggaataccacaataagcacacgagcataggaagccagaatggctaggaatggtagtagcaagataataagtccactcaggaggactgtatactcatactgggaggtgtcctgacacaccaatgatagtagagctggaacttcacagaaaaagtggttaatgagccgagacctacagaatggaagctgaaacacatacaatgtatgtatgaaagcattgatagaaccactggcccatgcacatgcaaccatgaggcagcagatcttcttgctcataagcataggataatgtaaagggtgacagatagctacatagcgatcataagacataaaaccaaggagaagggcttcagttccaccaagggccaagaacacatacgtttgaatctcacagcccaaaaatctaatggtcttactctgtgagaggaagctgactgccatcttgggcactgtggtggagatgtacatgaggtcaacgatggagagctgactgagcagaaagtacattggagtgtggagtctggtgttcagtcgaatgaggtggatcagcatgatatttcctgtcagagcaactgtaaagagggtggcaatgacgacaaagagaagagagtttatccagccatattggaaaagaccaacaagtagaaaatctgtcccaaaactttgatttcctgttttcatggctgaaaccaaaatatcaaaggagatgacatctgaaatgttcatgtaataatgttgacttcccttaagagaaagtaaaatgacatggcattcagaaataaatattcacttacatgtttggcaactatctacatgtttagagcacaaagtgctttctggtacaaaatggcaaacacattctcgcatactgttactgggatgcaaatttttataactttttggaagaattacctaatgtatagacagattatatatgcaaacatacatgagataacttaaattatatgtaagtatatgtacatatacatatataatacttaaatatacttacatatagtaatagaaatatatgtaaatgtatatttatatacacttaagtatatatgaattatatatactcatagttatatatcttttaaagacaagtatattttatatacacgtatctataaacatattactcatgtgtatttatgaatattatataaaaatatatgtaatttctatatatacttcaatatattatatattacatatatgctaatatataacatgcatgcttatgtatgtgtacagcaatacatatacacatatatacacatatgtgtgtaaacttataaaaaagataaaagtttaagaacacgtatcatagatgtgtagaagaaaattcatagcagcattactcaaaatagtcagaaactgaaaatgtcccaaagtagaatgaattaatgaactatgctatgttaatataaaatagagtattaaatattattctaaaaaccagagaaatgtaaagtaacaccaccatgcactatatataccagaattgtgaaactttaaaaataataaaagaaatacacagaaaaattgtgtggatgataaatttgatcattatgacttccaaagtcttccaatagagtgcaaatttcatactctttggaagtcatgtgttattttctagtaaatttggaatttacttgtgctataacgcagcagttcctgggtatataatcaattagagctttgcacaggaagaccagtagatttctatagccatctccattacagcatcagatgtgatagaatccaaataggtgcccatcaatcctgatatggctaaacacactgcagtaagatgacacaatgaaatattatatgtcaataaaaatgagagacaggaatgtgtcataaacacaaaactcactggaggccaaactcagtagaataagtggtttaaaattaatgtacactgtttacacatttctttagaacttataaataaagtatgaagagtattactacaagataagatagtaattacattcaggtggaaggaggactttttgtttggaaatgggaatgcaaagggcttctgagcgtgctgacattggtctatatcctgaactggcaagtggtcacacaggtgttcaatttatcataccttgtttccttgtggttatcttgcctatggctatgtgtgtgtatgtgttttaaattttaccataacaacattaataaaagtaagatgcagaatagtaattaataaaaataatatatggtcatatatgtgtctacctatggaatgatacacaatgaactggaaaccctttttgtactagagagaggacagaggacatatatgaggaatgcagattggaaagaaaatcagcctaaattctaaatgtttttctaattttatgcttatgttattgtcatatattaattacttataactatgccaaaattaactaaaacatagacataagaaaaaggcatatctcgattatactaaaaatctgaaatctggagtttcaacccaagcatgtatgtttttcaaaatgcccttgaatattcctgagataggaattcagccggacttgtttcaaaagatacaaggaacaaagactccactgataaaacaggatgtggtaaataagctgactgaaacctaccaaaaccatcatggcaatgaaagccacctctggtggtcctcactgctcattataattagaatacattaacataccaaaggaaactcccaccag

SEQ ID NO: 1483 - DNA, 4001 bp, Homo sapiens
acattttctttttcttttttttttgagatggagtcttgctctgtcgcccagtctggagtgcagaggcgcgatctcggctcactgcaacctccgcctcccgggttcaagcaattctctgcctcagcctcctgagtagctgggattacaggcgtgtgccaccatgcccagctaatttttgtatttttagtagagatggggtttcaccatcttggccaggctggtcttgaactcctgaccttgtgattcacccgcctcggcctcccaaagtgctgggattacaggcatgagccactgcgcccagatggttccatatttttccaattgcaaattgtgctgctataaacacgcatgagcaagtatctttttcgtataatgacttattttcctctgggtagatgccccgtagtgggattgctggatcaaatggtagatctactttttgttctttaaggatccacaatgttttccatcgtggttgtactagtgtttgtactagtttacatttcatggaaaaactttctatagaagaaaatgtgaactacagagaaaaaaaaatcaaaatcacaggaagaagatagcaatctacttcattcctggaattgtctgaaaaagtcgtgtaaaatttgtggagatttaagtatatggagaaaaacacttattcattgtaagtaaaataagattgtatttcagcttcatcttgtgtatacttaggagtaatagaaaagagacaaatggggagagaataaaagaaatataggaagaggaaaagagaaaagaatcaggaaattggaagtgaaataattccacacatacttattgaagtctatttaaacaatgcttaaaaatatatggcctcttagaattatacgtttaaaatgaactttgtcgctatgggatttggggcattataacaggaagtgagatgtttgaagacagggtttttgagctctctgggtattaactccttaagtgaaagatgctctgagtgcacaatagacttgtgctgtgttctttaattgatggagatgctacatctcatgtcctcatcatccacagagcctccagatcctggccagaagtctcctcagagcccccttcatatctttatttctcagggtgtaggtgaagggattgagagtgggggtgattatggaatagaagagagaaataaatttgccctgctcttgggagtagctggaagggggctgcagatacatgtaaatcgcaggtaggtagaagagggagacgatcatcaggtgggaggaacacgtcccaaaggccttgtgtcgtcccttggaggactggatcctgagcactgcccgggcaataaagccataggagagaaggatgagagccaggggcaccaacacgaagaaggccaccagcacagccagtatggtgtcattcacagcggtgtcagcacacgacagcttgatcacggccggcacctcacagaaaaagttgttcagcacctgccgcccgcagaatggcaattgcaccgtcaggaccacctgcacgaaggagttgccgaagccactgagccaggccagagccacgagctgctgacagagagcacggtgcatgagaacggcatagtgcaggggcttgcagatggccacgtagcggtccagggccatggcggccaggacgatgcactccgtgcatcccagccagtggaagactgcatattgcacagtgcagcctccatagctgatggtcttctgggaactgcccatgttgaccagcatctgagggactgtcgtggtggtgtagcagaggtccaggaaggacaggtgactgaggaagatgtacatggggctgtggagttgaggatccacccgggatgccaggatgatggcgacgttccccaacatggccagcacataggacagcaggaggaccacaaagagagggagttccagccacggcctgtcagacacacccagaaggatgaaggctttaggggagtcccctaagaagctatggttgtcacttttcatgttgcggcattttctggcacttgtggcaaattgagaaaattggaatgaataatacctgagaagaggaattgatcactttcctccctcttgcatccactcttcctttcccaggtgatagcctgtttgattctccttacctctgtggagacgctgggatgcggaagggtcagaaccaggagccccagtagcagcctctgtgtctttgctctccttcctactcagtggccgcaactaaaccatttaatattcctgaacttctgcatctgtaaaatggggagaaatacctccttcaattgccaagacttggggacgatagagacattaagtatgtgagaagaatacctcacgaatgacaattatgttccaggtagagcgaagcgtgctgcagctcccatcaccgtcagagtgtttgatttctctctacatccacatcgacaaggaattgtccaccttcttaggctttcccattttgggaggtagtggtaggagggaggcaggcggtgacataaagcaagcagaagggctttgtgagcagctgggggctgtattgataggaccaccccccgtcactggctcacgcttgcatccagctcccggattcatgctgatctccgctgtcatgaccacacacgcacaggcagccctgtcactcacactggcagtaaaagcagcacaattctaggtcctgtgagtctctggagtggaagagccaaggtatacgttacttcagcccctgaataggtcatggtagttaatgagaccccagaccatggaattttgagcacagggagaaagctcttgattggcgtgagaaaggtagcccctggaattgtctacggaaagatcagactgccctctagggctaggttttatctgatggcttgagtgacattccaatttcctgcacaatttctttgccgagcagctgtcacctctcagtgatagaaaacagccaatttgatttctgaaaccattgctgttaggaagcaactgggttgccacctgctgattcgtgggtcctttcgactgcaccattggcttctcacctcctacaatcgctcaagcattgcacaccttccagttcctgatggggatgttatgctccatgataggattgaaaaatattattaataaacaataattaattaatcattattcataataaatcctgtaagcagataatttatgaaggatttttattcttgatttggtaccttatgcatagactgtaaaactaacggagatctgctcagcttacatgttgcaacaggtgttccctgctgccccagttgatgttctgaagaactctactgttactggaaaacaactcaaactccagggtttcaatggaggaataagttcagtttttccctcctgcttctctagtttcaaaaccacacacgttttgtcagaaagttgccaatattcttgtgaaacattcaattatcgtatctcctcccagattctatcaacaatacttatgaaataaacttcacagaatgtgatcttatctctaacgagctcaagatgcctgtcaaaacagtgagctgtggccgagcaaagtcaagctagcacatttttaagtctaattattaagaagtaaaggaattatgacatttctctttctgagatttctgattccagagtttcttttcagagcctaaactgggagaaaagggagaagttgtagggatagtgaagaaagaaatgagagaatgaaggaagcaagaaagatagaggggtaaatgtatgcggcaatttataataaagacaagttatttaccactcactgtgagccaggtactgtaataataacttgatgttgccttaatatctcagcaaggtccatgttttcacccctaattgactgagcgactcgggaggacagctggtctaccttagttacacggcagcaaatggtaaagccaggactgaaagccaaactcctgctcttcactactattctctccagaactttgctttaaaaaaagagcagctggt

SEQ ID NO: 1484 - DNA, 4001 bp, Homo sapiens
ccgggcaatgtggccgtaagagaccaggatgagccccagaggcaggacaacaaagacaaagctggccaggtacatctccatctcattgaggctggtatccacacaagccagttgcataatgaggggcatctcgcaaaagaagtggtcgatgcaattgttcccacacagcggtaggagcatggtgagcgtggagcccaccatgctggtggtcagaccccccagccaggaggccaaagctagcccaaggcaaagctgtggatgcataatgacagtgtaatggagtggcctgcagatggcagcgtagcggtcataggacatggtggccagcaggacacactcggttgcccccagccaatgggagatatagaactggaccacacaccctccatagcttatggttttctgtggtccccagaggttagccaggagctgtgggacaatgctcgtggtgaagctcatgtccaggaaggggaggttggcaagaaagaagtacataggtgtgtggaggtgcacatctgtatgggagaccagaatgatgatgccattgcccaagatcgataccatgtaaaaactcaagacaactatgaagaggacagtttctagtgagggtcgtgtggagaagcccaggaggacaaagacttctggagaactcacattggctatttccatcattgtatgctgggggtggggcaaaaggccacctgtgggaagagcacagggcatacagggcatgagacatgaagcaattacatcagttagcaaacattaaaagtgtattttagttcattttatgttattcttttttagagacacaatttcactgtgttgcccgggctaacttcaaactcttgggatcaagcaatcctcccacctcaacttccttggtaggttgagaatacaggcacgtactaccatgtctggctaaaagtacattttatacccattgttttcaaaagtagccactcaacagctacgtggatggcattgcattaccttcctcacggccaacttggactgtataataaaagactgggtggggggtgttcactgtctggggaaaatggacattcatgcaaaatccttagcactgcttttttaaaatggaaatattatagtaacaacatctatatgcaacctaaatgtttagcaataaagggttagtcaggtagagggtggtcattcatgtgatgaaccactgtacaggcattaaaattgtgccctctcaaattccacaatcatctgcaagtttttgctgtcgttaactatatccagttttttatcccttctcaccacccctgctcctgccactctggcccatcttgccatcatttatcatctgaattttgatctaatactctaactcatctctctgcttctcctttgctccccttccaagtactctcaaaaaagtgttggggctcagaaaatgataccccaccatgaaggcttcagaagcaaaagtttctctttctcctgccttcttgtccgtggcccctcattcttccccgcagttagccatagaaattagaatccctcttccccaaggtgacacatagaaaccagagccccttttcctcaaagccagccataaaacctaaaaatgttactctaactttccctccacctttctgtgttaaaactagccataaataaattatctgacctaccttactggattgtagatcataagacctccattccagagaggtcttattgcataccaagaaaaaaggaacactgctcagagaggccaaaaagaatctcacgatgggtcttgctgggcttcttcactcagtccatcagtattagatcatgcccttcatgttcaatcatatttctacatggctgtccatatggctttgaacctaagcataaaaatgggaagtttctcttgtatctttggattctcatctgaaggctcctctgttatgtaaaactatgatcaaataaatgtgtatgtcttttctcctatgaatctgccatttgtcagttgatttctgtgaaatttcagaggacaaaggtgaaattttccctcactcctacgaaagcaatcacaggattacattaagacatatgatcacatcagtctgctgctcaacaccctcattgtcttggtacaaggcttgcagctgcagtttgctatacttacagtgctttctccccaagacatccacacacccccttcctcaccttcttcaggtcatttttgaaaagtcaccttctgactgaggccctccctgactgtgttatataatattgaaaaccctcacaactcccttctctctctttcctgaattatttttatataaggtgataatcttataacaaataaactactcttatttcttttgtttgctacccgtctcgctccactagatcataaattccatggagccatagttttatcttttgtttacctctgggtccccagtgtctaacccagtgtctgatacacagtagtcccttaatcaatattcatggacgtgcatcatgaaacaggttgctagaaaggttctgtggggtggaagaggcaggactagagtaatatgaaggcagagtggaaggactcagcataaactttcggtagtgttgtcaggagagagctcttggaactgccagagtcatgcagaagggtctggactatcctctgcttttgtacagttggaataaaacgagcacgatttagcaggggcagtgcataaagtcagaaactggacaatttcagtgtgcttccgatgtccctgaagacctttggggcccttctttgcaaaacattaattctagcctgtattttaaaaaggagaatcaatttattatagttaagattcacccagattaggggaacagagcagctgtgaacttaactatcagccttcttaaaatcccagagagtagaatttacctatccctgtaactggaagtcaattaaacaaaatagacatgaacagacatgtgcattcagttttaaaaatacaggtaggttttccattgtgcatgtatagaaatgaggctcagaaaactctaggcatttgttaaaattcacacgtggaagctgtcccattgtggacttactgtgtcagaatactgagacaatcatctggcctgcatatagtaggccagggaagcattaatactatgggagaaggcatcctggagaatacattccaacctcctccaaatcagggaggcaagccgggggcggtggctcatgcctgtattcctagcactttgggaggctgaagtggggggaatcacttgagctcaggagtttgagaccagcttgggcaacatagtgagagattgtctttacaaaaaaataaaataaaatgactgagtgtggctgtgtgtgcctgtagtctcagctacttgggaagctgaggctagaggatggcttcaacccacgagatcaaggctgtaatgaggcatgattgtgctactgcactccagcctgggcaacagagcaagaccctgtctcaaaacaacaacaaacaaaccaatcagggaggtagagttgagacctgtcaaaacgtggatgttttcatcatgtgaatgtgagagagaaaagatgaactgggattgggagagttaggtacaactgagtcatgacagtcaaagtgggtgtactgtatatagagtcaccgcaggtgagctgaaaaacaacaggttaaactgacaactgcattatgacccgtgggtgtaagtatatcccatctgtggaaagataaaaattttgttgactcacagttgataacatgcagaaaatgtgtaaatgatgctgagaggaaccacaaggtcactcatgaggtaatagtttagtagaatttttgaggaaaaagagatctttgtggtgatctgatctacttctagaaatgtttagtaacttatccaaagcccctgggctgcttagtcatactggagctatacccaagatactcagattcttagtacaaaaatagcgttttcagtaaaggaagaggtttgcttacccgcagagattcacc

SEQ ID NO: 1485 - DNA, 4001 bp, Homo sapiens
tgatgtaagtttgaacagaggacatagtttcctactacagagtatacaacccaatgcctgctataatgcagtgaaataggaagtataataccatgagttcacacaacgttttctagactcaaaatgcaaaaattccttatttccagaaaaagaatggtatgggccatttagagtgaagccatgggaaatgaagttcagtattttagtgcaaataatttaaacaatttggttaaggttttatctggaagatatatctcaaaattatgaaaatgtttcatatacagaaatgcagatataataacaatgtgttattatttgtgtatccatgtgagccatagaaaattttacagctgtgttttttctgtagactgagactccagtgttaggcagttcaaactatttcttgatgcaactacacaaccagagaactgggctttcatctactttccacatcacctttaaagtgtgccctttgtctttgtgttgtatttgcatgtctacacatctcttccacatgttaagaggatggcatatagggtgcaatttaaaaatttgcctcattacagcttgatcaacacgcatgcatctcagctacattcttggaagggaataagctatgtgtccatctacaggaaggctcagagattaatgcgttattagcaaccaaaaaaaaaagctggctgacataaacatttcttgaatatgttcatgcctatcttaatccagtaaagtatttatttaaaagtagtttcaaatgtactacacaaatgatatattctgcagcaaaggcactgaagcatagattgactaaaggactcaccttatactgctactgggtaatggccaagttgcgactttatagacatatgtttcatgtatgtatgtagacatatattccatagtattttacataatgcaaaatgtcgtacaaatatttaatcaaaagaaaatgtgagaagagcccataaaaaatcctcttattaaaagatgctactttttaccaaaaaaaaaattcatcacagtgtcacttaaatttttttttaataatcataaaatatttactcccagagcctttgctagaactttctttaatgcccctttcacctccttgatcctcaaggtataaataagagggttaagcatgcgggttaccacagtgtagaagagagaaacaaacttgccctggtccctggatctactcttggctggctgcagatacatgaagatgatggttccataaaagatggtgaccactgtcaggtgggagaagcaggtcccgaatgctttctgtctcctggtagctgacttaatcctcaacactgcgtgggcaatgtagccagaggagaccaggatgaatgagacaggcactataaggaaaaggatactagccacaaaaagctcagcctcgttaaacgtggtgcccacacaagccagcttgatgagcacagggacctcgcagatgaaatgatccacttggcgatgcccacagaagggcagctgcagggtgagggtggactgtaccagggtggtggctattccactgagccatgccatagatgccaaggccatgcagagatggatatgcattaagacagtgtaatggagaggacggcagacagccacatagcggtcacaggacatcacagccgggaggacgcactcagtggatcccagggcatgggagttgtaaaggtgaaccaaacagccaccataggcgatagttttcatgggttcccacaggtttaccaggagctggggaataacactgctggtgaagcagcggtacaggaaggagagatgagaaaggaagaaatacatcggcatatgaagcttgggttccagacgagaaaccagaatgatggtggtattccccaaaatagttagtaaatacagaatcaatatgagcacaaatagaaccttctgtaactgaggataatcagaaaaccctaaaaggatgaaacctgctaggttgctctcattggtatgtctcaccatccccatatgtaaagtgtgttccccaaggctgaggcatagctgagaaagataacacatcacatagggttaaatgagtgacaatgtcacctgcctacccaaaaaagtattgtatgttaaatgcttagaagctatgtctttacatccagtgacttagatctatttattttccgaatatgtgcattataaataaatgcaatacacatccttcaaatatcttagctgttcttcaatgctttccgaagcagagaagagcaagagcagacattaggaaacatcatcatcttttgcaggaaataaatttgacccttcctttaaaataaatttccccttttatattaatgtatttcaagttacagaaaaagggagtctcgagataccatctcacaccagttagaatggcgatcattgaaagtcaggaaacaacaggtgctggaaaggatgtggagaaataggaacacttttacactgttggtgggactgtaaactagttcaaccattgtggaagttggtgtggcgattcctcagggatctagaactagaaataccatctgacccagccatcccattacagggtatatacccaaaggattataaatcatgctgctataaagacacatgcacacgtatgtttattggggcactattcacaatagcaaagacttggaaccaacccaaatgtccaacaatgttagactggattaagaaaatgtggcacatagacaccatggaatactatgcagccataaaaaaggatgagttcatgtcctttgtagggacgtggatgaagctggaaatcatcattctcagcaaactatctcaaggacaaaaaaccaaacaccgcatattcccactcataggtgggaattgaacaatgagaacacatggacacaggaaggggaacatcacacaccggggactgttgtggggtggggggacgggggagggatagcattaggagatatacctaacgctaagtgacgagttaatgggtgcagcacaccaacatgacacatgtatacaaatgtaacgaacctgcacattgtgcacatgtaccctaaaacttaaagtataataataattaaaaaaagaaaaaggttttaataatcacaagacctatttgtgtacattggaaaggaatcaaaattttaaaaatgggtattaaatatgtcactccatcagttactaacagtgataaaaaaaaaaaaagaactaatgtgcagcctaaattacttctcaaatactggatccctaaaaggctaaaagaaaatagtttatgaagaaaagggcaaagaagaaagaacaacaatggcacttaaataataaaagaaatcccagcgacttgggaggccaaggtgggaggacagcttgaggccaggagtttgagaccagcccttgcaacatagcaagacactgactctccaaaaaaaatttaaaaattggctggtcatggtcccacgcacctgtagtcccagctactcaagagactgaggcagaagtgtcgcttcacaggagttcgaggttgcagtgagctatgatcatgccactgcatttcagcctgggcaacagagtaagaccctatctcttaaaaaaaagtaaattcaagtaacaaataaaggaataaatagtaaaataatgaaaataaagttaaagaattaagacaaatcatgtcagtataggcacacaatgattgctcatagatgattataaatatgagtgaaataaatacatcaatcacttaagggatgagtgctccaattaatagaaaaaggcatgtcataggctagggtaaaaaaaaactaaactcaaatttatacagcctgtttgaaacaaacaatacagtcaattaaagaaagaaaagaaaacatttttaaaaattaaattagaaaaattcaatataatttaattttgagataacaacaaaactgacaaaacaggacaattttattgattaaagattgaatctacaatgaacatatggatgtactaaaatgttatgtcccaagcag

SEQ ID NO: 1486 - DNA, 4001 bp, Homo sapiens
cctcccgagtagctgggactacaggcacctgccaccaagcccagctaatttttttttattttttttttagtagagacggggtttcaccgtgttagtcaggatggtctcgatctcctgacctcgtgatccgcccgcctcagcctcccaaagtgctgggattacaggtgtgagccaccgcgcctagcccatactcctcaaattttatacattaaatatgtatatcaattatacctcaatgaagctgtatttttaaaaaaagaaaataataatgtcttttgaagtccaattattctcattgattgaatgtatgaaaaggtatagaagaaaattatttgattattttattctttcaaaagtcttgtacctaccatgtataaagtgacctcagttctcacttctgcaactcatatactaacattgaaataatacagagaagatgagcatggctcctgcacaaggataaagtggcctcagaacacaaaaagagatgcacactctaagttatgaaaaataatgtgtttagcgtattttgttcttgttaccccttataaattcttaaaatgtatttggaacggttatttaaaaatagcttatgcaatatcctactgaccaataaatttgaactacgagcacatgcaggaattgcttattttcaacataaagctataatgaaggacattacgatgtaaatgtaaagtgtttggcaggaaactgaacattttattaaaactgaagaaaagtctcctaacctagataaatacatggtaaatacttaataatttatttttctgaatccctgggaataagtatcagacataaaatagaggctttgtggtgaggatcacaatttacaaccatccacagctctcttttcaatagtttatgctctcaaataaacatataaacattttacttagttacacataaaaaaggaaaaagtcccttatgaagagaaaataagtgagcagtaatatagttcatgtgaaatttagaactatgggtttgactaaatagaagctgaataagctacctggcttataatgaattccttgcaaatcatgtccataggaatcacaattttcccgagagaagtttcctcagagcctctttcatatccttgttccttaaagtatagatgataggatttaaagtgggggtcaccatggtgtagaagagggagataaacttcccttggtcctgggcatagctgtcactaggttgcaggtacacgtagattatggtgccatagaatataatcaccactgtaaggtgggaggagcaggtgctgaaggctttgtgccttgcctctactgatttgatcctcagcacagcttgagttatgaagccataggagatggagatgagtgctggtggaatgacaacaaacagaacactaacaacaaaaagcaccaattcattgacagtggtgtccacacaagccaacttgagaagagctggtacttcgcaaataaaatggtccagcctatggttgccacagagaggcaattgcaaggtaaaagttgcatggattagggaactagccaaaccactgagccaggagatagatgccagctgttggcaaagccgtgggttcatgatgactacatagtggaggggtttgcagacagcaatgtaccgatccaaggccatgtcagccaagaggatacattcagtggagcccagtgccagagaaatatagagttgcgccacacaaccaccgtaagtgatcgtcttctttggtctttgcaagttaactaaggtctgaggagcaaggctagtagtgaagcagatgtccagtaaagagaggttgctgagaaaaaagtacattggggtatgaagagggggatccagatatgagatgatgattatggtgaagtttcccacaagggtcaggaggtagaagaaaaggacaaatacaaagagaacagcctccagacgagggtggtctgagaagcctagaaggatgaaatccattagggaactctcattgcccaatcccatccctccagggggatccgcacctaaggcaggaatggaatgggtacatccaaaacaattaaatttagaataacagaacacatgagctgagaggatcatggagaccaactttcccaaactattcatttttcaccctaaactattcatttttcactaatgtgctgctgacttggaacatcaatccatgtttcttcattccagttcaaaggctcatctttaaaaattatgaatgattacaactttggagttgtctggggattgattattaaagccaatcaaagtgcatatttacatgcatatcaaaaaatccacaatgacctaccactaaaaataaatttctctcaaaatacggtgaacagtatctccctgattttcaactgtcaataaattatctgcatatgaaataccttactcagatttgattgtaagcacaatcagatggggaagactttttagataaaactaattaaaacaaagactttaaaacctttaaaatgggtatgattggtatgaaggagatagaaaatcatttttgatatgtgtcacattggtactaactggtggaaaatgaaaagacatatttaaggaaccaaaatatatgatataaattcaaatcatctcataaaagtttattcaatgattgaactgccaaaaaataaaaattagttttaaaattttttatttatttaggcattatttaaccaagttggctaatagtccttactagtgaagaaaaatacatatactcaaaggaatatatataattataagagttaaagatgcattgcagtattcttataaatataaaatttgtttgaaggaaccctgagataaatatattaaaactccctaacgttttggccagatgctgtggctcacccctttaatcccagcactttgacaggctgagtcacgtggatcacttgaggtcaggagttcgagaccagcctgaccaacttggtgaaaccccatctgtaataaaatacaaaaattagccaagtgtggtggtgtacacctgtagtcccagctactcaggaggccgagacaggagaattgcttgaacctgggaggtggacggttgcagtgagtcaagatcgcaccactgcactccagcctgggagacaaagtgagtgagattccatctcaaaaaataaaaataaaaataaataaaattccttaactttcaaaatgtcaaaaacacaaaacaaattataaacaaaaatgaaagtaatttatgagactgttgaagaaaactcaaagtcatctggagaatgtcggaagagaatgtgtgaatgattcacttgtctttgtaagaagattcaaaaagaaatattttgcaaattatgcatctgacaaaggactaatatccagaatctacaaggaactcaagcaaatcagcaagaaaaaacaaataatcctatcaaaaagtgggcaaatgacatgaatagacatttctcaaaagaagatatacaaatgaccaacaaacaaattttttaaatgtttaacatcactaataatcagggaaatgcaaattaaaaccacaatgagattctaccctaccccagccagaatggccactattataaagtcaaaaaacaatagatgttggcgtggatgtggtaaaaagggaatgcttatccactgctggtgggaatgtaaattagtataacctctatagaaaacagtatggagatttttcaaaaaaacaaaagtagatctaaaattcaatccagcaatcccactactgggtatctacccaaaggaaaagaagtcattatatcaaaaagacatgcacatgtgtatgtttatcgcagctcaattcacaattgcaaggatctgtaaccaacctaagtgcccataaaccgatgagaggataaagtaaatgggttatacatcatggaatactactaaaccatgaaaaaaatgaaataatgcctctcagcaacttggatggagctggaggtcactattctaagtgaagtaactcagaaatggcaaatatt

SEQ ID NO: 1487 - DNA, 4001 bp, Homo sapiens
tcaaatataagaatacatttattaaaatgcttctaaatatttcattttttttgctgttttggaaaccaaacatataactatgatcgttaacgtgagacagtgtgtgggattcatatttcaaatttttgaagtataaaattacataagtaactgttttccagagtttaaggccaaaaacaataacttattttatgaattttgtataaatgttaaaacacattttagtatatggcaattttactcaacttttaatcaatctccttaattcaagtttgcttatttgattcctttaataaaatattagtcattatttgcatcccacaattctgtggaaccaaagcatcacaactcttaatatttgtgtttctcgtgttgtaaataagccaatagagtgggatggttccattctccagttaaaagtgacatattctgggaaaatggtcatgtattttttcagtctgttatatacattgctttgcctagttagagatatatgtatacatatatctcaaatgtgaaatgtagaaatggtagtgtggatcaagtgctatggaaacatattatgaaacagttaattctgcacaaggatgagaaggatggtgtttcaggacagctagtgagtgcaggtgacatttcagctgagttttgaagcattagtagaagtctatcagatgggctggcacattagaaggaaataatggatacatgaaccttgatggcaggtggatgaaggacaaacatttttttccagatagaacacagggtcttggattgacaagaggaatgtctgggaggatgaaccctcatgctgctttggtgtgtttctcttctttagaattccaatgcttcctagtccctgtggctttgggattgacaagaggaatgtctggggaggatgaatcctcacgctgccttgaggtgtttcccttctttagaattccaatgcttcctagtccctgtggctttgggattgacaagaggaatgtctggggaggatgaaccctcactctgccttgaggtgtttcccttgtttagaattccaggtgtttcctagtccttgtggctttgtccagcagcactacccagtatcagggtcctcaaggcccctttcacatctttgtttctcagagtgtagataatggggtttaaaagtggggtgactatggtatagaaaagagaaacaaactttccctggtttttggatctcctattggccggttgaaggtacatgaatatgatggtcccatagaaaatgatgaccacaaccaggtgagacgaacaggtcccaaaggccttttggcggcccgcagctgattttatccttaacacagcttgagtgataaagccataggagactaagatgagtaacaccgggacaattagaaagactacactggccacaaagagttctgcctcgttgaaagtcgtatccacacaggccagtttgatgagcactggcacctcacagaaaatatgatccagtgtgcgatgaccacagaggggcagctgcacagtgagggagcactgaattagggaggtgatgaggccgctgagccatgctccaccggccagagacgcacagaacctggggtgcataatggctatgtagcgcagtggccggcagacagcagcatagcggtcataagccatgacggccaagagaatacactcagacgagcccaaccccatggccacatagagctgggccacacagccaccgtagctcatggttttgtctttcttattcatggtaaccagcaactgtggggcaacactggtggtaaagcagatgtccacacacgagaggttgctgaggaagaagtacattggagtgtggagtctggagtccagacaacatactagtatgagggcagtgttccccagaaggctcaagacgtagaagtacaaaatgatggcaaaaagaaacctctctagctgaggctgatctgaaaatcccaggagaagaaatcccttttcagagctgttgttggtttcctccatttttcctgcagcttcaggactcttcagcttcaaatactaagtgattaatatttggggatagaaagtaatgaggtcaagaatggtaatccacagtcgtttacagtataattatcttccttatatatcacctaaaacatgttgtgaagacctatagaactttcctcaacataaatccatgggcgggaaatgccacttccttctatttttattgaataaagttttactcaaacaacaaaagtattgtattaacatttgttttatttgatatttgtatttattcactctttgcttattcttgtactttgcccatttttacaccgatatatttatatgttcaaatgatgtatttatgcaggtaaagcaactgacccaatgtccttttgatgcaaatattttgttatatgtatacaaatatatatattttttgagatggagtcgttctgtcgcctggactagagtacagtgccgtgatctctgttcccttcaacctctgcttcctgggttcaagtaattctcttgcctcagcctcaagagtagctgagactacaggcgtgtgccaccactcccagctaattgttgtatttttttttttttttttttttttttagatggaatctcactctgtctcccagggtggagtgcagtggcacaatctctgctcactgcaaaccacctcccacgttcaagcaattctcctgccttagcctcccaagtagctgggattacaggcacaggccccatgcccgctaatttttgtgtgtatatatatatatttttatatatatatatatttttttttagtagagatgggggtttcaccatgttggccaggctggtctggaactcctgacctcaggtgacctaactacctcagcctcccaaagtgctgggattataggcgtgagccactgtgcctggcctaatttttgtaattttagtacaaatggtgtttcaccatgttggctagggtgctcttgaacaactgacctcaagtgatccacctgactcagcctcccaaagtgctggggttacaggcatgagtcactgtgcccgacctctatacaaatcttgactaatattcacaagctactatcaaagtgatattgtcaaatgccaagtcaaaataaaagggagaatttgtaaaatgaaatgtgtgtacatgttactctatatgtataagagttgtctaagtagaattacatcgaaagccaaagcaaacttttttttaaactataagttctagggtacatgtgcagaacgtgcacgttacataagtatacacatgccatggtggtttcctgcagccatcaaattgtcatctatgttaggtatttctcctaatgctatccctccttcctagccccccaacccaccaacaggccctggtgtgtgatgttcccctccctgtgtccatgtgttcttattgttcaactcccatttatgaatgagaacatgcgatgtttgcttttctgttcttgtgttagtttgctgaaaatgatggtttccaccttcatccatgtccctgcaaaggacatgaatgcatccttttctatggctgcatagtattccatggtgtatatgtgccacactttctttatccagtctatcattgatgggcatttaggttgattccaagtctttgctgttgtgaatagtgccacaataaacatgtgtccatgtgactttatagaatgatttataatcctttggatatatatgccacactgcccaaagtaagttatagattcaatgctatccccatcaagctagcttgaccttcttcacagaattagaaaaaactactttaaatttcatatggaaccaaaaaaaggccatatagccaagacaatcctaagcaaaaaggacaaagctggaggcatcacactacctgacttcgaactatactacaaggctacagtaaccaaaacagcatggtagtggtaccaaaacagatatatagaccaatggaacagaacagaggcctcggaaataacaccgca

SEQ ID NO: 1488 - DNA, 4001 bp, Homo sapiens
aagtttcaatttgtttacttactaagccaggtagcagtttattaagcagaatcgatttacttaggcactatagagactagtggctaatagcctcttaaactctctaagcgaatacaaaattttaccttattttgtctaattaatgtcttgcatcctttacttatagcataagaactcaatagaaaaagctgcgtttcttctcaaatgaattgccacaaaagtttaaaggacatatccagctaccagcgacctacaacggaatgttcaaaagactatgtgtatctccaccacaatacccaggtatctgaacacgcaccactacaaatgcatgtctttagattgtgataggctttacctttaagcctaattatttctatgtgcagtactttaggtatgtggttaatgtttaaaatatcttactttccacttccaatttcatccaagtatgctttacaatcccacactgattgaaccatgctctttacactctttattaagaaaaatatatgtgtgtgtgtcagtgtgtatgtgtgcatgtgtgtgtgggcatgtttatttacatgaagtcttctactaccctcaatgtaggcgtttctatgtttctatatccccaacaggaaaaaaatgttttttagccctatcacagattatttttgtattttaatctggaaatttgtaaatctatgaattctgacttctaaacttctatatcatcctcagatctgttcagcagaatgactttctcttgcttacaataatatcttgctattcggatttttactgtctctgatttcatgctgctcttgggtccacattaggtattattatgagttgtaaaagcaggctttaaaaaaatacagcacctgatgcatctaatattaacattagcacttccagtcaattttgaacgtctcttagcaatacatttttatatatcattatattagtaattttactcattctctactgaaataaaactccttagcacaccagggataggagactgttacaggactggaatcaagtaaaaaaactcaattgtcagggaaaaaatgttattaatatataataattgcttattttatgtctaaattatgaacattaaatagttgtattattagaagataatttcatagtttatttaaggtccttaatatatattgccacactgttctttttaaaatgtttgtaccatatttcatgtatgcctacaatatgttatgatgtccaattcaccaaaatatggttaacatttattactattgtttttaattttccaattgtgaaaggctaatcatttttcattaaagtttcatatatatcttcatattttgttaaatatttatttctatagtataaaacatttagttggcatgctataataaaattaacctgaacatttatttcattaaaatgtgtttttctagtttttgctatgaataacattacttaggggagaggcgctcaggggagtgggtcccagcggcagctgagcctgggagaggaggccccagagccagccccatccctgagctgctgatgggaggggaggagtcccctgaaccagccccgtagctgaggggttgatggaagaggaggccccagagccagccccatccctgagctgctgatgggaggggaggagtcccctgaaccagccccgtagctgaggggttgatggaagaggaggccccagagccagccccatccctgagctgctgatgggaggggaggagggctgacagtcgggagcaagaagggagactgcggtaaccgccccgtccccagggggcctctcgtctgatacctcggtctggaaggcgtgcccagctgcccttccgcaggagacaccagtgtgtagagcagagcccttcctttcgagagggtcttcacgctctcatcgtggtcggcggtcgcgggagaggggccctcctggacccgcaagcacgcccactactgccaaagacgccgcggctggtctcgcagcagcgcgtcctccggcagccccagcgagtgagcccggggctcgggtgcggaagatgataaagaggctccacctggtggccgcagcgggtcctgaaggagcgcgtcctccggcagccccagcgagtgagcccagggcgcaggtgcggaagatgataaacaggcgccacctggtggccgggtcggtgattggccccaagagcaataaagacaagtgggaacctgggccaaggcgcctgtggcaagggggtgagtgcttggaccctgccagaaggacgtctcgggttgccggagggtcatctgcaatgtgggcaagcaccgggaggcggcaccgccaaaactcaacgctctcgaaaaaaataaacgagaaggactaagagaaccagctgctgtgcgtcttggggtgtgactggttcaccctccgcggtccatgcatatcacctttgagctcctgggcaggaaaacccttgagttcccgaaggagaataacatccagccattcccctcccacatgtctggcacatggcccaccagctctgccacacccttagatttctgcacgagaaccggctgacccacgcacacctgaaaaccgagaacatcctgcatgtggattctgagttaaacaccgtctacagcgagcacaggagcgatgagaagtcagtgaggagcaccagcgtccgagtggctgacttccccaatgccacctctgaccgtgggcaccacatcgccatggtgaccacggtcactgtcgcctgcctgaactgatccttgatctgggctggacacgcccctgccatgtccagggcatgggctaccttctctttaagtactaccaggtttcacactcttccagacctgtgaaaaccaagagcgcctggtgatgttgaagaccctacggctcatcccattacgcgtgatctcctgtaccaagaagcagaaatatttctacaaatggggcctagtttgggatgagaacagctctgacagcccatatgtgaagaactgcaaacgtctgaagagtgacatgctccaagactctctggagcacgtgcagctgtttgacctgatgcggagggtggtaaaattggacgctgcccagcacatcactctggctgagactcttctgcaccccgtctttgctggcctggcaacctcagtcgtggtccttccacacaagccacaacccaagcagatgacagacgcaggacactgcatgaggagagcggaactgggctgcccaatccccattctccagcccctaccaccaggtcccaggaccagaaccacacaatgagcagtgcaatgtgaaggaaggcaggagcctgcgggggagcagacttggtgcccagctgccagaaggcagatttgactcaagctgttcatacgtgttttttgtttttgtttttgttttgttttttgtttgtttttttgagatggagtctagctctgtggcccaggctggagtgcggtggcgccatcttggctcactgcaagctccgcctcccgggttcccgccattctcctgcctcagcctcccgagtagctgggactacaggcgcccgccaccacgcccggctaatttttttgtatttttagtagagacggggtttcaccgtgttagtcaggatggtctcgatctgctgacctcgtgatccgcccacctaggcctccgaaagtgttgggattacaggcgtgatccaccgcgcctggcccatacattttaaacttacaaagtgtgtcttagtgtttgtaaaaaaaaaaaaaaaaaaaaggaaaaaaattaaatgaattctcaatagaaatatttattatcttctttgaaataactattaggataaattgctagaagagtttgtaaaacatcatcctgtatgtataaatgaaataaggcaatttttatgatattcctatctaatattgtatagttgcttctagcataggatgagtaattcaattttaacacaacttatatctgtatatatgtgtgtacatatatatgtgtgtgtgcatatata

SEQ ID NO: 1489 - DNA, 4001 bp, Homo sapiens
agctgatcccaatccaagctgaatagtcctattgatttatgagaagagtaagtggaaataaaattgtgcagaagagaatgtcttgcatgaaaatacccgtggcaactgaggaggcaaatcttgagtgtgttgtgacgtgactgggaaatgattcaaataacctactccacactccactaagtcaactatagtctaagagggtctatagactgtaacttctatagaacttcttatacagaaactcttgtttttctaaagccaaattggctgctccacaaacataattatttatcctcaggtaaacttattagtaaaacattactttaagaaaaagaagaagacatacataccagttgagagtaaataaaaactatttaatattcaattagattcagtaattttaactaatttgttatttttgtcttatttttataataatgggagataaacaactattatgtaattattatgctgaatgatatgattagtttggacctttattgttttgatttctacatgttaatgaaaccctgttgcccacaatttagtagaaaatatatgacctatatttgattaaaaaaaaaacaggcagggcatggtggctcacacctgtaatcgcagctaacttaggaggctaggcaggagaatcgcttgaacccaggaggcagaggttatggggagctgagattgcgccattgcattagagcctgggcaacaagagccaaaatccattaaaaagacaaacaaacaaacaaacaaaaaccacacacaaacaaaatcaaaatagatgtcttagaatatgtattaatatgtattataatattgtcaagactaaattaaaagacaaatttcttctagattaacttctgtttgacacactgggcatgtaataatgtttttcttcactgctgtacactactaagttgatatgaacctagcgctttgactctaacacagaacgtatgtctacattttcactgagaagattttctgaatcacttgtgtcagggcccccatcacctccttgtttctcaggctgtagatgatggggttgagcattggggtgaggatggtgtagaaaacagccagaatcttgtcctctgttggagatcgcagggatcttggacgtacataggtataagcaaagggtgcatagtagaaggacactacagtgaggtgggtgctacaggttgaataggccttcttcctcccttctgcagagtgcatgcggtagacagcaaggagaacccggccataggaacatgcaataccagtgaaaggaagcacaagaaagatggtgctgctcaaaaacactgtgctctcatagacccaagtgtctgtgcaggctagcgtcaacatagctggaacatcacagaaaaaatgattgatggctctggacttgcaatatgggatacagagtgcatatactgtgtgagcacaagagttgatagagcttatcatccaagatcctgttatcatcatcacacacactcttttgcttatacggatgggatagtggagaggaaagcaaatggccacataacgatcataggccattgatgtcaggagcagcccttctgcaactgctaaagtcaagaagaagaaactctgaatcccacatccagtgaaggagatagacttgtttccatacagaaaatcataaaccatctttggaacaatggtggagatgtaatttaggtcaatgagggagagctgactaagtaggaaatacataggtgtgtggagatggatgtccaaaaagatgagaagaatcatggatagatttccaattagagccattaggaaaatgagaaaaatgagggtgaatacgaaaaggccaattcttgattgtgggaacagccccaataagatgaaatcagttgatgtttgattgtaattttccatggggaattcctacaatccatcctgaagggagacaaaagggtaaattaagaacagtaattcacttttatccacagtggctgcattacaagactcccagtggatgcctgaaactggggttgatactgaaccctatataaactatttttatatccataaatgcatattataaactttaatttataaattaggcaaggaagagattaacaaaaataactacaaataaaatagaacaattacaactatatactgtaataaaacttatgtgaatgcaatctatatttttctttctttcaaaccatcatattgaaaaagtgctcatttttcttgtgatgacaaaatgcttcatgggaaatcaaaatgtctacatgatgacataaagtgaggagaacaaggtaggcactgtgatgtgacgttgggctatgactgaaaaccaattgaaaatttatgaagtgttcatttgtggacttttccatgcaatattttcagaccgcatttgattacaggagaaaccacggaaagcaaaacagtgaatgagaggggactacttatagaatagtaagccaattgtttttaaaaatccttagtttagtaaggctgtgaattatttatagaactttacaacacttaaatgatgaactcatttattctatttagaaaaaaattattttcttacacagagattaatatttgatgagacaaatatttataaccaaagtttttctaagaaatatatacatttataggaaaaatcatttgtcttacaacttcaaaaagatatgaatgtttgatgcccaacacaatctcagatgccattaagatcatgtgctatgcttaaaacatacgcatgggaaggtaaattaaatgcatatgctatggatccatattatgaataaattagcattactttttctggatgatttttctcactaaatttattctttaagacttacttgtagaactgcagcagcctatgattcatttggaggaacttatatttccttcttgaattgtctttgcataataatttgaagtcaaactttctctaagttagacatcattatttggttcttctacttaaaaatgtagaatgaattgttattttaagtacctttttcatgaaatgtaattcatagtcttgattttgaatgtccaccaccatcaaatgtccattctcttttgccttctcatccaatttctgaattctcaagttaatgcagactctctatctcaatatctatatgccaagttcattttagcttccatgtctctgctcaagctctccccgtatacgatgtatattctgtgtctttgcttccctcatgcttagattacatagactttagggatcctcccattcatatgaagggatcataagtatatttatcaattttttgttaagatccataaagtataatgtaatctaagcattagggaagcaaaaacaataaatcactttacatcttcaaaagacaggatttggagaaatgaccattcacttaaatggaaaaaaggaaacagcaacctgacagttttctgggtagaggtggttcgagtattcttctccagatagaagacatcactggacaactttgcacaggatacataaaaggaatgaagtttttaggcttgaaaattattttagagccaaaggtcagccgacctttgaggaagtgtaacaatatgaaagagtaagatctacacagtgtgcaaactcacatctatacacacacacacaaagatgaacactcacttaaggatcaatacacgtgtatgtacactgagttaaaactatcacaaacctgcaaaaagagtgagtttttaaaattaagaattcctattttcaggaatgaagatgtctatgatatgttataaaatccaccaaataaatatcattagctatatgcaaggatgtgaaatgtaacaataaatgactctttgaaattaaagatacaataattgataccgcattaaatgaaagtttcaaaatacgaaagtgaaaaatctatcagaaggaaaaaaaaactgaaaagattagaagagacaaaaatattagaaaattaatgcaacaggaccaacatatacttacaggcattccc

SEQ ID NO: 1490 - DNA, 4001 bp, Homo sapiens
attgtttactatagttactctattgtgctatcaaatactcttattcattctatctaattatatttttgcaactattagccatccccactttatcgtccctcccctgtacccttcccaccctctggtgaccatcagtctcttctctatttccactagttcagtttttaaaaattctagctctcgcataggagtgagaacaagcaaaacctttctgtgcaactgatttttgacaacagacccaagactgttcattgggaaaaagacagtgtcttcaatataaggtgctggcaaaactggatatttttaagcagaaaaatgaaaataaactcccagtcattacactatatccaaatcaactcaaaacaggttaaagacctaaatgtaatcatttttattactgctggcatgttccagtccttttgttgatctaaaatatacctaatgttaaatcatttcctgggattcattcccctataaagaacataatcttgtcataggccatccagagtggtatcaggacttaagaatccctgatgagctctctgctaaactgtgtaatgagttccctaaattgaaagaatgagtaattggtacgttaagtgtctaagataagaaagacaaaacatcttacagctttcaactagatacaccaagtcaagagacttattttttgttttgttttagacataaacaaaaaagtaaatttaaaattactggaaaataaactgaccataaggaaattgttatgctgagtgccaacttcagttagaccaatttcatttctatttctgcatgaccaaaaacaaaaattctcattgacaacatattagtaaaagtaggtgctttcaaaatttatggaaacaatgccatgaagaaaaaaggttgtttggagttatatatacatatatatgtaaaacaattttgtccagaaatcagtgatttttttctcttaccttgattacttttagctcctgaactctaggattgaaataatattttaattactatacactgctggatggatgtgtatctgagtcctgagaccttaggtagaaaatgtttctacattttcccagagcagattctctgactcactcgtgtcagggcccccatcacctccttgttcctcaggctatagatgatggggttgagcattggagtgagggtggtgtagaagacagccagaaccttgtcctctgttggagatcgcagggatcttggacgtagataagtgtagacaaaaggtgcatagtagaaagttactacagtgaggtgggtgctgcaggtcaggtaggctttcttcctcccttctgcagatttcatgtggtagacagcaaggagaacccggccataggaacatgaaatagcaatgaagggaaacacgagaaagatggtggtgctcaaaaacactgtgccctcatagacccaggtgtccatgcaggccagagtcaccattgctgggacatcacagaagaaatgattgatggccctggattggcaataaggaatatggagtacatatacagtgtgagcacaagcattgatcgagcctatgatccaagaccctgttatcatcagcacacacattcttttgctcatgcggatgggatagtgaagaggaaagcaaatagcaatgtaacgatcataggccatagatgccaaaagtagtgcttctgcacctcctaatgccgagaagaagaaactctgaatcccacacccagtgaaggagatagacttgttaccagacagaaaatcagatgccatcttaggaacaatggtggagatgtaatttaggtcaatgagggagagctgactaagtaggaaatacatgggtgtgtggagatgggtgtccaagaagatgagaagaatcatggataggtttccaattagagccattaggaaaatgaaaacaatgaggatgaagaggaaaaggccaattcttgatggtgggaagaatcctaataagatgaaatcagttgatgtttgattgtaattttccatggggcattcgtgtgctctttcctgaagggagacacaagggtaagttaagcacagaaattcgtctttatctgcagggaatgcatttgaagcccctcagtaaattcttgagactggagttgacactgagccctatatacactattattttctgtccacacatacttctgataaagtttaatttttaaataagacaagtaagagataaacaagagtaacttataataaaatagaatgaatatacagtatactataatacaaattatgtcaatatggtctctatctttctctctcaaaatgttttattgtactcagccttctttgatctgacttcttacctattttgaaagagaaatcttaatttttacctagagttttacatttgatgataccaacatttgttaccagatatttttctgagaaatatgtaaatttataagaaagatatctctattacaacttcaatagaataatgttttactgcctgacactaattcagatataatcaaaatcagatgttatattgaatacatatgcatagaaagtcagtataaatgcatacatttagatttatatttgaaaaattagtattatctttataggatgatctattatctttccatatttatactttttttttttttgagtgacagggtctctctctgttacccaggtgggagtgaagtggcaatatcatagctcactgcatccttgacattctggctcaagcaatccacctgcctcagcctcctgagtagctgagactacgaccacaagccaccatacctagttaactttctatttttgtagacatgaagtcttgctatgttgccaggctggttttgaactcttggcctcaccaatcctcctgtcttggccttgcaaatgctgggagtgcagtcatgagcttccccacccaacccatgtttattctgccagatttacttctaaaactgcagcagcctctctgctattttgagaaacttgaatgatgtttgcacaataatgccaattatcaattatttagtcagttatcattttgtggttcatttatttagaaatccagaaggaatccttattgctatgtccctttaaccaaagtcatgttaattcacgctcttgattttcaatattcatcatcatccattctcttttgcctccttgcctaatttcaaaattctctagttaaagcagatgccttaccaaataggttacacattttgtcttttccttctctagtgcttagataacattacagattgctttatggatccttcaaaagaatgaattttgaggaaaattcaatctcttaaataaaaagggaaactagaattctgacaaacttccgggtagaggtgcgttagaaactctactccagatagaagacatcagagaacaactttgcacagtatgcctaaaagaactggagttttttaggcttaaatattagtctagagccaaataccaccagaattttgagctactataaccacgtatacaactaacattcacacagcatgcaaacacacagaaatatgcataatcacacatgatcatactcataaatacactgagattataatgattaaaaatgcagaaagaatgaattgttgtgatcagaattcatatcttcagagatgtatgatatgttacgaaatctgtgaaataaatatcatttgctatctgaaaggatgcaacaggtaacataaaggacctttgaaaattaaaaatataataattgataaaaaatattaagtgaaagtttcaaaaggcaaagtaagaaaaatctattagaaggtaaacaaaagcaacaacaatatgaaaaaattgtaatttaggaaagataaaaaaagtagggaaatcatattggaggaacaatatgtgcttaaggactttcttagaaatgcatatagcaaaataataatgaagttaatattctttaaaaattttctctgaaatgaaatatattaaccatcatattcaaatggcatgcaaattcacaa

SEQ ID NO: 1491 - DNA, 4001 bp, Homo sapiens
ccagagtgaagattattctatttgagagcaacagaaagaactttagaaaaatagttatagaaaaatgttacattatggaaagttgtataatgcagggcttttctcttacttgttcattctaccttccttcttgcctcctctcctcagagactaaagcgtttctcaggaatgggctcttgtggagagccatggcctttcactcagagaatggacctaagctgacaacttttataaaaataatgttgatccttctaggcacaggcctaagcaggtataaaaatagtggagcagaggagttgatcccaatccaagatgtatagacttgctgattttgaagagtaagtagaaaaaaattgttcagaagagaacgtcttgcatgagaatacccgtggctactcaggagacaaacattgtgtgtgttgtgatgtgactggggaatggttcaaataacctactccacattcaactaagtctaagtcaactgtagtctaagaggttctatagaaggtaaattccatagaatcttttataaagaaattgttgttttactaaaggcaaattggcttcaccccagacatacttatttatcctgaggtaaatttattaataaatcattactttagcaaaaagaggaacacatacacaccagttgagagtaaataaaatattatttaatattcaattagattcagtaatcttaaataatttgttattttgtcttattttaataataatgggaaacaattaacatataactattatgctgaatgatatgattcctttggacatttattgttttgatttatacatgataatgaaattctatggccttacaatttagtgtaaaatatatgatctgtcttttgataaaaagaaacacaaacagaaacaaaatagatgtcttagaatatgcaactataatgtcaagactaaattaaaagacaaacattctggattaatctctgtttgacatactgggcatgtaataatgtttttcttcactgctgtacactgctgagttgatatgaacctagcgctttgactctaacacagaacgtatgtctacattttcaccgagaagatattctgaatcactcgtgtcagggcccccatcacctccttgtttctcaggctgtagatgatggggttgagcattggggtgaggatggtgtagaaaacagccagaaccttgtcctctgtcagagatcgcagggatcttggacatagataggtataagcaaagggtgcatagtagaaagttactacagtgaggtgggtgctgcaggtcgaataggcctttttcctcccttctgcagagtgcatgcggtagacagcaaggagaacccagccataggaacacgcaatgccagtgaagggaaacacaagaaagatggtgctgctcaaaaacactgtgtactcatagacccaggtgtctgtacaggctaatgtcaacatagctggaacatcacagaaaaaatgattgatggctctggacttgcaatatgggatacggaatgcatatactgtgtgagcacaagagttgatggagcctatcatccaagatcctgttatcatcagcacatacattcttttgctcatacggatgggatagtggagaggaaagcaaatggccacataacgatcataggccattgatgtcaggagcagcgcttctgcacctgcaaaagtcatgaagaagaaactctgaatcccacacccaatgaaggagatagacttgtttccatacagaaaatcagaagccatcttaggaacaatcgtagagatgtaatttaggtcaatgagggagagctgactaagcaggaaatacatgggtgtgtggagatgggtgtccaagaagatgagaagaatcatggataggtttccaattagagccattaggaaaatgagaacaaagagaatgaagaggaaaaggccaatttttgatggtgggaacagccccaataagatgaaatcagttgacgtttgattgtaattttccatggggcattcatacgatccttcctgaagggagacacaagggtaagtcaagtacagtagttccccattatctgcaggggttgcattccaaggcctccagtgaatgcctgaaattgcagttgacactgaaccctatatacactattttttatatccatcaatatgtattataaattttaatttataaattagacaaggaagaaattaacaaaaatagctgcaaataaaatagaacaattataactatatactctaataaaagttatgcaaatgcagtttctatctttttctttttctcaaaatacctcgttgtactgtactcatttttcttgtgatgacaaaatgcttcatgggaagacaaaatgtctacatgatgaaataaagtgaagggaacaatgtaggcactatgatgcaacattgggctatgactgaaatccaactgataatttatgaagtgttcatttgtggcattttccacccaatattttcagactgcagttgatcacaggagaaactatggaaagcaaaacagtggataagaggggactacttatagaatagtaagccaattgtttttaaaaatccttagtttagttagactgtgaattatttatacaactttataactcttagatgactaatctttccaaattagaaaaaaaatcgtattctctatccagagattaatatttgatgagacaaatatttataaccaaaattttttctaagaaatatatacatttataggaaaaatcatctgtcttacaacttcaaaaggataggaatgtttgatgcccaacacaaactcagatgtaatcaagatcatatgttatgcttaaaacaaatgcatggaaaagttaaatgcatatattatggatcttattaggaataaattagcattatgttttctggatgatttttttctacatttattgtgtaacacttacttctaaagctgcagcagcctgtgacttatttggaggaacttatatttccttcttgaattgtctttgcataataattccaagtcacatatgtatacatgtgccatgttggtcccatatatacatatgtgacttggaattattatgcaaagcatgttgtgcacatgtaccctaaaagttaaagtataataaaaaataaaataataataaaatgaaatgaaataaatgaaagttatataaaaaaataataattccaagtcaaactttctctaagtcagacatcattatttggttcttctatctaaaaatgtagaatgaattattattttaagtatccttttcacaaaatgtaactcacagtcttggtttttaatgtctgccaccattaaatgttcattctcttttgcctcctcattcagtttcacaattctccagttactgtggaccccagatatagatatctgaatatccatatgccaatttcattttagcttccatgtttctgctcaagctcttgccagcaggatgtgtattctgtgtctttgcttccctaatgcttagaatctctgcttggctgctgttggtgaatagaactgctgatttatgtaaattaattttgtgtcatgaaacttggctgaattccttttttagttctaggagttttctggaggagtctttagggttttctaggtaaacaatcatagcatcagcaaacagcgacagttttacttcctcattaccaatttggatgctctttatttctttctcttgtctgactgctctggctaggacttccagtactatgtggaagaggagtggtgagagtgggcatccttgtcttgttccagttccaaaagctatggtaatcaaaacagtatggcattggtataaagccagacatgtataccaatagaagaaaggagaggtcaggtgcgtttgttcacacctgtaatcccagcactctgggagcctgaggcaggcagactgcttgagctcagaacattgagaccaaccaaaatggaaaaatcctgtttctacaaaaaatacaaaaattagcca

SEQ ID NO: 1492 - DNA, 4001 bp, Homo sapiens
gctacagtcactctgttgtgctaccacatactggctcttattcgtgctatctatatttttacaaccattaaccgtccccactttatcccccctcccctatacccttccgatcctctggtgaccaccagtctattatctatttctattagctcaatttttaaaatttttaggtcctaggtaggagtgagaacatgcaaaatctgtctttctgtgcctgacatagttaaatgatatctgacaacaatgccaagaacatttattgggaaactgacagtctcttcaatataaggtgcttgtaaaactggatatccatatgcagaaaaatgaaactaaactcccaattcttacactataccaaaatcaacataaaatgggttaaagacctaagtgtaatcattcttgatcactgatggcatcttccaatacttgttgttgatctaaaatttacctgatgttaaatcatttccctgggattcattccactacagaaagcataaacttgtcacaggccatccagagtggtatcaggacttaagaaccactgatgagccttctgctaaatctcagtaataataagtccccctaaattgaaagaaagagtaactggtacgttaagtgtctaagataagaaacagaaaacatcttatggctttcaattagatccaccaagtcaagagatttttggttttgttttagacataaccaaaaaaaaattttaattactggaaaataaattgacaataataaaattgttatgctgagtgccaacttcagttaggccattttcattttcatttctgcatgaccaaaaaaaaaattcttattgacaacatattagcaaaaatatgtactttcaaaatttttggaaaaaggccatcaagaaaaaaggtttcttagaattatatatatatttgtaaaacaattttgtccatatatcagtgattttcttcttccgttggttagttttagtcctgcactctaggaaggacataatattttaattactatacactgctgaatggatgtgtatctgagtcctgagaccttaggcagaaagtgtttctacattttcacagagcagattctctgactcactcgtgtcagggcccccatcacctccttgttcctcaggctatagatgatggggttgagcattggggtgaggatggtgtagaagacagccagaaccttgtcctctgttggagatcgcagggatcttggacgtagataagtgtagacaaaaggtgcatagtagaaagttactacagtgaggtgggtgctgcaggtcaaataggctttcttcctcccttctgcagatttcatgtggtagacagcaaagagaacctggccataggaacatgaaataccaatgaagggaaacacgagaaagatggtggcactcaaaaacactgtgccctcatagacccaggtgtccatgcaggccagagtcaccattgctgggacatcacagaagaaatgattgatggccctggatcggcaataaggaatatggagtacatatacagtgtgagcacaagcattgatcgagcctatgatccaagaccctgttatcatcagcacacacactcttttgctcatgcggatgagatagtggagaggaaagcaaatagcaatgtaacgatcataggccatagatgccaaaagtagtgcttctgcacctcctaatgccaagaagaagaaactctgaatcccacacccagtgaaggagatagacttgtttccatgcagaaaatcagatgccatcttaggaacaatggtggagatgtaatttaggtcaatgagggagagctgactcagtaggaaatacatgggtgtgtggagatgggtgtccaagaagatgagaagaatcatggacaggtttccaattagagccatcaggaaaatgaaaacaatgagaatgaagaagaaaaggtcaattcttgatggtggaaacagccccaataagatgaaatcagttgatgtttgattgtaattttccatggagcattcctacaatccattcggaagggagacacaagagtaatttacgtacagtaattcgcccttatctgcaggggatgcattccaagcccccccagtggatgtttgaaactgcagttgatactgaaccctaaatacactattatttttgtctatacatacttctgataaagtttaattaataaattagacaagtaagagattaacaagagtaactgataataaaatagaacaattatacagtatactataaatatgtgaatatgatctctatctttctcaaaatcttttattgtactgtactcagacttctttgttctgatttttacctattttgaaaaaagaaatcttattttcttacccagagtttcacatttgatgagatcaacatttgttactagtttttttctgagaaatatgtaaatttataagaaagatacctctattacaacttcaatagaatatgaatggtttactgcctgacgcaaactcagatacattcaaagtcaaatattatactgaatacctatgcatagaaagtcactataaatgcatacattacagatttatatttgaataaattagtcttacctttatagaatgatctgttatatttccacacttattctttttctttttttttaagtgacagggtctctctctgttacccaggctggagtgcagtggcaagatcatagctcactgcagccttgaacttctgggctcaagtgatcctcctgcctcagcctcctgagtagctgcgactacagccacgtgccacaatgcctagttaactttatacttttgtagacatgaagtgtcactgtgtttctcaggctggttttgaaccctcggcctcagtaatcctcctgtctcggccttgcaaagtgctgtgattgcaggcaacagctccccacccaacccatgtttattctgtcagatttacttctaaaactgcagcagcttgtctctcattttgagaaacttgaatgatctttgtgcaataatgccaagtcaaacttcttttgtcagttataatttggtcctcctatttagaaacctagaataaatccttattgctatgtcccttttacggaaagtcatattaatccacactcttgattttcaatattcatcatcatccattctctttggcctcctcgcctaatttcagaatactctatttaaagcagaccccttaccaaatatgttacagattttgtcttttgcttctctagtgattagataacattacacattgctttatggatccttcaaaagaatgcacttggaggagcatgcaattgcctaaataaaaaaaagaaactaaaattctgacagacttctaggtagaggtgtgttagaaattccactccagatgtaagacatcagtaaacagctttgcacagtaagcctaaaagaaccagagtttttaggcttaaatattagtctagagccaaagatcaccagaatttggagcaagtataacaacatgtacgaggaagattcccagtgtgcaaacacacacaaatatgcacaatcacacacagtcatatgcataaatacactgactttaaaatgattaaaatatgcagaaagaatagttttttgtgatcaaaattcctttcttcagagatgtatgatctgttatgaaatccataaaataaatatcatttgctatatgaaaggatgtgacacgtaacattaaagaacttttgaaaactaaaattgtattaattgataaaaatattaagcggaagtttcaaaagacaaagtaagaaaactctatttgaaggtaaacaaaagcaataaccacatgaaaagactgctatttagggaagatagaaaaatgaggggattcatacaggaggaccaatatgtgcttaaggacattcctagaaagggatatagcaaaataatagtgaagttagtattcttaaaaaaatttctctcaactgaaatatattaactatcatgttcaaatgcaatagttttttttt

SEQ ID NO: 1493 - DNA, 4001 bp, Homo sapiens
agggacataaacagacaattttcacaagaagatatacaaatggccaacaagcatatggaaaaatgctcaacatcactaattatcaaggaaatgcaaatcaaaaccacagtgcaataccacctcactcctgcaagaatgaccataataaaaaaatcaaacaataatagatgatggcatggatgcagtgaaaagggaaaacttttacactcttggtgggaatgtaaaccagtacaaccactatggccaacaatgtgaagattccttaaagaactaaaagtagatttaccatttgatccagtaatacaactactaggtatatactcagaagtaaagaagtcattaaatgaaaaagatatttatacttgcaggtttttaggagcacaatttgcaattgcaaaaatgtggaacctgcctaaatgcccatcaatcaaggagtggatatagaaaatgtgagatatatataaattaccacggaatataactcagccataaaaaggaatgaattaataggatttgcagcaacctggttggaattggagactattattcaaagtgaaataactcaggaatggaaaaccaaacatcacatgttttcactcatatgtgcaagctaagctatgagacaccaaggcataaaaatgagaccataaactttggggacttggtggaaacggtggggggtggcaagggataaaagaccacacatttgataaagtgaacactgcttggatgatgggtgcaccaaaatctcagaaatcgccactaaagaacttattaatgaaaccaaacaccgcctgttccccaaaaagatattgaaattaaaaagtaatttaaagaaatactttagtgtccttattgaaaatgacttatattgtagtcataactgaattgaatatacaaaaataaatatataaaatggtttacctgaaataaattgtataggtgcccataaatatgttaggcaatgtacataatcaatgctagtattttgacatcatagaaaaagatggatattagaaagaagaatttagcaaacagcaaaacataaagtttatgaggtaactcactctcagacttgccctttcctaagatcttcatgaatgctctagtcacctccttgttgcggaggctgtagatgaggggattcagcatgggagtgaggatggtgtagaatacagacaccatcttgtcctgcgttggggagtgatcagatgtgggccgtatgtacatgaacaaagctgctccatagtacattcccaccaccatgaggtgagaggaacaggtcgtgaaagctttgcaacgaccctctccagatcccatgtgaatgacagccagaataactcgagcataggaagcaatgatgattgcaacagggaaaacaagcattactatacagcagatgaaaataacctcttcaaatattgatgtgtcattgcatgagaggattagtagggaagggaattcacagaagaagtgggctatttcccgagacccacaaaaggagaaggaaaatgtggctacagcatcaatgattccatctgtagagcccaggatccaggagaaggtagccataagtccacaaattttaggattcatgagattggtatatcttagagggtggcaaatagcaatatagcggtcataagccataacagccaaaagaaaacattcagagccagacagtgatatatagaagaaaatttgtgtgacacaaccagccatagaaatggacttgctgccagacaggtagttgaaggccatcttgggtacggtggtgcagatgagcatgaggtccatgagggacagttggctgaggaggaagtacatgggggtgtggagctgggtgtccaggtagatgaggagaaccatgacagagtttcccatgaaggccactaaaaagatgcccaggaccagaaagaagaggaacgtgtgtggtgggctgtgattgaagattccaaggaggatgaagtcggagttgaaggtctgattctcccatgccatgatgaatgtgctttttacctagtaccacaaaaccatcttattaatttggtaaacatttacccagtgtcttataaatcgtgtgattttggtaaattctgtagttgggtgatcaatacagcatgaatagaagtaggaaactaaaaggtcaagaagtatagaatctgaacgaaatatgttctttcaatacagcatcacttataaaattatggagcttgttctaagatttattctgggcatcctttttcaattgaaaaattagaataaaaatatctaataaatgattgacggagttttccaaaaagaatatgtctccaaagcaaacagatagttcctaaaacacgagaagtatttcagagataaattgataggctaattcagcttcagtcaacatgtgaccaacacaatactacaaatgtagaataaatgtatgcttcgctctcataataggcagttttacaccagtgttaacaaaatctgtatgtttgcttattactttacagtttagaatatttgatctacactttatagtaagctttgttgtatatggtaagtggatacactggaaagattttcaattatgcatatctaaaacctaggccctttttctctagcccagtgttatggattgaattatatttcttcccaaaaagatactcagcgtgtgagcttgtttggaaatacgtaaagacggtaattagttaatgtgaggtgatattggagcacagtgggtctctctaatgcaatatgactcacgttctgataagacagtggccatgtgaagaccgagacactgggaataccatgtgataggggaggcagcgactggagtgatgcatctacaaaccaagaaatgccaacaactgttagttatcacaggaacctgggagagaggaatgggacagattcgtcctcttagagccctcagaaataaccaacactgctgacatcttgatttcagatttctgaaatccagaactgtgaggtaaatttatgttgtttcaaggtaatcagtttgagatactctgtattggcattcttaggaaactaatacacacaatatctcctctagaaaataagtacatacaaaaacagaaattcagaaaagcatgagatccaccctttcaaacaacacttgtgaagtctggctatatgttgaccactgtggctaccacagtaattagatcaaagaaagcccctgttcatacaggtcatagtgagtgcgatcagatgatgactataaaccactttatatcataaaaggataaatgttttggagaaaagtaagtcaaagatgggtgttagaattgtgtgagcatgttcatctttgaacagagtagtcaagggaaatctcacacatctagtggcatttgacaaagactctgaggaggtgagaaagagaccagatcacaggaaagggttgtacatctatgcattccacaaaatgaaatgcaataattagaacatacacagagaaaatagaaatgtatagaagattgtgggaataaaaacatggttttctaatttaaggtatgttgcttgtatgttgtggcatttagtttttatcgtatgagataattataaatgtatgagcaaagccaatgtgtgaagggagattattatgggcaataaaaaaatgaggtcataaacagaaagatatgcctagtgagtaggttcattagacagaaatgtgcttttttaatttattcatgcatcacatttttatgaagagactaaaaacaacaatgaaagctgaataaaccaggagcaacaagagagttagaagaaatctgcagaggagatggaatctagaatttgtcctcatggggtgaaatacaattttttaaataggtgggtagtaaagtatacctctttgagttttatttatttatataaattgtgaataatattgtgaataagaaagaaaaaacctctcaaaagcagttttaaattttcattcaagaacagctgttatgtggaaatactaacctaccaaaaaatgc

SEQ ID NO: 1494 - DNA, 4001 bp, Homo sapiens
aatagccaacaagcatctagaaaaatgcttgacatcactaattatcagggaaatgcaaatcaaaaccacaatgcaataccacctcacttctgcaagaatggccataatcaatcaaacaataatagatgctggtgtggatgcggtcaaaagggaacttttacactgctggtgggaatgcaaactagttcaaccactgtaaaaaacagtgtgaacattccttaaagaactaaaagtggatctaccttttgatctagcaataccactactaactacacagaggaaaagaagttattatacaaaaaagatacctgcacatgcatgtataaagcagcacaatttgcaattgcaaaaatatggaaccagtccaaatgcccatcaatcaacgagtggataaagaaaaggttatatatatatatgtgtgtgtgtatatatatacgtatatatatatatatctatatacacacataccatggaatactactcagtcataaaaaatacaaaataatggcattcacagcaactgggatggaattagagactattattctaagtaaagtaactcaggaatgaaaaaccaaacatcatacgttcacattcatatgttgaaactaaactatgagacaaaaagtcataagaatgatacactggactttggggacatgagggaaatacggggaatgacaagtgataaaagactacacattgggtacagtgaatactgcttgggtgatgggtgcaccaaaatctcagaaatcatcactaaagaacttattcataaaaccaaacactacctgttctccaaaaacctatggaaattaaaaataatttttaaaactttaatattcttattggaaatgacttacattgtggtcatagcagaaatgaatataaaataataaatagttataatagtttatctgaaataaattatataggtgcacataaatatgtcattgcagatttatgtacacaatgaatcccattttcaaggcttaatggaaaaataggaccatttaaaaaaaggatttagcacacagcaaaacatgaagtttattaggtaactcactctccagacttgccctttcctaagatcttcatgaatgctctggtcacctccttgttgcggaggctgtagatgaggggattcaacatgggagtgaggatggtgtagaatacagacaccatcttgtcctgtgttggggagcgatcagatgtgggccgtatgtacatgaacaaagctgctccatagtacattcccaccaccaagaggtgagaggaacaagtagtaaaagctttgcgacgaccctctccagatcccatgtgaatgacagccaggataactcgagcataggaagcaatgatgattgcaacagggaaaacaatcattactatacagcagatgaaaagaatcttttcaaatattgatgtgtcactgcatgagaggattagtagggaggggaagtcacagaagaagtgggctatttcccgagacccacagtaggagaaggaaaatgttgctacaacatcaataattccatccgtagagcccaggatccaggaaaaggcagtcataagtccacaaattttagggctcatgagattggtgtatcttagagggtggcaaatggcagtgtagcggtcataagccataacagccaaaagaaagcactcagagccaagcagtgatgtatagaagaaaatttgtgtggcacaaccagccatagaaatggacttgctgccagacaggtagttgaaggccatcttgggtacggtggtgcagatgagcatgaggtccatgagggacagttggctgaggaggaggtacatgggggtgtggagctgggtgtccaggtagatgaggagaaccatgacagagtttcccatgaaggccactgaaaagatggccaggaccagaaagaagaggaaggtgtgggtggggctgtgattgaagattcccaggaggatgaagtcggagttgaaggtcgaattctcccttgccatgatgtgtatgctttttacctagtaccacaaaaccagcgtattaatttggtaaaactttactcagtgccttataaatcatgtgattgtggtaacttctgtagttgggtgatcaatacagcatgaatagaagtaggaaactaaaaggtcaagaaatatagaatctgaacgaaatatgttctttcaacactgtctcacgaaattatagagcttgtcctaaggttttcttctgagcatcccctttctccattgaaaaattagaattatagtatctaataaataatggatggagtttttttttttttaaagtctccaagggaaacagatagttcctataaaattagaagtcttttacagacacattgatagagaaattcagcttcagtcagcatgtgaccatcacagtactagaaatggagaataaatgtgtgcctttgctcacataatagtagacatttttactaggagtgttaacaaaatctgtttgtctattactttagagtgtttgatgtacactttgtagtaagttttctatacagtaattggatacactgaaaagattttcaattatacaaatctaaaacctaggccattttttccatagcccagtgttacggattgagttgtatttcttcccaaaaagatactcagcatgtgagcttgtttggaaatacataaagagtgtaactagttaaggtgagatcatattggattagagtgggtttctctaatcagttatgactcatgttctgataagagggtggccatgcaaagactgagacactggggattaccgtgtgatgggggaggcagggattagagtggtgcatctgcaaaccaagaaatgtcaacaactgttagttatgacaagaacctgggagagaggaatgggacagattcatctgcttagagccctcagaagtaaccaaccctggtgacatcttgatttcagatttctagcctccaaaactgtgagagaataaaattctgttgttttaggtaaccagtttgtgatactgtattggcattcctaggaaactaatacatccaatatctcctctagagaatgagtacatacaaaaacagaaattcagaaaagcatgaaatccactctttccaaccacacttatgaagcctggctacgtgttgaccactgtggctaccacagtgatcagaacaaagtccctgtgcatacaggtcacagtgagtgtgatcagatgatgacatataaaacaatttatgttataagaggataaatgcagcctcatcattctatgcagccataaaaaatgatgagttcatgtcctttatagggacatggatgaaattggaaatcatcattctcagtaaactatcgcaaggacaaaaaaccaaacaccgcatgttctcactcatagatgggaattgaataatgagagcacatggacacaggaaggggaacatcacactctggggactgttgtggggttgggggaggggggagggatagtattaggagatatacctaatgttaaatgacgagttaatgggtgcagcacaccagcatggcacatgtatacatatgtaactaacctgcacattgtgcacatgtaccctaaaacttaaagtataataataataaaaataataaaaaaagaggataaatgctttggagaaaacttagttaaagaagggcattagaattgcatgagtatgttcaactttgaatagagtagtcaagggaaacctcacacttataatggcatttggcaaagacactgaggaagtgagaaagagaccagatcacaggaaagggttatccaaataggaattccacaaactgaaatgcataaatagaacatacacagaaaaaaatagaaatgtgtataagattttgagaaaacacagggttttaaaatttagaattatgtttctcgtatgttgtggcatttagattttattgtatgagataattataaatgtatgagcaaagccaatatgtgaagggagattatcccaggcag

SEQ ID NO: 1495 - DNA, 4001 bp, Homo sapiens
gctctgtctgtggccaggcatcagctgaattttatctggttttcctttctgctcttacaggacagcactgagctcaaagcctcacaattgctgtgttctttctcaccagagcccagagacactcttagcacactgttccttctgtcagtggtgagagaggggtggcattgtctgttcaagttgttttttctacctcttcactgcctcttcagtgatataaagttaaaaccaggtactacgaaggctcacctgatttttggctctcatgaatgtgttgttcgtgtatggattattgttaaattgctgtccttgcatgtgaacgatcagtggagccttctattccatcatcttgctctgccttcagattctgatggttaatataaggattataaggaataaaagcagacatgatacagatgttgactgtgcagcccaaatagatattttatgtggactccttaaaatatttaattttattagcataaagatcacacacatatatacttaagtgtgtgtatgtttatacgagtttctaggaaatattttatgcagacataaaacttgattgaagaaagtgttgatactaactccgcacttttaaatacttgggagtcaagtaaagaagaatcagtattaaaatagtcattcttgggtttgaggatgggcaaattaaaaacaagtactaataggtaagtaatttgtgaacaaagaagcatctctccaaaaacagaggatcaactccaacctttgctttttgatacagctaagacccttcggacttatacctggcttcaaaagtaagcatcctaaaatcaagtaccacccatgtgtgacacctaataatataattgtcattcacagggattaaaccacttatactaacatccaaatctagcttagtatacaaacgatgtatatgtaataatatactgaatagataattttgaaaagaagtggaaaatattaatacaaattaccagaaatagaaatagaataatttaagagattccagtttttttgaatgagtgttgaccacagtaggcactcaaaaagattttgataaggtcatattaactttcttttcttcagtaccttctgtagtgccctgaacacttctttgttgcggaggctataaatgagagggttcagcataggggtgagaatagtgtagaaggccgacaccatcttgtcctggtctggcgtatgtttagaagctggtctcatgtacatgaacatagcagcaccgtagtagagtccgaccacagacaggtgggaggagcaggtagtgaaggccttgcgacgactttccccagagcccatgtggatgacggctcgaaggacatgggaataggaaagtatgataactgaaactggaaagattagcattaccacacaacaaatgacaagtagtctttcaaatgcagatgtttctgtgcaggatagaggtaaaagggcagcaacatcacagaaaaagtgatgaatttccagagagctgcagtaagaaaatgacaggacagctgcaagcactatgatcccatcaagagaccccaaggtccaggaagcaacagtcatgaagacacagagtttcggattcatgaggatggtgtactgaagagggtgacatatagccacatagcggtcataagccatgacagccaacaagaaacattcagctccaagcagggacacatagaagaatatctgagttccacaacctgccagagagatagatttcttcccagacaagtagctgaagatcatcttgggtagagtggtgcagatgagcatgaggtccataagggacagttgactgaggaggaagtacatgggggtgtggagctgtttctctatgtagatgaggagaaccatggaaatattttccatcaatgccagtgagaagatgcccaggaccagagaaaaaaggaaggtgtgggtgggactgtgattgaagattcccagcaggatgaagatggagttgaaggtctggttttcccacaccatcctggataatttgccttatctgagaattccaaagaaggtacaagcttatttatcaattcagttttcaaacacatactgtgacatactctactgggcagtttatatgcatgcataaggccttctcaccaaccttcagttaccttcctttagtcatggtaaattgtgtggattagtccattgcttttacaattatttcctcatccaactttcacagagtatacatggagtacatttggacatttactttacagacaagaatgctgaagtgtataagagcttccctacttacccacatgtacagtcaatagaaaacctaggagaaaaatcactgtatgcctttattgctaaattttaggatcatacctcataaaagaaaattccttacagaattttttctccttctgtcctaatatttctccaggttagtagtctcgttgacaacagaattcctgttcgcatgtttttttttccctaccatcctacctgcagcccagtgaaggattatatgagatcaatgacattactccttggggacacctgtacacttcagttcagagaagggtatagtactctatgttttaacttttctatctcagaccaagtcgtgaagtcttgtcttatttaatcaaaacccccattaaaatatttttctaaggaagactaaatcgttcacttatcttctgaggataatttttttccttccaattctgtgtggaaaagaagctgcattttttgtttgtttatttgcttgttttgtttctatttttaattttattaagttgatacattaaagttgtaaatatctatgggggcacattttgacatttcaaaacatatattttgcataatgatcaaatcagggtatttagtgtgaccatcacctcatgcatttatcatttttttgtagtgaggacattcaaaaacctttgtatttttgaaaaaattgatttcttctttttacaataaagtgttataaatcaaatcggataaacatctagggacaaaagaaaacccttctgtggtctttaacagcttctctgcaatgtgctactttggagacttacggggcgtgttctaccacagtgagcaaaggctcaactgtatgaaacgtggctcatctcgtgctggttttcagagggaatgcttccaggttttgctcattcagcgtgatattggctatgagtttgtcataaatagctcttattaatttgatgtatgttccatcaatacctagtttattgagagtttttttgttttgttttgttttgtttttgggggggacagagtcttgctctgttgtcaggctggagtgcaatggtgcaatcttggctcaatgcaaactctgcctcctggtttcaagcaattttcccacctcagcctcccaagtagctgagattacaggcgcccgccactacacctggctaatttttgtattttagtagagatagggttacaccatgttggtcaggctcatctcaaactcctgacctcaggtgatccacccacctcagcctcccaaagtgctgggattacacgcatgagccaccgtgcctggctattgagagtttttaacacgaagcgatgttggattttatctaaggccttttctgtgtctattgagataatcatgtggttgttgtcattggttgtttatgtgatgaattatgtttattgtttattgtatgttgaaccagggatgaagctgacttgatcgtggtagataatatttttgatgtgctgctagatttggtttgctagtattttactgagaatttttgcctcgatatttaccagggatattggcctgaagtgttccctttttgttgtgtctctgccaggttttggtatcaggatgatgctggcctcataaatgagttaggaagaagtccccttttttcaattgtttggaatagtttcagaagaatggtaccagctcctctttgtacctctgatagaatcaggttgtgaatccatctggtcctgggcattttttggttggt

SEQ ID NO: 1496 - DNA, 4001 bp, Homo sapiens
tcaaatagtgggctaagggacatgaatagaccattctcaaaagaagatatacaaatggccaacaagcatatggaaaaatgctggacataactaattatcagggaaatgcaaatgaaaaccacaatgtgataccacctcagtcctgcaagaatggccaaaatcaaacaaaaaaaaatgttggcaggatgtgctgaaaagggaacacttttacactcttggtgggaatgtaaactagtacaaccactatggaaaacactgtgaagatggaaaacactgtgaagattccataaacaactaaaggtagatttaccatttgatccagaaacaccactactaggtgtatacccaaaggaaaagaagtcattatacaaaaaaagtatttgcacacacatgattatagcaccaaaatttgcaattgcaaaaatatggaaccaacccaaaagctcatcaatcaacaagtgaataaagaaaaggcggcatatatatatatatacaccatggaatactatcagccaaaaaatggaaaaaatattagcattttgcagaaaccaagatagaataggagactattattctaagtgaagaaatgaagaaatggaaaaccagacattgaatattctcactcatatctgggagccaggctatgagacaccaaggcataagaatgatacattggactttggggacctggagaaaaggtgggggtgaagagggattaaagaatacacattgagtacagcgaacactgcttgggtgatgggtgaacaaaaatctcagaaatcaccaaagaacttattcatgttaccaaacaccatctgttccccaaaaacctatttaaataaaaaaatttaaaaaactttaatgtcattattgaaaatgccttatattgtagtaacaactgaattgaatataaaacaagaaatatttaaaatagtttatctgaaatagattatataggtgcccgtttatgtacaaaatgaaagctattttgaggacttaatggaaaaaaagggacagttaaaagaatttagcagacagcaaagcataaagtttacaaagtactcactctccacacttgccctttcctaacactttcctgagtgctctggtcacctccttgttgcggaggctgtagatgaggggattcagcatgggagtgaggatggtgtagaatacagacaccagcttgtcctgcataggggagcgatcagatgtgggccgtatgtacatgaacaaacctgctccatagtacattcccaccaccatgaggtgagaggaacaggtagtaaaagctttgcgacgaccctctccagatcccatgtgaatgacagccagaataactcgagcataggaagcgatgatgattgcaacaggaaaaacaatcattactatacagcagatgaaaagaaccttttcaaatattgatgtgtcattgcatgagaggattagtagggaagggaagtcacagaagaagtgggctatttcccgagacccacagtaggagaaggaaaatgtcgctacagcatcaatgattgcatccatagagcccaggatccaggagaaggcagtcataagtccacaaattttgggtctcatgagattggtgtatcttagagggtggcaaatggcaatatagcggtcataagacataacagccaacagaaagcattcggagccaagcagtgatacatagaagaaaatttgtgtggcacaaccagccatagaaatggacttgctgccagacaagtagttgaaggccatcttgggtacggtagagcagatgagcatgaggtccatgaggaacagttgactgaggaggaagtacatgggggtgtggagctgggtgtccaggtagatgaggagaaccatgacagagtttcccatgaaggccactgaaaagatggccaggaccagaaagaagaggaaggtgtgggtggggctgtgattgaagattcccaggaggatgaagtcagagttgaaggtctgattctcccatgccatgatgaatatgttttttacctagtaacacaaaaccagttcattgatttggtaaaactttacccagtaccttataaagcatgtgattttggtaaattttgcaggtcagtgatcaatacagtatgaccagaagtaagaaactaaaagttcaaaaagtatagaatcagaacaaaatgtgttctttcagcactgcctcactgataaaattatggagcctgtcctaagtttctcttccgagtgtcctttttctcaactgaaatattagaataacaatattcaatacattattgatggagtttttccaaaaagaatatgtctccaaagcaaacagatacttccttagaaatcagaagtcttttacagatacgttgatacagcaattcagctttagtcagcatgtgaccaacacaatagtagaaattgaaagtaaatttgtgtctttgttcacattatagtaggcacttttctaccagtgttaacagaaactgtttggttgcctattactttacagtttagagtatttgatctactcctcatagtgagttttctatacactaagtggatacaccgaaaggattttcaattattcaaatctaaaacctaggcccttttttctatagccctgtgttatggattgaattatattttttttgtcaaaaggatattcaggatgtgagcttgtttggaaaaacataaagactgtaattagttaaggtgaggtcatattggagcagagcgcgcctctctaatccaatatgactcatgttctgatcagagggcggccatgtgaagactgaggcactgaggataccatgtgatgggggaggcagggattggagtggtgcatctgcaaaccaagaaatgccaaaaactgttagttatcacaagaacctgggagaaagtaatgggaaagattcctcctcttagagccttcagaaataaccaaccctgctgacaacttgatttcagatttctagcctgcagaactgtgagagaacaaatttctgttgttttaggtaaccagtttgtgatactctgtattctcattcctagggaactaatacacccaatatctcctctgaagaataagtacaaagaaaaacggaatttcagaaaagcatgagatgcatgctttcgaaacatgcttatgaagcctggctatgtgttgagcactggggctaccacaataatcagaacaaagaaggcccgtgcccacacaggtcacagggagtgaggccagatgatgacatataacccactttatgtcacaagaggataaacgcttcagagaaaagcaagtcaaagaaaggtgttcgaattgcaagagcacgttcaactttgagcagcgtagtcaagggaaacctcacatgtctagtggcatttcgcaaagactctgaggaagtgagaaagagaccagatcacaggaaaggtttatccatatatgcattccacaaaatgatatgcaataattagaagattttgggaaaacatagggttttctaatttagagttatatttcttgcatgttgtggcatttagattttattctatgagataattctacatgtatcagcaaagccaatttgtgaaggaaaattattccagacaataaaaaatgatgtcataaacagaaagacaagcctgttgagtagactcatttgacagaaatgcactttttatgcttattcatgcatcacattttactgaagggactaaaatcagcaataatggaagctgaataatctaggagcaacaaaggagttagaagaaatctgcagaggagatggaatcttgaattcggcctgatgggttgaaatacaattttttaaatatgaggtagtaaagtatacttttttgagttttatttatttaaataaattgtgaataatattgtgggtaagaaagaaaaaaaatactcaaaagtagtttaaattttaattcaacaacaactgtgacctgagaatacaaacctaccaaaaaatatctcttcagtgctgggaaga

SEQ ID NO: 1497 - DNA, 4001 bp, Homo sapiens
ccatcaaactgggattgggctaagggacttgaatagacagttctcaaggagatatacaaacggccaaaaagcataaggaaaaatgctgaacatcactaattatcagggaaatacaaatcaaaaccacagtgcaatacaaactcactcctgcaagaatggccataatcaaaaaatcaaacaataatagatgttgacatggatgtggtgaaaagggaacccttttacactgttgatgggaatgtgaactattacaacactaggaaaaacagtgtgaagattctttaaacaactaaaagtagatttaccatttgatccagcaataccactacaaggtatatactcagaagaaaagaagtcattatacaaaaaaggtacttacatgttgcatgtttatatcaacacaatttgcaattgcaaatagatggaatcagcctaaatgatcatcagtcaatgagtggataaataaaaggtggtatatacataccatgggatactattcttccataaaaatgaattaattaatagcatttgcagcaacctggttggaattggagactattatacaaagtgaagtcacacaggcatggaaatccaaacatcgtatattctcactcatatgtgccagctaagctatgaaacaccaaggcataaaaatgatacactggacttggggacttggaagaaatgttggggactggagagggctaaaagactacacattaggtacagcgaacactgcttggttgatcgctgcactaaaatctcagaaatcaccattaaagaacttattaatgtaaccaaacactatgtgtttcccaaaatgataatgaaatttaaaaataaaaatggaatgtctttattgaaaatgccttatattgtagtcataactgaattgaatattaaaaaatctaaaatagtttatctgaaataaattatactggtacccatcaatatgttgagcaatgcacacaattagtgatatttttaggacttaatagaaaaagagagacaataaaaagaagacgttagcagacagcaaaacatgaaatttatgaggtaactcaatctccagacttgccctttcctaagattttcattaatgctctggtcacttccttgttgcggaggctataaatgagaggattcagcatgggagtgacgatggtgtagaatacagacaccatcttgtcctgcataggagaatgatgagatgtgggctgaatgcacatgaacaaacctgctccatagtacattcccaccaccatgaggtgagaggaacaagtagtaaaagctttgcgacgtccctctccagatcccatgtgaatgacagccagaataactcgagcataggaagtgatgatgattgcaacagggaaaacaagcattactatacagcagatgaaaataacctcttcaaatattgatgtgtcattgcatgagaggattagtagggaagggaagtcacagcagaagtgggctatttcccgagacccacagtaggagaaggaaaatgtcgctacagcatcaatgattccatctgtagagcccaggatccaggagaaggcagtcataagtccacaaattttgggtctcatgagattggtgtatcttagagggtggcaaatggcagtgtagcggtcataagacataacagccaacagaaagcattcggagccaagcaatgatatatagaagaaaatttgtgtggcacagccagccatagaaatggacttgctgccagacaagtagttgaaggccatcttgggtacagtggtgcagatgagcatgaggtccatgagggacagttggctgaggaggaagtacatgggggtgtggagctgggtatccaggtagatgaggagaaccatgatggagtttcccatgaaggccactgaaaagatggccaggaccagaaagaagaggaaggtgtgggtggggctatgattgaagattcccaggaggaggaagtcagagttgaaggtctgattctcccatgccatgatgaatatgcctgttacctagcaccgcaaaaacagttcattaatttgataaacatttacccagtgccttataaagcatgtgattatggtaaattctgtagtttggtgatcaatacaggatggccagaattataaaactcaaagtttaagaattatggaatcataaagaaatatgttctctcagcagtgtctcacttataaaattatggagcttgtcctaacttttcttctaagcattctttttctccattgaaaaattacaataacaatatctactacatgatcaatggagtttttccaaaaagaatatgtctccaaagcaaacagttcctaaaacatcagaagcctgttacaggtaaattgatagagaaattcaggttcagtcaccatgtgaccaacacaatactagaaatggacaataaatttgtgcctttattcacatgatagtaggcatttttcctaccagagttaagaaaatgtgtatgtttacctattactttacagtttaaagtattttatctatactttatagtaagttttctatacagtaagtggattcactgaaaagattttcaattatacaaatctaagacatatgctcttttttctatagcccagtgtgatgcattgaattatgtttcttccccaaaagatagcaagtgagcttgtttagaaatacataaagggtataattagttaaggtgaggtcaagttggagcagagtgggtctctctaattcaatatgactcatgttctgataagtgggtggccatgtgaagactgagacactgaggataccatgtgataggggaggcagggattggagtggtgcatctacaaatcaagaaatgccaaaaactgttagttataacaggaacctgggagagaggaatgggacagattcatcctcttagagccctcagaagtgtccaaccctgctgacaacttgatttcagatttctagactccaaaactatgagagaataaatttctattgttttaggtaacctgtttgtgatttctctgtactggcattcgtaggaaattaatacatccaatatatcctatagaaaataagtagatataaaaacagaaattaagaaaagcatgagattcatcctttcaacaacatttatgaagcctggctatgtgttgatcactggggctaccacagtgaccagaataaagaaagcccgtgtccatacaggtcatagtgagtgtgatcagatgatgattataaaacactttatgtcataagaggataaacattttggagaaaagtaagtcaaagaagggtgttagaaatgcactagtatgttcacctttgaataaagtagtcaagggaaacctcacacatctaatggcttttggcaaagactctgagcaagtgagaaagacaccagatcacaggaaagggttgtacgtatataaattccacaaaatgaaatgcaataaatagaacatacacagagaaaatagaaatgtgtggaagattttgggaaaacatagggttttctaatttagagttatgtttcttgtatgttgtggcattaagtttttattgtgtgagataataataaatgtatgagcaaagccaatatgtgaagggagattattccaggcagtaaaaaatgatgtcataaacagaaagacaagcctggtgagtagactcacttgacagaaatgtacttttttcatttattcatgcatcacattttaatgaagagactgaaaacaacaacatcaatgaaaggtgaaaaatctaggagcagcaaggaagttagaagaaatctgcagaagagaaggaatctggaatttgtcctcatgggttgaaatacaattttttcaatagggaggtagtaaagtatacctttttgagttttatttatttatattaattgtgaataatattggtaagaaagaaaaaaaatactcgagcagagttttaagttttcattcaagaacaacctaacaaaacatgcctcttcagtgcagggaaga

SEQ ID NO: 1498 - DNA, 4001 bp, Homo sapiens
atttccagtgccaattaaaagccccaagttgtcctgtacttttgaccaagtgattgtaaattggggatcccacggcccttccttgggttcagttagtttactataaaggctcacagaattcaaggaaacacttacctatgtttaccacttgttataaatgatattacaaaggatacacagaaacagtcagatgaaaagacacagagggtgaggtctggaagagcataagagcttctgcctctgtggagttgggacatgccaccctccaggcacatggatgggttcttatcaccctcctgttcagcttcatgagtttagctgtccagaagttttctgtcctctccttttggcccttatatggagactttattgaatagtcatgattgaagcatggacaattgcacagaaatatgattgaacaaagagtatgacctaatgttgatagagtgagtggggacacccacgaaggcctgtctgatcggatttttcttggcctctctgtatagcattccctcccccagggtatgagagaagacctcttttgaaacagaggtcttatgacatacagtcagacaaggtagtcagataatttctttgtgaccaaaagcggggaaagattggattatatttttagtttctaaggctttctttggggagaaaaagaagcaggtgaaaagagggaaggcgaagatcacagagagagattcagttttctgaggcctaaaaaaccacaacatcataactatggagttatgaaccagaaaccctagccaaaaaaccaatattgtaatcatatgactccctccctttttgcttcatcttttgatgaaagcacagccacagtgaccacagagtcccccatttaccatatgcatgggaaggagtcgactgtcaaaagacacctcctgacaccctttgaggacccttgaacctccccaaggccctcttcagagctccagtcacatccttgtttctaaggctgtagatgagggggttcagcatgggtgtgagaatggtgtaaaacacagagaggactttgtcctgggctggcttgtggtaagaatgtggcagcatgtaggtgtacatggcagccccgtagaacaaggacaccacagtcatgtgggatgagcaagtggcaaatgccttcttcctgccctccactgagctcatgcactgaactgtagtcaggattcgggcataggaagcaaggactacagagaaaggaatcagcagcatcaaaacacagcacacatacatcactgtctcgtagagggctgtgtctgcacatgccaacttcaggactgctggtgcctcacagaagaagtggttaatctcccgggaattgcagaagggaaagctcatggtgatgggggttaggaggaagccatccaaagagcccccaaaccaggaacctgctataatcatccaacagacccggcggctcatgaggacagggtatctcagagggttgcaaatggccacatagcggtcataggccatgaggcccagcaggaagaattcagctcccacaagggtaaggtagaggaagtgttgagctgtgcaccccacaaaggaaatggtcctttgatccagcaggtaattaaccagcatcttaggcacaatagtggaaatatacatcatgtcaattaaggaaaggtggctgaggaggaagtacatgggtgtatgaaggcgcaaatctgtttggatcaggaagatcataaccccattggccatcagtgcggtgaagaagatgatagagatgatggcaaaaataagacctgaggtttcctttctgttgaacagccccatgaaagtgaagtctgtagaggatgtgttgtactcttccattgatcctacagttgtgccgatataaggtaatatcttccaaataagatgatagcattcccagggcagtaaaataacaacatgtgaattaattgttaggcagcaaacttttaaaagtgggaagaaaacatttaaaaaatagtattcttgccacattgagactgatatctagcatttactctattccagaaggtttttaaataaaattggtcattattaatcaataattgcttaaatacattggagaagatgaggtcagcagatgatactgtattacgatgatgtgcataacaatgcctaaggttgcataccatgctacacagcagttacgcataccatggtccggtgtatgcgtgtgtgtattaccttagatgcatttaaatttgtattattatttaatgtgtctttgtatggttggcatcaccactactttcaaaacatctttggtgctggctgtgagtagctcatgtcttccatttagctacaagtacgggttatctaccatttgggtcacaagtcactgtctacatcatgagagtatacttggtgttagtttatccatgtcccagacaaattataagggatgaaataaaaagggcaacagaaactcaacggaaactactcttgcaaatttagacataaaaattattctcaatacaagaggcattcagtgttgtagaattttatttattttcaattttaagatgatgaggaattagcattaggattatgattagcatgaccattagaaatcagtattagcaattaatattcagaggaaataccacagggacgtaaacattgagctataattcactgattatttttggaaattagaatttttcatagttcttcataattaagaaaaactgagtgtgttttatacaatttcaggttacaataaagaaacaaatatccacaacaaacttcatggaagtaaaggatgatttttcacattgtttaaggctaaaagtgtcccaagaaagacattttaccaacatatttgggagtaaaattgatcaaactagtctagtgctcctctaaatattctaaaaatattagcatttgagtcaattgcccagaaaaagaagttgctattgagaataatgatgatgacatcgtggagtttattttgcaaagtgtcatgctaagaagtactttgtaactattgactccctgatcttcacaataaaactaagaagtgaggagctataaaagcccctctcaccaatgacagcattgagggtaacgtgttggtggtcacggggtctgttagtgccaggagtgtttggactagatagtctcaattcattatatattcatacacatggcattgtgtatataggaagctttatatgggaatagcagctagacatttactgtaattagcaaataaaatgtaccaagcatgtgaacctgctaaattgttaacaatgtaataactaatgtgactaatgaaaattagtcatacttgagagtagatcacataaattattataatcaggattgctgttttatggatataaactatgtgtacagatatacacacatatataaaaatgtacacatagatacatcatatgtatattttatatatatatataatgtatattttgctaattcagaatatttggtgtcaggttttatacatttttatgatactatgtacaatgtcatcattacttacaacctccctcattttactttttttaggtttcattaatggaacctataaaaatatatttctaaagggaaactcctctccagtttatgtcgcagcctaaatattagcagtatttcagctacttccacacttcctacattttcggtttgacttttatcatgcgataagacaccagaaacagagggaaaatcatgtgctgcttcacaaagtcaaacagtggtctctgctgtctgttcacccttactcccattttatacacacacacacacacgtatatgtaatagcacagggacatacatattgaggtataactcaccgatgatttttggaaattggaatttttccgtagctctggcaattaagaaaaactgagggactgttttatacaatttcaggttacagtaaaatccacaacaaacttcaagaatataaaggatgatcttttatccattatatatatatatataagtat

SEQ ID NO: 1499 - DNA, 4001 bp, Homo sapiens
actttataagctgcacacccttttgttcatgttactcaaacccatgggtttcagttaaatcaactgtagaataaggctaataataggctgtgaaaataaaagtgttccatacatgtcacgcactaaaaatggtgccagatcataataatcacacaagacgttataattattatgttatttgttaaatacaaatacaaccatgcacatacgtaaaactgtgatttgaaattatattctaagtatgtgtcaccattggcttgaacagggagaagtgtgcgaaacttccatatttctctggttaagtctatgaataaaccaattatactccaaacatgttgtagcccatgtctactggatagcccatgtctctgctctaattttgggaggtttgacttcttatatgctcacagaaaataagaatttgattgagaacacattctagaaattctgatggaagaaaaatctcaactgtacatttagcatctctgaggtcttgaatgtgtttatctccaaatgcctatggatgaatgaacccccttgtccctgaggatcccctgcttggggcaagtcaggggaagcctcaaaggctgttttgtcatttgtgaaatgtgggtgaccttagcctcagccacagagggtgaaggtcgaatgaggtggtgaacgaaaagcgtttagcacagagtggatgctgaggaacactctgaatatggtgttatttcatactcatcaatgggcccatgatagcaaaacaaattttctctgtggtggaaggtgctcaagggtcataaacacatttattttcatatttctccactgtaatctaaaaaaaggaccattggccccgaaggactggactagagatcaatgctacgagggaagggggggataagtgaacatcatctcaagtgtgattataggagggaagaacactgggctgaatccccctgaaggacaactcagggagtcagacactaccacaatatgctgattgtttggtggaaggacacctaaagtgaagagagactctaagaagagaggaccaacttaagttctttcacactttaatatggaggtttctgcacgctcagcatttttttcaaagcccttgtgacatccttattcctgaaactgtaaatgataggattcaagacaggtgtaaggatagtgtagaaaaaggatgacatcatatctttctcaggagtttggtaggagctggggagcatgtagttgtaaatagcagctccatagaagaggctgaccactgtaatgtgggaggagcaggtggtgaaggcctttttccgaccctcaactgagttcatcttatggatggtgaggatgatatagtagtaagacactgaaatgaccgtcacaggtatcaggagcatgatgacacagcacaagtacatgaaaatcttgtaaagtgaggtgtctgagcaagagagcttcaaaacagcagggacctcacagaagaagtgctgaatctcatgggatctgcagaaggggaagctcatggcgatgggagtgagcatgaagccatccactgagcccacaaaccagcagcctgatgccaggaggagacataccctatggctcatgagcacagagtaacggagaggatggcagatagccacatagcggtcataggccatggcggctagaaggcagcactctgcacctcccaactgcaggtagaagtacatctgggtgccacacccaaggaccgagatggtcttgtctttggccagctggttcaccagcattttggggacagtgacagaaatatatgtcaagtctatgagtgagagctggtttataaagaagtacatgggagtatgcagagaggagtcaatgtggatcagaagtatcaatgtaatattccaagacacagccatcaaaaatatactgaagataagcaagcagaggcggccagggtgtgagatctggctgaagattcccaacaggaaaaagtcaccacccagggtctggttggccagccgcatgctgtatgatcggctgaagtggctttacctggaggacaaaagtaaactttatttataatcatgtgtgtaccacgtaaaagtatgtttgcttcactttaccttttaaaaatcaatgtgaaaatcagagtgtatttccaacatgaactgtgaatttgcactaaaaagagacagcacattagattgtgaatctgattccccatctagaatgggaatgaaatatttatattctcaatgaagaggtccatacaactgaaattaaattatttcctatagattatatagtcactaatagttatttttacttatatatgttcacattttgtgtgtgttagtatcttatagttgcatgttcctgtattgcccaaatcccattcccatgggattttacagagctaataaccaatatagatatttctatatatttgaccctcaagagtcatgtctgcaaaaaaggattagtaatacttgtgtttcttaaatctcgttacaaatctacgaacatacaatttttcaatacttaaaagcaatatattaagccaccagtaattgtaaacattttaaacataaaattccaaacccttatataacgttacaaatttagtcaaatttctttaaatgtattaaagacactagtacaacttgtaaatttctctaaaatgatttacttttacacatatgtgatttataaaatgtatttttatacttccacttaacctattacaaagacattaatcttgtgagttatttattcatattttcataatttccatcaagatgttctaatccgttgtgtttctgccaatctttcaagatatcaaaaaaaaattatggctatctcagatcaatgatgctttaggaatcagcattatcatccaatcagtttattctgaggtgattggtctgaacctcacttggaatttcttgatgtgaaccttctttataaaattaaagtaaaatgtaattggattttacaagcccacatcttttcttccaatctccccattttgcctgtagaattttggtgagagaaagtttgcctcaatttatacttatcttatcgtgacatccaacatatttattgtatgcaggtaggtcatcctaaggtttcttctcccagtggttcaagcatgggggtctctgaagttgcaattttttttaaagactactcaagtgcactagtgagaagggaggaaaatgtagaacaaggaattctatctgtaactggctgtgaacaatcaattgagataactatcttcagatcatccaagttccaatttcttctcagagcatctagtcaattaatcaccttgtaataggctgtaggactcttcttctacctggctattttggggggtcagtggtgctggtcagccctttcccgttgatagcactatctttctcttgttcagaattctgtgatttacatatggatgctcattattattattctctacttaaagaaaatgcatatcctttataaaatgaatagttttagatatcattaatgttcaatatattaataacgtgtcaaatgtttatttaaatcagacacatattcatcctttttatattgcagcttttcttatgtaaccttttacattgtaatgtacactttatattttttatcattaacttaaaatttataaataagaattattgcaattggtcatattatttccttttttatttcaaatatcttgccctggccaagactaaactcgtgggttttcattttgttttagaaatacttagcaaaggacacagaaagcataagagtaaagtaatgccagtttttaacaaattgctttcttatgttaagagacttaaaaccaaaggggacttaatgtattttcagtaaataaacatgtcattggccataacaaatggtagattttagtcaattaataaattactagactaataaactatattttcctggagcagaaagtaattttctaagtataaaggcaaaataaataattcccaataaacttcaaaaat

SEQ ID NO: 1500 - DNA, 4001 bp, Homo sapiens
acttgggcccaaaccaataagttatccttcactctacacctgttgctaacacacgccaaatccatgagccaaatcctttgtgtccacaccctacacaagccatccttgtttctcatctctgaaacctcaattgtcttcctgtatccatgtttgccctttgttctattttcctacactgtaggcatagtgatgctttaaaaacgtgtctgttatcatgtaacacccgcatggaaaactccagggacttcccaccccactcagtcagtctcaaagtgccttaagtgttgctgttgaatcacagaacttggaaaagggaagtttctggccatggatgttaacgaacctggtatcctgttaatacatcctcaaggaaagtggcagtcatgttctttgatgctaagtgttagagtctattccctgtgagtagctgtgtcatgctgaacctccacccattcatactcagttctgttcaattcaccaccatttattgtggcctagtatttgatagctgctgtctgtactcaagagggtcagagattcaacgataatattagagcttatagttacttggggttaatactaaaataaaaaacacgactaaagtgtgtgcttttatcttctttgccacttgtgtattggcattcttttactctattgctgctaatcacagaatttgactgtaaacatttgatagcttttgcaggtttctttcattgtgttgtttaaacatgaacaaatgttgtgaaggagatctagttcagagtgaaaggttgctgtgaactctaatatttggggtttttcttccctaaataaaaagactagataaattatttaacttcataataaaccatttttgatacttcactgaaagatctctgcataacagtaaaacatctttcccttgctcccgaggagcaagaatccagacagggtgaatcatcttaactgccagtagtaagtgtaggttgatagctgagcagatcatctccagggaaacagggcaaatggaggaagtccttaggaagccttatcctctgggcagtgactctctaagcatcacttgttgctactttctgagcagatgagcaacatgcaaatacctttttaaatgcccctatgacgtccttgtttctgaggctgtagatgagaggattaagcatgggcgtgacaatggtatagaaggctgacactactttgtcctgctcgggggtgtggaaggactggggcagcacgtatgtgtagaaggcagccccatagaagatgctaactacagtcaagtgggaggaacaagtggtgaaggcctttttgcgaccttcagcagagggcatgcggtggatggttaacaagatgagggagtaggaagtggagatgatagagatggggatgagcaacatgaggacacagcagatgtacatcagagtttcatacaaggacgtgtctgcacaggccagtttcagaactgctgggatctcacagaaaaaatggttgatacttcgggagccacagtaagggacattcatggtgatgggagtgagcagaaagccatcgagggagcccccaaaccaggcaccagcagccagcaaaagacacttcttgcggttcatcaggactgggtatctcagagggttacagacagccacgtagcagtcataggccatgaggcccaggaggaagaactcagaaccaatcatggtcaggtagaggaagatctggatgccacaggccacaaaggaaatgatcttctctttagaaaccatgtctgccaggagttttgggacagtggtacagatgaaaagggtgtccatgatggacagctgactgagcagaaagtacatgggggtgtggaggcgagagtccacctgaatcaagaatatcatgaccaaatttgcagtcacggcccccaagaaaacagcaaggatcactgtaaatacaatcccggcagcctcactgttcaccagaagccccaggagggtgaagtcagaggatgatgtgttcgtcattgatatggcccacgagcgtcccagggcaacgggaagacacaaggaccaggaaggaggcaagagaacacggtcaagatgggaaaggtctgcagtagaggtgacacttctgagggtaccgtcaggatgaagcttccaggctagaggctagagaagaacaggcagaccaacatgcacatcatgaagcaaaaaccatggctgcatttccctgtcagagaacagctccttctatattgcgtctatggttcatcatgctgctggaggttatggtaactgcgtgatacaattgctgtatgctacaccaagaatggggttttaaccatatctgttctgtccatgctgcatttcttgtatccagaaagttatccagcccatagtagggttaagtaaatactagttggaaaaaagggtgattcattgaccaaatggataaaggggagtgaagtaaatcactgaagaaatgaagggttaggataactattagggaacgttttattcacgaagccccatgtttctgttctatttctttttaattatttgtataagtttaaggacgacaagtgcagtgtcatgacatggatgtatcgcatagtggagtcttgtcttttagggtaaccgtaagtcaaatagcgtaggttgtgctcacattactaatttctcacccctcgctccgctttcaccccctactcttccaagccttcgatgcctattattccactgtttatgtctaaagttgggactcctcactgttctttgtgctgttttgctaacctttttgcagatctttcttcagataaattagaaggtaaaaaaaactatttgcaaaaagctcccagaattaagtttttaaaaagcagtttatgacactaagctgactccctgcattgctctccattgctactgtaggtttgggaaatgggcagggaaattaaaggaaaatgttggtaggttgaagctatgtcagcagcagacacacaggagcagggttcaccaagctacacgtctgccagcacttaccagaactgaggccagagccaaactcaggcttagaaagctacggagcagatacatggaaatgtgacagcaacaggccaccgtttaagaaggaattttatctttaacataccaggtggaagatagatttaactgttagacaagagaaagaaccatacatgtagtaagaatcgcccccctctccccgccagcacctcctccccggcatggtaggcctcagtggcttgagtctcaaacatttgtgtaaaaatgaaagtccgatcaacgggggagcccggatgctgcagggtttccccccattcacatgttgctagacacaccttggctccactatctagtgttgccagatttagcaaagatacaggattctcagctatgtttgactttcagataatcaaaaaatgttttagtgcaagttcataatgttcttaacaccaaaaaaaagggttcactgtacatctgaaattcaaatttagctggttgtcctttaccatgctgaagtcatatctggtttcacaaaggtaccagaattgttatgaccttgaaaagtgaccagtagaatcagtacaaatagagtctaaacaaaaaagttatttactaacatcaaaattaaattggcttactcccaatttccctctgattgatatattcatattactgtgaaaggggctaaggactgtggcctcctctgtcaggcctcccagaaatactccgtggtcaaaactctacttcagtgagtcttagcctcctgatccactcctgatcgtttcaattctattccatttcccaaggatagtgaacacaaatattgcctaaaaatatattctgctaattcaaagtccaaaaatataaaagaaacattctatattagactccaaaaacttcctaatagaattaacccacactaaggagaagagagcacatctctttgtcatattaaacaaattcaaacattttatccaaaatgtataaaacagtaaaaacaggcca

SEQ ID NO: 1501 - DNA, 4001 bp, Homo sapiens
cccaaatttttcatcagaaatatctctacttacctatgccttgggagaagtaaggtaacccaataatgtataaggttgttgagtcttactcagctttgataactcattgttagtaactgtcaagattcagcatgatcatgcaattcagagttcatatcgatggaggtatgtcaataagtcaaggtaaccttaaagcacgtgtagaaaagagaacttatttgtagtttaaaacaattttccaatgcaattacaatgacgctcttggaaaagataaatattacttatataaaaaattacatgaatttaaaaaagtttgccttaaaacaccaaataaaaagagactggaaaaaataaaaaaagattgtgacaatatagcagttacatttgagttgtgtacttccccttttgtcatgcatctatattttaaaatataacttaaaaataatgttatttgtctttggtggagtcctcatatttagtttttaattgtagagcatacacatgggaaataacactcaaaatacattattgaacagaaataaactcttccaggttagggtacaagctttggagtcactttttaatatttctgttctatgtgaaattaggaaccatatttaactttccatgtgttaatttcttttttcagatagtaggaaattgagtaacactcaacaaccttatacattattgggttaccttacttctcccaaggcataggtaagtagagatatttttgatgaaaaatttgggacaccttttaaagatttggagtttgcaaaagaaaaaaagaaaacttatatcatggggttgttgtaggatacaaagtaatctataggtattacttcacttgaagaaaagtacataaatgctcaaaaatggtatctgtcaatacaattggctcacttcattcttaaaaatatcttattatatcaatacacaaacttaattttctcttcatgaattactaaagggagagaattacatagtgttaaaatgttaataaattcaggaacttagactcatctgacactagatcatcttgacctgtgggcctcattttgctggtgttttaggtttacacacgtccccagccaccgtttcagggcttccttgacctcactgttcctcacactgtagatgaggggatttagtaaaggggtgaacatagtatagaaggctgacacaaccttatcgtggttagtggacctgtgggatttgggtctcatataggtaaaaatgccagctccataaaagagtcccaccacagccacatgtgaagagcaggtggcaaaggccttcttgcgggcttctgtagagcgcatgagcagaacagcagcgaggatgagaccataggaggacaggatgagggaaaaggggaccaggagcattaacacacagcagatgtacatggcgttttcgaagactgaagtgtcagcacaagccaaacgcaccaacacgggggcctcgcagaagaagtgatcgatctcgtgtgcaccgcaatatgggaagctcagggtagcaacagcctgcaggaggccgtcagctgcacccaggagccaggacgacatggtcatcctcaggcacagctgccagctcatgagagtgggatatcggagtgggtggcagacagccgcatagcggtcataggccatggctgctaagaggaagcactctccaccacccagtgtggggaggaagaagatctgcacaccacagccagcgcgggagatggccttatttccggtcaagtagtcagccgccattttgggcacagtggtggaaaccagcatcatgtccatgagggaaagttggctcaggaggaagtacatgggcctgtggagccggtggtcccagtgaatcaggagaatcatgagggcattgctaaacagggaggtcaaaacggtggccagaagcatcatgaagaggacttggtgggctctggtgtggttaaagagtcctaggagaataaaatctggggtagtatttctcatctccataatttcccctggtgtgatggtgcaaatggaaaaatagagaaagaagaggcttttatggtctgaataactgtttgactgcacagtttctggacatatgtactggatatgttatcccaggtcgtgattcaaagccctgactcccagtaggcacagcttttcctgacctggcattcacttctctatagctcaactttttaatgttctaactgagatcatgtactacaaacaggagtatatttacagatcaaaatgaataaaaattttttttttagttttgttatttttttaattatactttaagttttagggtacatgtgcacaatgtgcaggttagttacatatgtatacatgtgacatgctggtgcgctgcacccactaactcctcatctagcattaggtgtatctcccagtgctatccctcccccctcccccaaccccacaacagtcccgagagtgtgatgttccccttcctgtgtccatgtgttctcattgttcagttcccacctatgagtgagaatacccggtgtttggttttttgtccttgcaatagtttactgagaatgatgatttccaatttcatccatgtctctacaaaggacatgaactcatccttttttatggctgcatagtattccatggtgtatatgtgccacattttcttaatccagtctatcattgttggacatttgggttggttccaagtctttgctattgtgaatagtgccgcaataaacatatgtgtgcatgtttctttatagcaccatgatttatagacctttgggtatatacccagtaatgggatggctgggtcaaatggtatttctagttctagatccctgaggaattgccacactaacttccacaatggttgaacgagtttacagccccaccaacagtgtaaaagtgttcctatttctccacatcctctccagcacctgttgtttcctgactttttaatgattgccattctaactggtgtgagatgatatctcattgtggttttgatttgcatttctctgatggccagtgatggtgagcattttttcatgtgttttttggctgcataaatgtcttcttttgagaagtgtctgttcatgtccttcgcccactttttgatggggttgtttgttttttctcgtaaatttgtttgagttcattgtagattctggatattagccctttgtcagatgagcaggttgcgaaaattttctcccattttgtgggttgcctgtcactctgatggtagtttcttttgctgtgcagaagctctttagtttacttagatcccatttgtcaattttgtcttttgttgccattgcttttggtgttttagacatgaagtccttgcccgtgcctatgtcctcaatggtaacgcctaggttttcttctagggtttttatggttttaggtctaacgtttaagtctttaatccatcttgaattgatttttgtataaggtgtaaggaagggatccagcttcagctttctacatatggctagccagttttcccagcaccatttattaaatagggaatcctctccccattgcttgtttttctcaggttggtcaaagatcagatagttgtagatatgcagcgttatttctgagggctctgttctgttccattgatctatatctctgttttggtaccagtaccttgctgttttggttactgtagccttgtagtatagtttgaagtcaggtagcgtgatgcctccagctttgttcttttcgcttaggattgacttggtgatgtgggctcttttttggttccatatgaactttaaagtagttttttccaattctgtgaagaaagtcattggtaccttgatggggatggcattgaatctataaattaccttgggcagtatggccattttcacgatattgattcttcctacccatgagcatggaatgttcttccatttgtttgtaacctcttttatttcattgagcagtggtttgcagttctccttaaagaggtccttcacgtcccttgta

SEQ ID NO: 1502 - DNA, 4001 bp, Homo sapiens
ggaatatattggactccatgtgaataaaggcagggcaagtatttaatttcagaggtaagtgataacattcataaaatgtaactaagaacatggaaccaaaaatagtatcaccttcctaaatgttttctaataaaattgctacacatttagcactagaaaatattttacttgtattgaatgtttgaaattaagtcatcaaggaggtggcaaatgctccttccaatttccattcaaaagttggtcagcaatacagacagacaggcaggactcatgatcacaggttaacaatagagacaggcaggactcaatcacgtgttagcaatacagacaggcaggacccatgatcacacgttagcaatacagacaggcaggacccatgatcacacgttagcaatacagacaggcaggactcatggtcacacgttagcaatacagacaggcaggactcatggtcacacattagcaatatagacaggaaggactcacgatcacacgttagcaatacagacacagaaggactcatcacacgttagcaatacagacaggcaggactcatgatcacacgtcagcaatacaggcaggcaggactcatgatcacacgttagcaatacagacaggaaggactcatggtcacatgttaacatgggcacttccaagagctgcttggcgtgccatgaatggtttgtagggctacttgactgagaatgccctctggaaatgtttgtgaatccagttgaacaaagttgactaatgcggagatgctcaccaacttcgctactgttcctaagtaatccttgcaacaggatgattttgcctgttaattttgaattgctgaaagtgacactgaacattcttcagaaccaataccatattttctgtaatagctgcgttattggccgcagcaccgcagatgtttgcgctagtccttgctagtccttcctgatcagtcaccacccctgatgctctgggagtccccgctaatccttcccgatcacagtcaccactctgatgctgtgggagtccctgctagcccttcctgatcacagtcgccaccctgatgctctgggaggaaccacatctccctagtactttcctcagagctgcagccacatctttattcctcaagctgtagatgagtgggttgagcatgggggtgaggatggtgtagaaggcagacaccactttatctttctctggagtgtggtaggagtggggcagcacgttggtgtagaaggctgccccgtagaaaacgctcaccaccataatgtgggaggaacacgtagcaaaggctttgcgccggccctcagcagagttcatcctgtggacagtcaggaggatgtgcgtgtaggagacagagatgacagatagagggataagcagcatcagcacgcagcaggcatacatcagggtctcatagagtgacgtgtctgtgcaagacaacttcagcacggctgggatctcacagaaaaagtgattgatctctcgggatctacagaaggggaaactcatagtgacaggagtcagcatgaacccatccaaggaaccaccaacccaggagccgaccaccatgaataagcaaaccctgcggttcatgaggagagggtaccgtagagggttgcacacagccacatagcggtcataggccatgagacccagcaggaagaattcccctccaatcagggtcaggtagaggaagatctgaactgcacagcccaggaaggaaatggtcttgtccttggacaggaggtcctggagcatcttggggacagtgatacagatgtagatggtatccatgatggagagctggctgagcaagaagtacatgggtgtgtggaggcgggagtccatgtggatgagcagaatcatgaccaagttggctgttatagccaccacaaagatggagaagactattgcaaagagaagcccggggaaggcaggatgggtgatgaggcctgtgaggacgaagttagtggagttctggagaagaccctccatgcccatggtccatgacaagctccttgggctgtaaaggcagaaatctggcagcttatttaacgacctgatatgtaggaagagcccaccaggaatagtatgtcagaagcagcgtgagatcaagaaaagatcacctacttcaggatcatttgaaatcctgggtttcagtattaatgatctgtatgatattggacagaaaattaatctcaactcaatttcatcatctgtgaaaggtcatcatagttctgtactctacaggctggatgtgagatgtaaatgtaattcatacagtacctggtttagaatctgatttttactttgaactatcttctgaatacatttcataatcttatcacttttagattgaaagttttctgagggtggttactgtgccttatttcccatttcgcctagcgaaatgatttgaatttaaattgctctctgcatctccatcgagatgattgtactagagtcatccacagacgtctatttgtgacttaaattgatagaaaacatctagataactgacttttttggctgctgttgttactgaacagctttatgaaagtcaggaacatcaaagcagtacagatgacctcatttggggtcaggagccacactgtcttgtggttagacttttgtcctgcaaaaggagttcatcttttaggcatggactgctgtgagaacttgtgtctatttgttctcacagaataatttggggatcataaatctggcaggacaaccaccacaaactgcttcagaacagggctttagtttcgttatcctggtggtctttccagttgacaatgaattctgctaaaatttagatgctgcatcatagaattcaatcatgacctcatcttaaaatattgtttagccaaaatgttagagtttctctgacagagtggcatcctgaacctgtcctaatattatatcatcctagtaatccactgctacttgggttttttcctcaagtttatttctctaccattttactgatccttcatgtttataagtaaaaataactacagtcgggtgcagtggctcccacccgtgatcctagcactttgggtggccgaggcaggcagatcacttgaggtcaggacttcgagaccagcctggccaacatggtgaaacctcatctctactaaaaatacaaagattaatcgggcatggtggcaggtgcctgtacaatcccagctactcaggaggctgaggaaggagaatcgcttgaacttgagaggcggaggttgcagtgagctgagatcgtgccattgcactccagcctgggggacaagagtaagactttgtctcaaaaaacaaaacaagaaaacaaaaactatagatggtaaagaaatttctgaactcagacgcgacacagcagtatcaaacattccttgaatcaatggaatgaattctcatgcttttttgagtaatatgaatgtgtgtcccttttatatgttcaggaatactgagggatgaatttttctttattagattatggtgtatttcttctcattttagtgacaggattactgaagaaacttgttttctgtcaaacgttttggccaccaatactacaaatgtatctgaatcttttggttctagaatagtcaaaatttacagtccctgaagcatcaaggaataaactctccttatgttgaagcaaaaacaatagcaacagtagagttttccttcttagtgctcagagatggagatatgagtaataggcctaaaagatgaataaacatccaaagggagaaagaaaaaaaagcaatttttgtgttggtctgtgctgaaacttcagtttgtcacaccttggttgaggagaaaaaaatacatgagcatcaaatattaactcctgtcaagcgtgataaaagtcagctacttttgccttctctaacaggtgaaagattttcttgtgatagccacagcttcgaatcatgggtcaagagactatttaaatatacaattccatttgcagtggcttttgcaatagcttgttggaa

SEQ ID NO: 1503 - DNA, 4001 bp, Homo sapiens
gttccacatggctggggaggcctcacagccaatggtggaaggtgaaggagaagcaaaggcatgtcttacatggcagcaggcaagactcatgtgcaggggaaccaccctttgtaaaaccatcagatctcgtgagacttattcatcatgagaacagcatgggaaaaacccacccccaggattcaattaactcccaccaggcccctcccactacacatggggattataggagctacaattcaagatgatatttgggtggggaaacagccaaaccattatcagagacacattctaataagttcttaactggaggttctggcaagaaaaaaagatatgctgagattgccaagatctacagtaagaatgaatcttctttgaaattgtgtaggaggaaaaacacatttgtggtaattttgctgtcacacctcaaactgcaaaacctacagccacagtgtgtgataagtgcttaggtaagaaagaaaatgtattacatttatggtagaagatgagcaaatatgttgtgactgacagcagtcaggttctatagttctatactatggtttcaggcttcccccaaaaaagacttagaacacagcctgaggataagatggtgactgctatatttgaaatatgataaatatttgagttgattctttataatggtcaatggacagactgtctaaaggggaaaagtcgagagaagtcagggaagtagttgaagatgaccgtttttgtcatgactgagcagagccagaaacaggctactccatgatttttagtggaatacacaccttgttaagagctcatgggtgactactaaacctcaactttatgcctaccccagcccaaactgttcattgttcagagccttcatacctttcaaaaaaatgaaatccttaaaatcccaggcagctttccaaatcccataaatgccccacagttggtggcatgtgggtcacttgtttccaggcagagaatatttaaattcaagggcaatgataaagtcttgtatccttcatttcaagtctctagcagcatatgaaatttctttagaaagtggttacctttcctgaggacacacacctccccacaaccttctgtagggcccctgtgacatccttgttcctaaggctgtaaatgagtggattgagcatgggagtaaggatggtgtagaaggcagatacagctttgtcctgctcaggggtgtggtaagaatgaggcagcacgtatgtgtacatggcagccccatagaagaggctgacaaccaccatgtgtgaggagcaggtggccacagcctttcccctcccctctgcctcgctcatcctataaacagtaatgagaattcttgtgtaagagcccgagatgacagagaaagggatgaggagcatcataatacagcagacatacatggctgtctcgtaggctgatgtgtccgtgcaggagagcttcagaagggcaggcacctcgcagaagaagtggttgatctcccgagaggcacagaaggggaactgcatggtgacgggggtgagcaagaaaccatcgatagaccctcccagccaggctgccgccacaatcaaccagcagatcttgcggctcatgaggacaggatagtgcagagggttgcagatggctacgtagcgatcataggacatgagtcctaggaggaagaactcagcccctgctaaggtcaagtagaggaagtgttgggcagtgcatccagcaaaggaaatggctctctggctcatcacctggtcgaccagcattttgggcacaatggtggaaatatacaggatgtccctgagggagagctggctgagcaggaagtacatgggggtgtggaggcgggagtctatgtggatgagaatgatcttgaccacgttgctggctatggaggtcaaaaagaccaggagaatgagggcaaagagaagccaggggaaacgggcgttgctgaacaaacccagaaggataaagtcggcatacacggaataattgctctgctccatagctctgtagggtacacaaaagagatatgacaaagttggaaaggtatctgatttacataaaacattatgatgtagtcatgaacaaaccaaggtcaagtcgatcttatttcttgaagctcataatttccctgagagaactgcctgagcaggattgtgctacatctcattataccatcattgttcatttaaggattttcttgatttggtgattactatttagagttcatgatcaaacaatctttttgttcatgaccatttatttctgtctttcgagtaccaccttacattggtgaggatgcatataagacataagaatggaaccagcctgattcaataggatagggtggtggggaggaaaggaggattgtccacatcctacactgctctccttatactagactctaagttctcacacttagaatccagtttgaagatcaccacgagtatatatttgcctatggaagaataactgcattatttgacctaatttacaccattcttgacacacttgtacattgtaaaatgagtactcaacttacatgtatcaggtggagtattgcagaatgagcctgtgttgaataaaaagagctgagttctgagaagtcatccaagaattcataggaggaaaaatcatgggagaaaacgttgagggtcaagtggtgtttgctttccttcttgcagcagcaaactaccaattattaacatacaactcgttaaagtgttagaatcccatttaacttatgaaaaaataaactagtttaagtattagacctagtgtatcccaaaaagaagggatctctcatacttgaagttagattctgcatatgtatccatatcagttaaatattttaccacaatttaggaacacttgagttatttggatagcttctccctgcatcatatagatctgcactatccagggtggtagccatgaggcttatgaagctgtggagcccctgaaacacgactgctccaaatcaagatgtgccatgagcacaaagttaattcaaacacctgttaaaaatatatgcaacacatctccttaaaactttatattatggtaacttttagatatatttggataatatagattaaaattagtttcacctattttttacatttttaatgtggttactagaaaatttagaattctctgtggctcccctaggatttctactaggcagcactggtctagagttatccctgagaatatgacagctccaaataccttcatccaaacaagtcctccagagttaaacacaccacaaattagaattgagccaaaaaatttaggtgtgtaccaaattagaaaaatggctttacttgtatatgcattcaccctcaaatagcagtaagaacattaataagtgattcgtaaattttacgtttccaaacaactttgtaagatactagaccattctacagttgaaaattaggcttaaggaaacttccccaaggaggaacattgttctttaaacagtgacagtgtaattgttctatgctgttttccaacaggacaaagtagacatcaattcattccataaatatttctcaagaggcacattgggtaagccaaagtttgatattctgaaaggccctgaaagaatgtaagacatcatctgtcttcgagcctagaattgaggcacatgaacgtgtgttgtgtgaccacaggtgcactttcagaatggttttaagacctcagcaggtttgacttatttggtatgtgaacaaaggacaataaaaatgatggaagctgcagcccactggctggtagacaggaacttcacaccagggcccctcagtacaattccaccacaaccatgccacagtggatggatggaaaacgatgaaaattcagatttttactgatgaaacccacattatatccttatgcatttttcagttctcattcttgaaatattaccagctttatgccagagctttccatcagctgatttataatgtatctttattattttaaaaactgttaaaccagtggga

SEQ ID NO: 1504 - DNA, 4001 bp, Homo sapiens
tagtgtgtccttatgagctgcacccttcacacgagtatcaaaacagcttatttattttcttacatttgtttgcataaacaactacatgtatttttcaaactccttggtaaaagccatgtgctattcaaaatttaatcttatttaactatttttaattataaaatagtacaaaatgcttgttaaataaatgaaggattgaatgttgatgccatccctctgcttgtttgtataacaagttacatgtttgaaatctcagctcaggaatcaccctgggcaggtaaccttccttaaaactccttccactcaggtgtcatattttttctgcagtcacttatgtggtcctacatcctcaatacaccacatggcagtaattatttcggagagataaatccactagacgccatcagaattggaccatgcagaaaaatgtagccctcaataaagaaggggcgatgactggattttctcggtaatgattagatataatgaaatgagcatgatttctaagatgtcacactgccaccaagcagaaaggagaatattttcaaaaagggagaaaagcctggtatttaattatttgtaaatgatttcaacttcacaaaaatcattaaaaaacaatagtacaattaatacctatataccctttacccatactcatgtgtggcagcaacattgaactcagtttgtttcattgcccctctctatctccctccctctttccctctcatcatttgaacacctcatgacctttttgtctctaaatattaagtatttcctgaggttaagaatattttttcacaaaattagagaacagttatcaacttccaaaaatgttacattagtataacacaattgtaaaagaattttggatggacaaagactataaaatagagtttccacacagtgaaagaattcctcaaaatgagatgaatatgagatgaggcatcattgtatgagagtctaaggaataacagggataaaatcctaagtatctgatgggtagagaaaaggaaaataaatctttatatccaaatttcctactttataatttcctaaaggacgaatctcacagttaacattttcttcagagcccccatgacatccttattcctaagactatagattaaagggttcagcaccggagtgaggatggtatagaagacagataccatcatgtccttctcaggggtgtggtaggagctggggagcatgtaggtgtagacggcagccccatagaagaggatgaccacagtcaggtgggaggagcaggtggcaaaggcctttttccggccctctgctgagttcatcctgtggacggtgaggaggatgagtaaataggagcttgaaatgatcgtcacagggatgaggagcatgaggacacagcataggtacatgagggtctcatagagtgaggtgtctgagcaggacaggatcgttacagcagggacttcacagaagaaatgatgaatctcccaggatctgcagaaggggaagctcatggtgatgggagtgagcatgaagccatccactgagcccaggaaccagcagcccgatgccaggaaaagacagaccctatggttcatgaggacagggtaacggagaggatggcagatggccacgtagcggtcataggccatggtggctagaaggaaaaattccgaacctgctagtgtcagatagaggaacatctgcatcccacactcaggggctgagaccttattcacacccatgacctggtccaggagcatcttgggcacagtgacagaaatgtacgccatgtccatgagagacaattgactgatgaaaaagtacatggggctgtggaggtgggcgtcacagtgtatcagaaggatcaggacagcatttccagacaacgccttcaggaaaaccacaaagatgaccacactaagtagagctggatgtttggattgtctgaagagtcccatgaggatgaaatccaaccttccagtgtggttggccatcctggtgatgttggccatgaggtttcacctaggccaccaaggagagttttggagtcagtgtaacgcgtccctttgtaatgagtgtttagtgagtactcacatttgtgtatgctcattgtgctaacctgagtcccgtgggtctggggatttgagtatataaatgacatataacaaattcacaaaacaaactaagaattcacaactataggccagaagaattggtaactgatagtaaggttgtcacggttcaaattcataaactttcctgatgataatgccatttatcaacaagtactgaaaatttgcagaacctccctcctctgctaacacaaacagtgactcattgaaagaaagataaagcaaactccttattgtagagtttttgtcatagacagctgaattgaatcaacatcgctggtttaagaaacaataggcatcttcaaaatactcagaggtatatatgatataagaaagatttagcaagtaactaaagcgtaacttggaaaaaaaattatgccagatgtttgaacctcctcctcccataggatcaggccatgctgtgaggctctgtgattgcgtggagcgagcctcacattctcatgagcagggaagggtcctcacacacagctgaccctttagacatcgagagacgtgaagtgaggagcccacacacagtagactccagctatgggtccacctttttctctgtctgccattcctttctccaatctacatcaaaaaggataaaaatcatgtttgagctcaggtgtggtgagggtaaaatgaggaaatgtaatgaaagtgcttagaatagtacagtttccgatgaataaacacatatactcttagtgtagatgttaactctttaagctaactattctgcacaacctacctaagagattgttgctactattattatataagatatattacttccattctccagattcagtacctattcatacatttaagaagctgactttcaaaataaaaatggcagaagttctgcaaaataaagcatatgacccactttaaaaaaaaacaatttggattttatatttgtgtgtttatgtgtaaatactctggttttatataaatatatataatatatttatgtaaacatacacaggtgaatatataactataacatttcttattttaaccctggttatgcagagctttttggagactcctatgtccttcctgcctagtatgtggtcctccaacctcatctccttaaagctcctctcattttaaagctcattaaatctcagcgaggaagaactagaatttggagggtcactgctgtttatcagacaaggctttagttgtttttgcaaacctcatgtgctttattacttgccacaatcaatctttcatacaaactgagaagcagggaggaaaatcaaacaacactgaggcatctgacttcaactcactgtttctccctctaccgtgacactcacagcctgtgttatactgacgatgaatcgcctctgacttcaactcactgtttccttctctatcatgatactcacagcctctgtgttatatgcagaagatgaatcaaagaaaaattgaacttgagtgcacttaaggaggtcacagtcagtctattcagggaacaactattatgtaaatgtgatttgaagttgaatttttaaatagttacaaaataaataagggcaatagacacaaaatatatctggccgttctgaaataatccataatagctgtttccacattttctctgaaagaaattaaaactttccaacttttcaacttctgacatattaaatgttaaattttgagagcccttgccaagaataaggacataataactcctctttctgggaagactttagctgtgattatgatgcagggacattttggaatgaatttacaagtttcaaatatattttgtattcttgtagtaattacaaaaagtatttaagacattcaactcaccaaaacttccaacattctgggatgcttcggtgctttaatataaatatccaa

SEQ ID NO: 1505 - DNA, 4001 bp, Homo sapiens
cttccattcattgtcggtaaatcaggcaaggtcagggctgtgccaaggggaagtaaattaacagcttcacgatacagctcgagattcagcttcttgcatattagaacaaatgtatttctttcctaatttctcacgttccagaaatactagacccatgaattattttgttaatgaaaatgatagtgatctgatgctcatagatttacagaagttacctttgtagcatgatatacatctggcaaactaaaggttagtgacaagtttataaccattttgctggttttcccagtttcagaagaaacatgctgagggggttaagctttcctaagtctccattatcgcacgcgactgttatgatatttattgtaaacatagtagaccattgtctggaatagactaaatcctaaagaaactaaatctggaactacttttatttacatactatgaaatagatgaacctattctttgaattttgaaatggattcatttttggtttaggtggttccaatggccaatgctaaaactactggtgtttacactacaaagttcacttcagcctttggagaaaatgcgtttctttgtacttactgagatacaatagcagaaacactgaccccagtggctgccaatgtgaaccgaggtttacaatgtattgcaaagggagggagcagccaatactcctcctctagggctctgctaggattctaagtctttacaatgagtctcttcgaggggtaaagtgtttaagaccaagtctcatactaaaatgctcaatgaacctgggatgggagataagataaaaggcactctataaggtctttcataggtcagctactgcagtgcagttaaaaacactctaaagatattaaatctaatgagataaatgggagcaataagcagtatggagggaaaacgccacgtataagaaagaaggaaaatatgagtgggctttgtgctggggacccggagacctgagggcaaaagagaggagagatagggagtaacggaattatagaaagaggaggggacaatgcttgccctttactacttttcttggttcattcttgactgcatcatgctcctcagagccctggtgacatctttgttgcggagactgtaaatgagggggttcagcacaggagtgaagatggtgtaaaaggcagacaccatcatgtcctgctcagctgtgtggtaggaactcgggagcatgtaggtgtagaaggaagcaccgaagagcagcagcactatgatcatgtgggaggagcaggtggccaaggccttcctgtggccggcggcagaattcatcctgtggatgagatgcaggatgagggtgtatgagctggagatgaccatgatgggggcgagaagcatgaggatgcagcacaggtacatgagcgtcttatagagggagacgtcagagcaggagagcttcagcagggcaggagtctcacagaaaaaactcaggattttcctagactggcaaaaggggaagctcatggtaatgggggtgagcaacaaaccatcaaccattcccaaaacccagcaggctgacaccaggagctggcacaccctctggttcatcagcagtgggtaatggagaggtctgcaaacagcagcatatcggtcataggccatggcagccaggaggaaaacctcagctccagccagggtcaggtagaagaacatctggatcccacagcctgacggggaaatggtatcatctccagtgacctggcccacaagcatcttgggcacagtcacgcataggtacatgagatccatgagcgcgagctggctgatgaagaagtacatgggggtgtggaggcggggctctgagtggatgaggaggatgaggagggcattcccagtgagggccatcaagaaaagaaggaaggtcacggtgtagaggagggcagcatgcttgctctcagcaaagagtcccgtgagggtgaaatcagtgcttgctgtttgattctgagaagtctgattccctgagcacatgactggctcagtttccccctgaggaaaaaaaagtcattaattttaaatctttcctatgtacatggctttcctgacctttttctggtaagacatgtgctttgaattatttttctaaatattgatttaaactgacataaaatcataagttcaaatcttaggtcaagttgtatcttggccacaagctaaagtgaactacgaaacagatctggggaggtgactattcatgagctaagtcaagagtgaagacaggtacactctatgtcttatttccccccagaattaagaacacaagtatactggccttgtgggatggttagagactgaagtagggaatgcacgttaggtctgtaacacagtgttagtgttgggttgaaattttcactactttttggatacagtagctcatccaggactcagtgatggaaatcacggctgataaggttaatattaatattgttaatggtacaaatatcataactaataccatgaaataatctgaaaactggaaatctccttaaatttcttctaccattatatatctccatttaagtccactttcctcacgaaaacttttcaatttattctgctattcctcacaaggttgcattccataagtagtgctgactggggcagaggagcagagggagagtcccgcctgcctgaggagagtagcttggggtgcagaactagtgccgagcaggagagcagcagtaggcacagtgagccctctcccagtccccagtgaaatctaaggcatttaatttattaactgtcaggcagagaaatatttttacaagaaatcacagcaataaatgctgcagatgccctaaatatcaagtatttagttgaaatataaacaaaatatttattttcattttgctgataccatttatcccccaaaaatcatgcctaaaatgtccaaaattccgttcatagtgattgaaaaatgaagttaaagcacatgaggcagttgtgttgaatctttcataaaaccgcagccctgcaaccaagcctagggatcctcttgtcctgcatctcctttgcataacaaactaatcaccatcccctcccataaattcatagctttgctcagtgactgctttgtctgaatatttcagttttaattttccagttgcattgttttaatcatgcttgatacaattgtctcaaagttaaaaagcccactaacttctagactaatgaagagtcaggagctccatgactgaggtttggtcatcctcagggttgctgtactgcaggttagagaaataatgctgaggaaaaaactaatagtgactgaggcatgtggaaatgcaaagtgaaatacaacgcactgttcctagggcaaaaaaacaaaaaaacaaaacaaaaacaaagcacacacacaaaacaagagacaaaacaaaaaaaaaccctgggacttcaggaaacctaaagtcagaattatgaagagctagcaacaagagtcaggtatctttgttccttacttatcccctttataaagcactgaagagacaggtcatcaagacacctttcaacaaagagacgaacacggcacatagagcacaaaccttttgctccatcttttctgttccatcagacaataaatctaagccacgccagctcagtgaagctgctttcaccattctaaggccaaagcaaaggggtttaaattcagaatgaaaatgagaaaattacatcgtcagtttcttcacattagggaattgagatgagtgtttattgcttaattctttgccttgttttcctttttttttttttttttccttcttattcatctttcctgtacttggcattgtctctttcctggagcttctattttctttaagaccctctcagaatccactattttggtatttttgttttcttttgctatttgtttttgatggttatattctaactttccactcacggtccacgtgggaattaaacatgtttttcatttatgcgatgcatctatccaaaagcaaatccatctttct

SEQ ID NO: 1506 - DNA, 4001 bp, Homo sapiens
gatatccagtctctggttacaatttggctttgataaccacagctttctgccatcactatctagcttgtgtctttattaatagaatagtcttctttttttttgttttgcaaaccccagatctttagaaggtgtcccaaatttttcaacagaaatacctctaattacctatgtcttggcagaagtaaggtggtgacacaataatgtataaggttgttgagtgttactcagttttgataattcattgttagtaactgtcaagattcagcatgattatgcaattcagagttcatatcgatggaggtatgtcaataagtcaaggtaaccttaaagcaggtgtagaaaacagaacttagttgtagtttaaaacaattttccaattcaattacaatgaggccctggaaaaaaaaatacttaaatgaaaggttacataaattaaaaaaggcttacgtttaaacaccaaatagactgttgaaaaaatacaaaaaaattgtggcaatatagcagttacatttgagttgtggactttcccttttgtcatgcatctatattttaaaatataacataaaaataatatttttctttggtggagtcctcatatttagtttttaattgtagagcatacacctatgaaataacactcaaaatacattattgaacagaaataaactattccaggttaaggaacaagctctggagtcacttcttattatttccgtgctgtgtgaaattgggaacaatatttacctttccatgcattaatttctttttttagaaagtaggagatattgtcaacagtacttatatcatggggttgttgtaggatacaaagtaatccatagatactacttcacttgaagaaaagtacataaatgctaaaaatggtatctctcaatacaattagctcacttaattcttaaaaatatcctattatatcaatgcaaaaacttaattttctctgcatgaattgctaaagggagagaataacaatgtgttaaaatattaataaattcaggaacttagactcatttgacattagatcatcttgacctgtgggcctcattttgctggtgttttatgtttacacacgtccccagccaccgtttcagggctcccttcacctcactgttcttcacactgtagatgagggggtttagtaaaggggtgaacatagtatagaaggctgacacaaccttgtcatggttagtggacctatgggatttgggtctcatataggtaaaaatggcagctccataaaagagtcccaccacagccacatgtgaagagcaggtggcaaaggccttcttgcgggcttctgtagagcgcatgtgcagaacagcagcgaggatgagaccataggaggacaggatgagggaaaaggggaccaggagcattaacacacagcagatgtacatggcgttttcgaagactgaagtgtcagcacaagccaaacgcaccagcacgggggtctcgcagaagaagtgatcgatctcgtgtgcaccacaatatgggaagctcagggtaacaacagcctgcaggagcccgtcagctgcacccaggagccaacacgacatggtcatcctcaggcacagctgccagctcatgagagtgggatatcggagtgggtggcagacagccgcatagcggtcataggccatggctgctaagaggaagcactctccaccacccagtgtggggaggaagaagatctgcacaccacagccagcgcgggagatggccttacttccggtcaagtagtcagccgccattttgggcacagtggtggaaaccagcatcatgtccatgagggaaagttggctcaggaggaagtacatgggcgtgtggagccggtggtcccagtgaatcaggagaatcatgagggaattgccaaacagggaggtcaaaacgatactcagaaccatcatgaagaggacttggtgggctctggtgtggttaaagagtcctaggagaataaaatctggggtagtatttctcatctccataatttcccctggtgtgatggtgcaaatggaaaaatagagaaggaagaggcttttatggtctgaataactgtttgactgcacagtttccggacatacgtactgggtatgttatcccaggtagtgattcaaagccctaactcccagtgagcatggcttttcctgacctggcattcacttctctgtagctcaactttttaatgttttaactgagatcgtgtactacaaacaggagtatatttacagatcaaaatgaataaaaatattttttcaactctcaagaattagtggtaaagtgttatgatttttatattactcgtattaatattattgtgtttttgttatgtatactgatggaaaaaggaaggaaacactgacttaaaagtgtctcatttagatttgagtcacagtttatttatattcaacttttggaaacccaaacatattcaagataggtcttttaaaaactaaacaagaagttacagttgctttattttaggttacacaaggaccacataatggaatatgtgagtgtaaataaaacattttttcctttgaagaacaataatatctcacacaactgatgaaatttttttccttcctcccactacataccttcttagttgtcttactgttaaatgcagtcattctagtttacctcctcctgctttgaaacctttagcatctgcccttcactcttcaaataaaattcagaattctatcccacacttacagtggcttgtagacatgcctcacacaacattttgccatgcagtatactgccatggagacctagaaaggctgggtgaatatgagagggaagcatgagagaatctttgatattgataaatgctgggggagagtagtagtaactataatgagtaagtagtacttcgagtaagaaaaggataggaaacagcttaaaaatggttgagtgttgctattggtcacagacaagttatcgaaaagatttgcaaattaaaaagccactattattgtaaatacttaaattgatatttggcctgtctgtttcagatttttaaaatatttaacaaaatcgatttattttcttaggagacacaatcaaagtaactgagctaacaaaaatgtgtacaacttcatttagaaagcttttgcaggttgaggactgttacatattgaacataaaaaaaagttttttagtgtttaccatttttaaactccatacaaagaagagaacttgtcaactcataaagagaagagcacaaagaggcaaagagctaatttcccacttttattcatagaatattcgcaaatgtcatgcctttgtatatttgcaggattttagacctcatctcatacacagatggtctcattcagggccttcagaaaggcagtgccaatgactggttaaattactacatccactatatgagcattcagatgtgagcagacacaaacacacagtaacaccagcgtctttgagatggcttatttaagcattggctatcagggaaataaacaaagattataggacaataaaacaggcaaaataggcaaagacactacatgtgccaagcctgtgccaagccttgttggttgcattactgtcttcctatgtagtgtatgcagtccctttattttacatactatttaaagtatctttctcatgtgattgccacagcccactgactccttgaccacaggcttccactgcctccattataactttaaaccaccatcagactccttttattaatgcagaatgcatggataaaggagggcaggacttgatattaaaaagtccttgtttaaaaatcactgttgtccaaaccaccatcgcgcgtgtatacctgtgtaatgaacctgcatgtttggcacatgtatcccagaactcagagtaaaataaaatagaataataaaatagagtgtgcagagaagcaccaaaaaaaaaaaaatcacctgtgtctagtcagctttttccagattacagtaggtgtaccattgctggtatgtgtcatgatt

SEQ ID NO: 1507 - DNA, 4001 bp, Homo sapiens
attcattgtcggtaaatcaggcatggtcagggctgtgccaaggggaagtaaattaacagcttcacgatacagctcgagattcagcttcttgcatattaattagaacaaatgtatttctttcctaatttctcacgttccagaaatactacacccatgaattattttgttaatgaaaatgatagtgatctgatgctcatagatttacagaagttacgtttgtagcatgatatacatctggcaaactaaaggttagtgacaagtttataaccattttgctggttttcccagtttcagaagaaacatgccgagggggttaagctttcctaagtctccattatcgcacgcgactgttatgatatttattgtaaacatagtagaccattgtctggaatagactaaatcctaaagaaactaaatctggaactacttttatttacatactatgaaatagatgaacctattctttgaattttgaaatggattcatttttggtttaggtggttccaatggccaatgctaaaactactggtgtttacactacaaagttcacttcagcctttggagaaaatgcgtttctttgtacttactgagatacaatagcagaaacactgaccccagtggctgccaatgtgaaccgaggtttacaatgtattgcaaagggagggagcagccaatactcctcctctagggctctgctaggattctaagtctttacaatgagtctcttcgaggggtaaagtgtttaagaccaagtctcatactaaaatgctcaatgaacctgggatgggagataagataaaaggcactctataaggtctttcataggtcagctactgcagtgcagttaaaaacactctaaagatattaaatctaatgagataaatgggagcaataagcagtatggagggaaaacgccacgtataagaaagaaggaaaatatgagtgggctttgtgctggggacccggagacctgagggcaaaagagaggagagatagggagtaacggaattatagaaagaggaggggacaatgcttgtcctttactacttttcttggttcattcttgactgcatcatgctcctcagagccctggtgacatctttgttgcggagactgtaaatgagggggttcagcacaggagtgaagatggtgtaaaaggcagacaccatcatgtcctgctcagctgtgtggtaggaactccggagcatgtaggtgtagaaggaagcaccgaagagcagcagcactatgatcatgtgggaggagcaggtggccaaggccttcctgcggccggcggcagaattcatcctgtggatgagatgcaggatgagggtgtatgagctggagatgaccatgatgggggtgagaagcatgaggatgcagcacaggtacgtgagcatcttatagagggagacgtcagagcaggagagcttcagcagggcaggagtctcacagaaaaaactcaggattttcctagactggcaaaaggggaagctcatggtaatgggggtgagcaacaaaccatcaaccattcccaaaacccagcaggctgacaccaggagctggcacaccctctggttcatcagcagtgggtaatggagaggtctgcaaacagcagcatatcggtcataggccatggcagccaggaggaaaacctcagctccagccagggtcaggtggaagaacatctggatcccacagcctgacggggaaatggtatcatctccagtgacctggcccacaagcatcttgggcacagtcacgcataggtacatgagatccatgagcgcgagctggctgatgaagaagtacatgggggtgtggaggcggggctctgagtggatgaggaggatgaggagggcattcccagtgagggccatcaagaaaagaaggaaggtcacggtgtagaggagggcagcatgcttgctctcagcaaagagtcccgtgagggtgaaatcagtgcttgctgtttgattctgagaagtctgattccctgagcacatgactggctcacagtttccccctgaggaaaaaaaagtcattaattttaaatctttcctatgtacatggctttcctaacctttttctggtaagacatgtgctttgaattatttttctaaatattgagttaaactgacataaaatcataagttcaaatcttaggtcaagtcgcatgttggccacaagctaaagtgaactacgaaacagatctggggaggtgactattcctgagctaagtcaagagtgaagacaggtacactctatgtcttatttccccccagaattaagaacacaagtatactggccttgtgggatggttagagactgaagtagggaatgcacgttaggtctgtaacacagtgttagtgttgggttgagattttcactactttttggatacagtagctcatccaggactcagtgatggaaatcatggctgataaggttaatattaatattgttaatggtacaaatatcataactaataccatgaaataatctgaaaactggaaatctccttaaatttcttctaccattatatatctccatttaagtccactttcctcatgaaaacttttcaatttattctgctattcctcacaaggttgcattccataagtagtgctgactggggcagaggagcagagggagagtcccgcctgcctgaggagagtagcttggagtgcagaacgagtgccgagcaggagagcagcagtaggcacagtgagccctcttcccagtccccagtgaaatctaaggcatttaatttattaactgtcaggcagagaaatatttttacaagaaatcacagcaataaatgctgcagatgccctaaatatcaagtatttatttgaaatataaacaaaatatttattttcaaaatgccatatttatcccccaaaatcatgcctaaaatgtccaaaattccgtgcatggtgattgaaaaatgaagttaaagcacatgaggcagttgtgttgaatctttcataaaaccgcagccctgcaaccaagcctagggatcctcttgtcctgcatctcctttgcataacaaactaatcaccaccccctcccataaattcatagctttgctcagtgactgctttgtctgaatatttcagttttaattttccagttgaattgtttcaatcatgcttgatacaattgtctcaaagttaaaaagcccactaacttctagactaatgaagagtcaggagctccatgactgaggtttggtcatcctcagggttgctgtactgcaggttagagaaataatgctgaggaaaaaactaacagtgactgaggcacgtggaaatgcaaagtgaaatacaacgcactgttcctagggcaaaaaaaaaaaaaaaaaaaaaaaaaaaaacaacaacaaaaacaaaaccatacacacaaaacaagagaccaaaaaaaaaaaacaaaacctgggacttcaggaaacctaaagtcagaattacaaagagctagcaacaagagtcaggtatctttgttccttacttatcccctttataaagcactgaagaaacgggttatcaagacacctttccacaaagagacgaacattgcacatagagcacaaaccatttgctccacctcttctgctccatcagagaataaatctaagccacgccagctcagtgaagctgctttcaccattctaaggccaaagcaaaggggtttaaattcagaatgaaaatgagaaaattacatcatcagtttcttcacattagggaattgagatgagtgtttattgcttaattctttgcaccgttttcccttttttttttctgcttattcatcttccctgtacttggcattgtctcttccctggagcttctactttctttaagaccatctcagaatccattattttggtatttttgttttgttttgctatttgtttttgatagttatattctaactttccagttacagtccacgtggtaattaaacatgtttttcatttatgcgatgcgtctatccaaaagcaaatc

SEQ ID NO: 1508 - DNA, 4001 bp, Homo sapiens
caggaatatattggactccatgtgaataaaggcagggcaagtatttaatttcagaggtaagtgataacattcataaaatgtaactaagaacatggaaccaaaaatagtatcaccttcctaaatgttttctaataaaattgctacacatttagcactagaaaatattttacttgtattgaatgtttgaaattaagtcatcaaggaggtggcaaatgctccttccaatttccattcaaaagttggtcagcaatacagacagacaggcaggactcatgatcacaggttaacaatagagacaggcaggactcaatcacgtgttagcaatacagacaggcaggacccatgatcacacgttagcaatacagacaggcaggacccatgatcacacgttagcaatacagacaggcaggactcatggtcacacgttagcaatacagacaggcaggactcatggtcacacattagcaatatagacaggaaggactcacgatcacacgttagcaatacagacacagaaggactcatcacacgttagcaatacagacaggcaggactcatgatcacacgtcagcaatacaggcaggcaggactcatgatcacacgttagcaatacagacaggaaggactcatggtcacatgttaacatgggcacttccaagagctgcttggcgtgccatgaatggtttgtagggctacttgactgagaatgccctctggaaatgtttgtgaatccagttgaacaaagttgactaatgcggagatgctcaccaacttcgctactgttcctaagtaatccttgcaacaggatgattttgcctgttaattttgaattgctgaaagtgacactgaacattcttcagaaccaataccatattttctgtaatagctgcgttattggccgcagcaccgcagatgtttgcactagtccctgctagtccttcctgatcagtcaccacccctgatgctctgggagtccccgctaatccttcccgatcacagtcaccactctgatactctgggagtccctgctagcccttcctgatcacagtcgccaccctgatgctctgggaggaaccacatctccctagtactttcctcagagctgcagccacatctttattcctcaagctgtagatgagtgggttgagcatgggggtgaggatggtgtagaaggcagacaccactttatctttctctggagtgtggtaggagtggggcagcacgttggtgtagaaggctgccccgtagaaaacgctcaccaccataatgtgggaggaacacgtagcaaaggctttgcgccggccctcagcagagttcatcctgtggacagtcaggaggatgtgcgtgtaggacacagagatgacagatagagggataagcagcatcagcacgcagcaggcatacatcagggtctcatagagtgacgtgtctgtgcaagacaacttcagcacggctgggatctcacagaaaaagtgattgatctctcgggatctacagaaggggaaactcatagtgacaggagtcagcatgaacccatccaaggaaccaccaacccaggagccgaccaccatgaataagcaaaccctgcggttcatgaggagagggtaccgtagagggttgcacacagccacatagcggtcataggccatgagacccagcaggaagaattcccctccaatcagggtcaggtagaagatttgaactgcacagcccaggaaggaaatggtcttgtccttggacaggaggtcctggagcatcttggggacagtgatacagatgtagatggtatccatgatggagagctggctgagcaagaagtacatgggtgtgtggaggcgggagtccatgtggatgagcagaatcatgaccaagttggctgttatagccaccacaaagatggagaagactactgcaaagagaagcccggggaaggcaggatgggtgatgaggcctgtgaggacgaagttagtggagttctggagaagaccctccatgcccatggtccatgacaagctccttgggctgtaaaggcagaaatctggcagcttatttaacgacctgatatgtaggaagagcccaccaggaatagtatgtcagaagcagcgtgagatcaagaaaagatcacctacttcaggatcatttgaaatcctgggtttcagtattaatgatctgtatgatattggacagaaaattaatctctcaactcaatttcatcatctgtgaaaggtcatcatagttctgtactctacaggctggatgtgagatgtaaatgtaattcatacagtacctggtttagaatctgatttttactttgaactatcttctgaatacatttcataatcttatcacttttagattgaaagttttctgagggtggttactgtgccttatttcccatttcgcctagcgaaatgatttgaatttaaattgctctctgcatctccatcgagatgattgtactagagtcatccacagacgtctatttgtgacttaaattgatagaaaacatctagataactgacttttttggctgctgttgttactgaacagctttatgaaagtcaggaacatcaaagcagtacagatgacctcatttggggtcaggagccacactgtcttgtggttagacttttgtcctgcaaaaggagttcatcttttaggcatggactgctgtgagaacttgtgtctatttgttctcacagaataatttggggatcataaatctggcaggacaaccaccacaaactgcttcagaacagggctttagtttcgttatcctggtggtctttccagttgacaatgaattctgctaaaatttagatgctgcatcatagaattcaatcatgacctcatcttaaaatattgtttagccaaaatgttagagtttctctgacagagtggcatcctgaacctgtcctaatattatatcatcctagtaatccactgctacttgggttttttcctcaagtttatttctctaccattttactgatccttcatgtttataagtaaaaataactacagtcgggtgcagtggctcccacccgtgatcctagcactttgggtggccgaggcaggcagatcacttgaggtcaggactttgagaccagcctggccaacatggtgaaacctcatctctactaaaaatacaaagattaatcgggcatggtggcaggtgcctgtacaatcccagctactcaggaggctgaggaaggagaatcgcttgaacttgagaggcggaggttgcagtgagctgagatcgtgccattgcactccagcctgggggacaagagtaagactttgtctcaaaaaacaaaacaagaaaacaaaaactatagatggtaaagaaatttctgaactcagacgcgacacagcagtatcaaacattccttgaatcaatggaatgaattctcatgcttttttgagtaatatgaatgtgtgtcccttttatatgttcaggaatactgagggatgaatttttctttattagattatggtgtatttcttctcattttagtgacaggattactgaagaaacttgttttctgtcaaacgttttggccaccaatactacaaatgtatctgaatcttttggttctagaatagtcaaaatttacagtccctgaagcatcaaggaataaactctccttatgttgaagcaaaaacaatagcaacagtagagttttccttcttagtgctcagagatggagatatgagtaataggcctaaaagatgaataaacatccaaagggagaaagaaaaaaaagcaatttttgtgttggtctgtgctgaaacttcagtttgtcacaccttggttgaggagaaaaaaatacatgagcatcaaatattaactcctgtcaagcgtgataaaagtcagctacttttgccttctctaacaggtgaaagattttcttgtgatagccacagcttcgaatcatgggtcaagagactatttaaatatacaattccatttgcagtggcttttgcaatagcttgttgga

SEQ ID NO: 1509 - DNA, 4001 bp, Homo sapiens
atcaaagcatttcatacactttatagcacctatttgcacacagaattactagttcaaatttcttggggaaagcagtatgtagtattcacctttgaattttctttagtgaatattttagatttaatatagcataacaaatatttactggataaatgaacaattggatatttgatactctacctcttcttatttgtctaataaattacatacttcaaaactcagctcagatgtcactttgtgctggaaatcttctctaaagcttcttttcaccccaggctaatatgttttccacagtctcttaacggaattcgggattcaaaacccagcacttgatgaagactgttaacctcaataacagaccttaatctttcaggaaccaaccatgtgggccaagacagcctccaataagggtggacaaatggctggattgtctcagcagtgaataactacattgcaatcagcaagttttctaagatattatatcatgtgtactgctcaaaaaaggtgggagggaggggacatattttaattatttatttaaaattaatttcaattttacagaaaattagcataaataaaagtagtacaaagaacatctatatgaaccctttttcttcctcatttctccctctctctcaattttatgccttataacctttatcctctaagtagtatcattatgtattcccagaatatgaaaatatcctatagaattagaaagtagttatgaacttcagtaactgtaacatcaatataatatgactgaataatgcattttgaagtgagacggagtgtaaattgaaaagtttctagtacaggaaagcgatttctaaaagaggtgtgaaaatgagatcaaacaccatggcagtcttggagtctgggaaataacactggtataacattctcatatgtgaagtgcagagagaaggaaaagtaaattactctcaaaatggtctactccatagctttttgaaaggcaggttccactgttaacattttcttcagagcccccatgacatccttattcctaagactatagattaaagggttcaccactggagtgaggatggtatagaagacagataccatcatgtccttctcaggggtgtggtaggagctggggagcatgtaggtgtagatggcagccccatagaagaggatgaccacagtcaggtgggaggagcaggtggcaaaggcctttttccggccctctgctgagttcatcccgtggatggtgaggaggatgagtaaataggagcttgaaatgatcaccacagggatgaggagcatgaggacacagcacaagtacatgaaaatctcatagagtgaggtgtctgagcaggagagattcaatacagcaggaacttcacagaagaaatgatgaatctcccgggatccacggaaggggaaggtcatggtgatgggagtgaatgtgaagccatccactgagcccaggaaccagcagcctgatgacaggaagagacacaccctatggttcatgaggacagggtaacggagaggatggcagatggccacgtagcggtcataggccatggtggctagaaggaaaaattctgaacctgctagtgtcacgtagaagaacatctgcatcccacactcaggggctgagatcttattcacacccatgacctggtccaggagcatcttgggcacagtgacagaaatgtacgccatgtccatgagagacaattgactgatgaaaaagtacatgggggtgtggaggtgggcgtcacagtgtatcagaaggatcaggacagcatttccagacaacgccatcaggaaaaccacaaaaatgaccacacaaagtagtgctggatgtttggattgtctgaagagtcccaacaggatgaaatccgaccatccagtgtggttggccatccaggtgatattggccattggatgtttggattgtctgaagagtcccatcaggatgaaatccgaccatccagtgtggctggccatccaggtgatgttgtccatgaggtttcacctaggccacaaaggaaagcttggggttaaagtaatttgagcctctgaaacaaattgtgtgtgtgtgtgtgtgttctaaccaaagaaaggcccatgggcctgtagatttgggtgttataaattatctgcaattcaaaaaatttaccaggaactaagaattcacaactgtggatcaaaagggtgatttgtagtgaagttgccacagttctgagtcatgagatttcccgatgagagtgtctgttataaacaagtcctggaaactggcagtgtcactgccttatgcagacatgaatagtgaattattgaaaacaaaggagaattttgtccccctgtttttagagttgtttagagaagtctaaagtgaattacattctctggtttaaggatccatctggaatcttaaaaactcccaaaagtgtattccatataggaatgatttagaacatgactaaaatatcacttgtggaaaatccataccaaacatttgcacccttctacccacagtattggacaatgctgtgaggctctgtggtttcgtggagcaaaaccccacacatccccatgagcaagccagggtcctcctacacaccagactcctcagaaaccagagtcgcatggggtgaggagcccagggaccgtggctggactgcagggtggacccagcttcccctctacctgctattcctctgtttactgcacataaaaatagatggtaagaaaaggtttgacctcagggttgatgaagattaaatgcagaaaagtaatgaaagtgcttagaatattaccagttacaaatgaacaaatacatacactgtcaaagagttaatatctacacaaattattctgcagactgtattactataatcatcttatgatatgagcttcattacttcagtttgctgattttatcatttagtcagacttgtaagaatttggatttgataatttctctagtcccagacaacttgtatgtatacagtttacatttattttatataaatttatagatatgcatttttatatatgtgcagatttacaaatataagaatacattgtatatgcatatttacaaatagaaatgcatatattaatgtaaggtatgtctcttattttcatgttgagcagagatttatgcagaatccaccttctttgtgactagtgcatgcttctccaagcttaactccttaaagctcctgtcattcgcattaaatctcaggggggcataactgggatttagaaactccctgctatttaccaggtaaggcttttggtgtttttgcaaatatctgctttattgcctgctacagtgaattttttcacggaaactgtgaggcagaaaagaaaataaaacactaagatgtctctcacttcaattaaattccttcctctatcttgctactcacagcctgactctgtgttagctagtgcaggaatcaaagacaaattatatttgattaagcttgaggaggtcacagtcagtctattcaggaaaaaacatataaacatgatttaaagtacaacttcagattagaatagctatgagctacattaacaaggctaatagaagcaaaatacatttaacctttctgaagagaatcactgataactcctacattttctcttaagaagattaaaactttgcaacttttcgatttctgacatgttgttaaattttagtatttatcaataggaagaaaatatagggtcctttttcagggaagactttagcagtggttatcatacagtcatatttcaggaagaatttccaagtttcaaatacattttgaattcttttaataattctaattagacttattaatattttcaagttttggagaataataattagatgcggagactgggcagctgtttgctaagtgaatggagggagaccaagagggcagtgcgggatgggaggtggatgctgggcaaatctctgctgcacttttgtaaatggaagtccctgtcattaagccacgctgaacagctga

SEQ ID NO: 1510 - DNA, 4001 bp, Homo sapiens
ttagtgtgtccttatgagctgcacccttcacacgagtatcaaaacagcttatttattttcttacatttgtttgcataaacaactacatgtatttttcaaactccttggtaaaagccatgtgctattcaaaatttaatcttatttaactatttttaattataaaatagtacaaaatgcttgttaaataaatgaaggattgaatgttgatgccatccctctgcttgtttgtataacaagttacatgtttgaaatctcagctcaggaatcaccctgggcaggtaaccttccttaaaactccttccactcaggtgtcatattttttctgcagtcacttatgtggtcctacatcctcaatacaccacatggcagtaattatttcggagagataaatccactagacgccatcagaattggaccatgcagaaaaatgtagccctcaataaagaaggggcgatgactggattttcttggtaatgattagatataatgaaatgagcatgatttctaagatgtcacactgccaccaagcagaaaggagaatattttcaaaaagggagaaaagcctggtatttaattatttgtaaatgatttcaacttcacaaaaatcattaaaaaacaatagtacaattaatacctatataccctttacccatactcatgtgtggcagcaacattgaactcagtttgtttcattgcccctctctatctccctccctctttccctctcatcatttgaacacctcatgacctttttgtctctaaatattaagtatttcctgaggttaagaatattttttcacaaaattagagaacagttatcaacttccaaaaatgttacattagtataacacaattgtaaaagaattttggatggacaaagactataaaatagagtttccacacagtgaaagaattcctcaaaatgagatgaatatgagatgaggcatcattgtatgagagtctaaggaataacagggataaaatcctaagtatctgatgggtagagaaaaggaaaataaatctttatatccaaatttcctactttataatttcctaaaggacgaatctcacagttaacattttcttcagagcccccatgacatccttattcctaagactatagattaaagggttcagcaccggagtgaggatggtatagaagacagataccatcatgtccttctcaggggtgtggtaggagctggggagcatgtaggtgtagacggcagccccatagaagaggatgaccacagtcaggtgggaggagcaggtggcaaaggcctttttccggccctctgctgagttcatcctgtggacggtgaggaggatgagtaaataggagcttgaaatgatcgtcacagggatgaggagcatgaggacacagcataggtacatgagggtctcatagagtgaggtgtctgagcaggacaggatcgttacagcagggacttcacagaagaaatgatgaatctcccaggatctgcagaaggggaagctcatggtgatgggagtgagcatgaagccatccactgagcccaggaaccagcagcccgatgccaggaaaagacagaccctatggttcatgaggacagggtaacggagaggatggcagatggccacgtagcggtcataggccatggtggctagaaggaaaaattccgaacctgctagtgtcagatagaggaacatctgcatcccacactcaggggctgagaccttattcacacccatgacctggtccaggagcatcttgggcacagtgacagaaatgtacgccatgtccatgagagacaattgactgatgaaaaagtacatggggctgtggaggtgggcgtcacagtgtatcagaaggatcaggacagcatttccagacaacgccttcaggaaaaccacaaagatgaccacactaagtagagctggatgtttggatcgtctgaagagtcccatgaggatgaaatccaactttccagtgtggttggccatcctggtgatgttggccatgaggtttcacctaggccaccaaggagagttttggagtcagtgtaacgcgtccctttgtaatgagtgtttcgtgagtactcacatttgtgtatgctcattgtgctaacctgagtcccgtgggtctggggatttgagtatataaatgacatataacaaattcacaaaacaaactaagaattcacaactataggccagaagaattggtaactgatagtaaggttgtcacggttcaaattcataaactttcctgatgataatgccatttatcaacaagtactgaaaatttgcagaacctccctcctctgctaacacaaacagtgactcattgaaagaaagataaagcaaactccttattgtagagtttttgtcatagacagctgaattgaatcaacatcgctggtttaagaaacaataggcatcttcaaaatactcagaggtatatatgatataagaaagatttagcaagtaactaaagcgtaacttggaaaaaaaattatgccagatgtttgaacctcctcctcccataggatcaggccatgctgtgaggctctgtgattgcgtggagcgagcctcacattctcatgagcagggaagggtcctcacacacagctgaccctttagacatcgagagacgtgaagtgaggagcccacacacagtagactccagctatgggtccacctttttctctgtctgccattcctttctccaatctacatcaaaaaggataaaaatcatgtttgagctcaggtgtggtgagggtaaaatgaggaaatgtaatgaaagtgcttagaatagtacagtttccgatgaataaacacatatactcttagtgtagatgttaactctttaagctaactattctgcacaacctaagagattgttgctactattattatataagatatattacttccattctccagattcagtacctattcatacatttaagaagctgactttcaaaataaaaatggcagaagttctgcaaaataaagcatatgacccactttaaaaaaaaacaatttggattttatatttgtgtgtttatgtgtaaatactctggttttatataaatatatataatatatttatgtaaacatacacaggtgaatatataactataacatttcttattttaaccctggttatgcagagctttttggagactcctatgtccttcctgcctagtatgtggtcctccaacctcatctccttaaagctcctctcattttaaagctcattaaatctcagcgaggaagaactagaatttggagggtcactgctgtttatcagacaaggctttagttgtttttgcaaacctcatgtgctttattacttgccacaatcaatctttcatacaaactgagaagcagggaggaaaatcaaacaacactgaggcatctgacttcaactcactgtttctccctctaccgtgacactcacagcctgtgttatactgacgatgaatcgcctctgacttcaactcactgtttccttctctatcatgatactcacagcctctgtgttatatgcagaagatgaatcaaagaaaaattgaacttgagtgcacttaaggaggtcacagtcagtctattcagggaacaactattatgtaaatgtgatttgaagttgaatttttaaatagttacaaaataaataagggcaatagacacaaaatatatctggccgttctgaaataatccataatagctgtttccacattttctctgaaagaaattaaaactttccaacttttcaacttctgacatattaaatgttaaattttgagagcccttgccaagaataaggacataataactcctctttctgggaagactttagctgtgattatgatgcagggacattttggaatgaatttacaagtttcaaatatattttgtattcttgtagtaattacaaaaagtatttaagacattcaactcaccaaaacttccaacattctgggatgcttcggtgctttaatataaatatccaacaa

SEQ ID NO: 1511 - DNA, 4001 bp, Homo sapiens
tttgtgattgaaacagcatcaataaaatcctgacattgtggaaagacacaagcatttgtggtcctggttatttctaactttgcaccgctcatgacactaagtcatttacaagggtttccagttctaattttcacatgaaaagctgggtatttccttcccactttgcaatgctatccaatgcaaaagccagtgctatagagaaggaaaaatatgacgctgtctactacttttttaaaagagaaaagttggtagaaatagctccaacaacactaacatctgcacagggatcccaaaagtttaaaaatgctagtgaattggagaagaagctgtaaagtgattacagaaactgctagttaatagggcatttctttctcaactaccttttgctgtgtcttccaatgtaacagttagttaccatattaaaaaactaacattacagactccctcccccataaagatttagtcttggcatttctacaaaacacatgattcatttttttttagctccaaatgtagataaaggaggagtgttttcagtggttactcaaagaagagatatttggattttctaaatcttggtgtaagtctatgtagatttttcttttacagttttatgacagtttagtctctttcatatgtctttcaaaccttggcatccctaaatctttgacaagccaattgatggattgtttaaacaatatagtcaaaatcaccagttcttatggagccattgaaaatgggcagaatatgtaatattaactcaacattttggggcattcatatacacaaactgcaatcagagaagtgatatgagagaagacttggaatcagtagaaacaaaagaagaataaacatgagtggtgtttctagaactctggcattatttgtgtgtgactgttacagcaacttcccatttttgatgggggtactgttgatacaccatttagcacagctggtattgaaagttcctgtcagcatcatccgtggtatccatgatacgaccccatatatgcctgaacaggatgtggaggttttagaccatcagaattctttcctcatcacaccacatgtcccctaacatcttgccacaactctcttcaaggcacccatcacatccctgttcctcagactgtagatgagagggtttaataagggtgtgaggatggtataaaaggcagagaagaccttatctttgattggggtgtggtaagattggggaagcgtatacgtatacaaggcagccccatagaacaatgtcaccaccatcatgtgtgaagagcaggtggcaaaggccttcttcctcccttcagccgatgtcatctgatgcactgtgatgagaatcctggtgtaggatgcagtcaccaccgagaaggggatcagcagcattgcaacgcagcacacatacatcactgtttcataggtggttttgtccccacaggccagcctcagcatggtgggtgcctcacagaaaaagtgattgatttggtgagaggcacagaacgggagactcatggtaatgggggtgaggagaaaactgtccaaagccccaccgaaccaagagctggccaggatcatccagcagacccgccagctgatgaggacaggatagcgcagtgggttgcagatggccacgtagcggtcataggccatgagccccagcaggaagaattcagcccccataaagcccatgtagagaaagcactgagcagtgcaggcgatgaaagagatggtcccctcgcccatgagataatctaccagcatcttgggcacaatggtggagatgtataatgtgtcaatgacggagaggtggctgaggaggaagtacatgggggtgtggagatgagggtctatgttaatcaggaagatcatgaccccattagctatcatggccatgaagaagacggcacaaatgacaccgaaaaagaatcctgagcatttattgtgagtgaagagccccatgagggtaaagcctctggtcaaggtttcattgttttcattcatggtactgagtttgaaatggaggcataagaagagaagcagggtcaatgaaaatgacaaaagataaatcacttaaacatgtctgtgtaaacattattagattaaaatcttttatgtagctaatataaaactttttttggtgtggtagatttgtagcttcctttttcttggctatttctttttgatgaagaataatttcaacattaggaccccatgggatgaagatgaatgaatgtttggcaattgatacttggcttaagggagtttcattatgattgaagaaaatctgggccctagagaggatccttcatttggagttggctccatttacttaaaatgtggatacaactgaaagactattgatccaatcaattcaaacaacccaataaaataattcaataggccattggctcaaattgggaatttctgtgataattttaaaacctattggtctcatccagaaataaccataaattgtagacacaactgaaaactatgttgaactgtaataaacatgattacattatctgcctgatcattggtcattcttatgtgttccctcaccatttgtcaatttctcatccatttgcacacttaatctttatttatggagagagtactgtgcagtgttctaagctctggggatactgtagtaaataaaaagaatatgaatcatgtgacttacattctagttatgaaataagcacagtaaatcaaaagtgggaaccatggttccaggtaatgcaaataagggctttgcggaaaacttcaacacagacaatgaaagataaaagaaaattcatgtgaagatttagggctagggtgttcctacaaaataaatagcaaatgtgacatccctaaagcaaaaaggagtttgggatagtcaggaaacaaaagtcagttcaggaagagaattgcaagtgatgaagacagtgagatattagtgatcagttcttcaaggtatgcaggccggggtaaagagaacagaattattttctaagtgttatcagtagaattgagttgcagtttgtaacatgtaacagtttaactttaacatgttcattatgatctttctgtttttttctttttatctctttggtacatttgagtcattttttgtttttgcttagtgttgtatttttgtgggtcttgaaggcttagactgggatagaccaggttgtgctttctgtcctaatgtcctcctcatttcactcaaaacttcctgatttggttggtcagtcgtaagccttggagatggtgactgaaggaaatgcataaaagatcttgtaggccagaggcaggaaaccatacacaatcttagatagctatgggtggtgcattcacatcttgaatacacgatgaatataagaatatcttttaaaagtttcctcatcaggtttaacactctttgaaatccaacttgaatttcgaattcttggacccttctgtgtgcactcaggtgttacaccagacagagaggcagatgatgtagcagtaagtgcacagagccggcagccagcttccagaacaccgttttggagtagggggttgctcaattctgaaatacttgcactgagaatgcttgtttggggttctggcttcatcatttgcaatgtgccctaatgcacattacttaaaaacttagagcccgtttcctgatctataattaggatatcacaggaaacttacgggatgttgtcatgatcaaacgtcatgtaacatatgcaaaggaccacagctgagtaaattcaaatgctaatctatgataagctgttgcgcttgtgagagaatgctgataatgaggacacacaatatcttgccgaaggcaatattgcatttcttagctactgtgtgtataccacaggcacaaacaataggagacacactctaaaaagcacgtgtcacctgttgagcactaggggacacactctaaaattatgtgtcacctgttgaacactaactaggcagggctgcaggcttgtgcattgtcttgtgagttattt

SEQ ID NO: 1512 - DNA, 4001 bp, Homo sapiens
aactgaagtagacagtttacatcaataggcaatagataataagctaacgcaagaggcctcaacattattagtcatcaggaaaatgcaaattaaaagcaaactgagttcctactacactcagaagaattgctaaaatgaagaaaacatcgacatttggagcaacaggaacttgtgtgcattgtcagcggcagtataagagtaaacaaccactttgaaaacagtttactgaagagttcaccagacacctaccaagaaaaataaaaacatatgattacaaataggagattaacatacatttcagtcaccagaacttcaaactgaaaatagcccagatgtccatcagcaaaataatggataaacaaatgatgaaattttcagaaaacaaaatactacttagcagtaaaaaaaagcaatgtaacaatgaggtaaaaatgtggagggattttagaaatacattaagctgaaagaaggaaacaagattcaagaccatactatttgtttcctttgatgtgaaattttagaatagcccaaactaacgaacagagataaaaattagagcagtggatgtatcttaggcctggggtatcactggaaaagggcctgcaggacctttctgaggtggtgaaaatggtgtctcttcctaatgggtgaattaccagggtagatatttgtggaaattagttgaaaaggaacatcttaaatgcgagcattctactgtgtgtaagctacacctcaatttgaaacaaatggcaacaactttcaaaactgcttgaatggttaattcattctttgaacaaaaaattattgtgaggtatgatgtaaaaccatcttactaaggattagtgagttcaccgatttttaacaatccatgatttgattgggtaatgatagctgagtaaatgaacccgaggaatgaagattcatctgcaattcaaagcaacacacaaacacacacacacacagagacaacagatgtagaaataaaagtgtatattccttatttctaggaaattccacacaaacactttgcacagttttgaatgttggggcaaatatatagtcttattcacgacttaaggccacacaccgacccatacaccttgtcagggctcccttcacctcactgttcttcacactgtagatgagggggtttagtaaaggggtgaacatagtatagaaggctgacacaaccttgtcgtggttagtggacctgtgggatttgggtctcatataggtaaaaatggcagctccataaaagagtcccaccacagccacatgtgaagagcaggtggcaaaggccttcttgcgggcttctgtagagcgcatgtgcagaacagcagcgaggatgagaccataggaggacaggatgagggaaaaggggaccaggagcattaacacacagcagatgtacatggcgttttcgaagactgaagtgtcagcacaagccaaacgcaccagcacgggggtctcgcagaagaagtgatcgatctcgtgtgcaccgcaatatgggaagctcagggtagcaacagcctgcaggagcccgtcagctgcacccaggagccaacacgacaggttcatcctcaggcacagctgccagctcatgagagtgggatatcggagtgggtggcagacagccgcatagcggtcataggccatggctgctaagaggaagcactctccaccacccagtgtggggaggaagaagatctgcgcaccacagccagcgcgggagatggccttacttccggtcaagtagtcagccgccattttgggcacagtggtggaaaccagcatcacgtccatgagggaaagttggctcaggaggaagtacatgggcgtgtggagccggtggtcccagtgaatcaggagaatcatgagggaattgccaaacagggaggtcaaaacgatactcagaaccatcatgaagaggacttggtgggctctggtgtggttaaagagtcctaggagaatgaaataagaggtatagctcccattttccatgatttcaaataagagtgacactgcaaatggagaaaaagaagacagagtgtttatcctttatggtactccatttgagttacgtagtaaaaaaatagaaaagtacttgtgtgaaagcgatgaaacctatgtcaaatctttcatttgccacttgcaaaatgttctaatttgtgcataaaattaattaaactttttctcatttccaaggatttcataataaatgcttctcaggctaagtattgattaattttatatcacaaatccacgttctggataagttgcaagtaacctgtcagaatggttttgctttatctggtaccatcataagtgagtgagaatgaaatgattcacataatttgtcactttatttgtgcttgagttacatcatgcatagtcaatattttagaagctgaattaagtcagtatatttcattatataaaactacatccttgactgtgaaggttgtgggtctataacatatcaaaactcattgaaacctaccaaaatcaggcagttttccctgacttaatccaagaagactttttttcctttctaaagagggtgacttatattctcaggtctggaaaggctgagtctgcagatgaaaacatagttaatttggagttgtgaacacatttagtcctcctttataggtgatagactgaaaacagtactgaccttcttggatattttttatttctttgcagtgtaagagtataatggtaaacacacattttcattaactgtacaaggtactttgttgcaatgagactttttctcatcagtccacaagtataacctttaccaggtaaaggagaaaaaagaaaactaagatctttatccaatcacagagataaattaatgtcttcttcagtctcaagagaaatgaaatctttatagacattttcatcttagatctgctggtgcaggaagttttctaccttgttgaataaatgtcgccacacctgcagaggtattgatgctgattcaatctcaaggatatggtctaattcaataaagttatatggcagaaggagcccatctcttccatgcgcattccctttgcctccactttttgtatccaccctaaactaaaatgccagtcacgactgggaaaggcagtgcagttgcgtcagtcaataccagagtgcattacttgagcatcataattgtacgggcagcacaatacctgagggttttatttggttgtttaaaatttaaacatcatggaaatatacatatgtccttcttgacaaataaattctgcatttgacaaaactttgtgatcttcacaccttcgtatctctaacatgctctatttttttctttttacttcttagaaaatgcaataacatgtactttctacacgtaggaactatacaaaatctctaattacagcccttagtgtcactttgctgaaagacctcaaaaccctcctgactcatttctttcactcgatatcttccatttctccgttttcccaaccttccttagtgttgaagcttgatcaactttaaatatcttttaaaaaatcagtctgtaatgtcataactgtagggtgttggacaagtttcttaaattattttttctatcatattaaatatttttaaggcacaatcagtacagtggcttcaagtataatcatattgttgtatgaccatccacaatatccatctatgaatctcatttcacctccctaaattgaaattctgtacccactgtgaaataactccccattcttctcacacacagcccccagcaaccaccattctattttgtgtctctataaatttgagtgttttagaaacctcatataaatggaatcatgtggtattgtgtgtgtgtgtgtgtgtgtgtgtgtgtgtgtgtgtctgtgactggcttatttcacttatcataatgtcctcaaggttcatcccatgtgtcagaatttccttccaaagggtgaatactatttcattatctgcatatataacagtttgttcaattatccagtcatagc

SEQ ID NO: 1513 - DNA, 4001 bp, Homo sapiens
ataaaatgggaataatgataatcatgctgacctcatacaaatactgaggttgcatgacttaggagcgtctggtacacagaagggactaaaccaatgtcaggttcttcttactaataatgaaaaaaacatgcctgagaaagaatgatgctttaagatttaaacaacccatgcatcataacttacaggttcacttcttggtttatgcagaatcttacaccagataaagggtaaaacaaactctacgatttcatgaaaaggtttgggtaggaattgggaatatagaaaatataaaactgtgctgcattccatgatttgatggccctaaacagagaggcacttggaccacgtggagaacagtgatgcatttggggtcattctgactgaaacatgtcaggtgtgttagactttaaagcaaacaacaacaaacaaagcaaagctctgattgagaagagttatttcctcttagcactctggtataagtaggtggaaactcatctttacaactgtttgtctcacttcattctttgcagctgctttacagatcatgatgggttttggggatgatttgtgttatatagttcacacataaatcacataatgttggccagtcgcagtgactcacacttgtaatcccagaacttttaggaggccatggcagggggatcacatgaggccaggagtttgggaccagcctggtcaacacagcaagaccccgtctccatagaagacagaaaagccacaagccacaattcccactgccagtgatgcacacctgtagtcccagttacttggaaggctgaggtgggggaggatcgcttaagcccaatagtcgaaggagctatggtggcaccactgcactctaccctaggtgacagagtgagaccccgtctcaattttaagagcaacaacaaaaacacataatgtcagaactgaaacagcctcacaaaagtccagaaaaaggcaagttgggagtcgtgggctaatatcagctggaattcagccgttccagatgctgccagtggccctggatggaagtgaagtcaggtggagatgcctttactcctttcctagctctctcttccccagaagcaaccttcccagtgcccccttcacctctctgtttctgagggtgtagatgagaggattgaggaggggggtgacaatgttgtagaagagcatgaggaacatgccctggtcctgggaagaactggctcctggctgcatgtacatgtagatgatgtttccatagaaaagggagaccacagtgagatgggagccgcaggtgccgaaggccttctgccttcctgatgctgaccgaatttgtaacacagccctcacaatgtagctgtaagagagcaggataaacaccaagggggacagcacaacacccaccgccaggacaaagacggtgccttcgatggccacagtgctgacgcaggccatccggatcagggcgggcatctcacgcaggaagtggtccacctcgtggtgcccacagcggggtaagcgcagggtcacaggagacatggccaaggagttggccaccccacagccccaggtcactgacaccaagccccggcagagcctggggttcatgatcaccatgtagtgcaggggcttgcagatagccacacaccggtcataggccatgacagccagaagcaggcactccacaccacccagacccaggaacaggaagagctggatggcacagcccatgtagctgatggtcttgtcacatccattaaggttgtagagcagctgggggatggagctggtggtgaaactgaggtccaggaaggaaaggtgggcgaggaagaagtacatgggggtgtggaggtgggggtccagccgggacaccaggatgatggtggtgttgcctacgagggtcaggaggtacgcgatcaggatgaccacaaagaggatcctctccagatggggtcggtcagagaatcccagtaggatgaaatgggtttgggtgctgccattggttccatccatctctactgctgctgaacagaaatatcaatcctaataataataataacagctgatattaagggagaacttactagaagctaagcattcttctatgctttttatatttattttattcattcaaccccaacagttatatggagttgcactattattattagctcccaacttatagaaaaggaaactgaaacacatgtgtgttgagcaaactgtgatatgtaggaagacacagagctgattctgaaccccggcaatgtagctgagagtgtgcaatctaaaccaccagtagcactgcctccaaatccagtgaagtgaaggcaaatcctgctgtggccaaaccacgaatttttctagagactccagtccctaggctcctgccaaaaacctcaaggactcaaaatggagcctcaaaataatccatcaatagtatttaggaaatactctttacacacagagtactttatctattactggtctcaaagacacacctcattcattgggttaccattactgaggtaatttttaaattacctcagaatttaatttaatttaattttaaaattacctcagtagataaataatgtaagagacaggcaaaatacacataaaatctctttttttctctctgtcttttaaatgggcctggtattgaacaaatagagtgtatgggtttttcttccaaagtactatatactgcttgagaggataaaagagattgaaaaaactttgtaacagatattacaactgtaatgcaaaattcacgcatatgtacagaaacctctatcacgttccaactctaataccacatcacattcaaagcaaagcatatttgataagacaaaccacaagtcttacagatggatatagggagacttggtccatcctggtgtttgggtgatggatgcattaaaagccaagacttcgccactgtgcaatacatgcagctaaaaagcagtacccccaaattaatataaatagatataagcatgtatgtgcaggtaaaaagcagtactcccaaattaatataaatagatataagtatgtatgtgcaggtaaaaagcagtactcccaaattaatataaatagatataagtatgtatgtgcaggtaaaaagcagtactcccaaattaatataaatagatataagcatgtatgtgcaggtaaaaagcagtactcgcaaattaatataaatccatacgtggaggtaacaaaacagtactcccaaactaagacaaataaaaataaatacatgcgaagatggccgaataggaacagctccggtctacagctcccagcgtgagcgacgcagaagacaggtgatttctgcatttccatctgaggtaccgggttcatctcactagggagtgccagacagtgggcgcaggccagtgggtgcgcgcaccgtgcacaagccgaagcagggcgaggcattgcctcacctgggaagcgcaaggggtcagggagttccctttcccagtcaaagaaaggggtgacggacgcacctggaaaatcaggtcactcccacccgaatattgcgcttttcagaccggcttaaaaaacggcgcaccacgagactatatcccacacctggctcggagggtcctacgcccatgcaatctcgctgattgctagcacagcagtctgagatcaaactgcaaggcagcagcgaggctgggggaggggcgcccgccattgcccaggcttgcttaggtaaacaaagcagcctggaagctcgaactgggtggagcccaccacagctcaaggaggcctgcctgcctctgtaggctccacctctgggggcagggcacagacaaacaaaaagacagcagtaacctctgcagacttaaatgtccctgtctgacagctttgaagagagcagtggttctcccagcatgcagctggagatctgagaacgggcagactgcctcctcaagtgggtccctgacccctgacccccgagcagcctaactgggaggcaccccccagcaggggcacactgacac

SEQ ID NO: 1514 - DNA, 4001 bp, Homo sapiens
atgctacaggaagagtcctgggtaatgtgaggagctggatttttattatctctaaaacaatgatttcaaaatctatcatcagtaacacctagggagctttttaaagacagagatgcctagacccacacctggcattgtagattcaggaaatttggagagttcttggaaatttgtgccttaagcgttctgatgcacgatcaagttttggaaacactgcttttagtaatgtccaattccaatatgcactgattttataagattggtcatcagagttatttgtggaggttgggggtggtaattaatttgagtataggacagctctctttgaagtagaatatttacagctgtttaatctgctaaggagaacaaattcattctatctggatgtgtatcatttgctctgttcttcccaaaggcttgcattcctgactagagtcagctcttttgtaggtactttggctatgcgaaaaggtcaaggagaagatgcaaataactctgagcaaattctgctttttcaaaaagcaactcaaaggacattccccactcatacagaaccaacctgtatccaggacagggcactataactttactgatgttgacccctctctctttgaaaaactgccacagaagcaaataaaagggcttgaagaaaaggccactcatgttgtctcaatttttatttgacatccatgacataatctgcagactgcccagtgcctttgggtgattgaattagttttgtaagtccccagcagttgtggataaatcaaaaagacaaggaaagtgcaagatacagcagagatatcctgaagcaggcaacttcaaacagaaggaaaccacttcacatccagagggcagaggacggggtcaaactcgaaagcattttcccacccgcgttcactctactccttgaatattagttctccacatggccacagacacatctaagagagtaactccagcaaactgtctacattactagagtgttcccctcgttgaggctccccagcccctttctcccaccccagaagtttcttcatggtccccttcacatccttgttcctcaaagtgtagatgagggggttgatgctgggaatgacgatggtgtagaagagagtcaggaacttcccctgatcttgggagtagctgttggccggcttcaggtacacgtagatgatggttccgtagaagagagagaccactgtgaggtgagaagagcaggtgtggaaggctttctttcgccctgctgctgacttcatcctcagcaccgcggctgcaatcacgccataggagatgaggatgagggagagcggcaccaggaggagagccacccccagggcaaaggtgaatcgcttctaccagcatggtttcctcacaagacatggcaataagagcaggcatctcacacaggaagtggtccaccctgcgacgtccacaccgggagagctgcatcgtctgaggacacatgatgaaggagtttaggaagccacagcaccaggccacagtcaccagctgcaggcagagatgtgggcgcatgactgccatgtagtgcagggaccggcagacggccacatagcggtcatgggacatgacaaccaggaggacgcactcggtggagcccagcatcatgtagatgtagagttgggccacacagccgtggtaggtgatggtcttctctggaccccccaggttccacagcagctgaggggcaatgcttgctgtaaagcagagatctaagaaagacagattcccaagaaagaagtacatgggtgtgtggagcctgacatccatgaccagcaagaggatgatggcagtgttgcccaccagggtcaggatgcagaagatcaagataacagcaaagagaattttctccagtccaggccgatcagaagagcccaccaggatgaatgcctgtaggtaactggcattgtcctttcccataatccaccagctattacagagaaacaaccaaagaattagataagggggcacatgcagatgatctggcactctccaatttccatttacaggtctgtgaagttaagagagccatttgccctttctttgcttttttagaatagacttattgaaacctgttacatgcaaagtcgtgtgcctgatgccccaggaagacgggatgaattgactctggagcttccctccttggtgaataatgtgtatgaataatgacaaagaagggagaaagagaaagttctctaaaagaagatgcgttaaaaggctgagtattatgcagatcactcccaagtgatcaggagggcctgtgtagaacagtttgtattaagggagactgctgagtctgagagttgtttttggttgttgcaaataataagtaagaatttgacatgtggcagattgagctaaatatgtttcacaaagaggaggtagtatatacaaagtcatgaaggaccacatttatgggtgatgcttaaggaagccatgaatgtacgtaccaggcaactccttaatggcatgtaattttattaagatgaaacacagtgatttttgaccctacaagaaaggactgtgatgataggtttaattctgcctctgtaaaacacaggtctgcaaatgtatggcctgctattcagttcatctctctctaacttggcttttccttgtgcaacatgggaaagaggctagatcttctctaagtccccactcagacctcacatgtctatgtaactggtgacactgagtatataccctgagcactttcagctattgaggatttccacagtctaagccaagggctttgatggggactctgccttatacagccaatatccacccaggcttgtatctgctatgataatagcaaacggcatctgggcaacacacaagaaggaagctgtgggaatgagggcacagaaacacattgaaggacatgtgtctatgcagccgctgtcaccacctgtccatcctgacaactgacatgctatgagctgtatcctgttggagctgcaattgggaattctgtagttcccatccattggtccaggcaccggaccctctgcaaagccctatgaaagggtaaaagaggcagggtctatcagaagtagccagccaagtgtcaaagaatggaagactttcagaggcttcctgagtactcacaaaggagactttcacagacacacattttacaggtgttggttattatgaacaacttgtacttctgtatcctcagacctatcataagttttctcccaggttcaggagacctcaagagtggcaatgacaagctacacaaattgctcagcaactttatcactttgggtgataaagttgtgatcactttgggtgatctcagcaaagtttatcacttagggtctgactccttaaccaaaactgcaaatttaccttgtagtcatctgttcaaaactactttttttcacaatgctttattctttcaatccaaaatgtcccactgctcacccttatgacaaatatgcagaggctcttctctgtttcacctaacaggtattcaactataaattaatgcatcctgtcttctcacatttcttagctctttagttcagaaccatgaaattgcaaggaatacagctcttagaaatgcccaaatacctttaatagtttagttgacacataatactataaatgcttactaattttgaaaacttagacgccaaggtctgaattgggttgattctctggctgaaggttatgcccaaaactgtaccaacccatatagaggagaatccaccaaatggttctctgtgcttactgaaaaggatttaacaatgccaagcaatagagctatttttgcctggcttaggtatagagcacaacataaacaatcacaaccctttcacattagcgtacattagacttttacagagctttcacactctagtttcagaccatcatcacagcagccctgcaaagtggacaggccaggcattagaatctccatgttagagatgatcaacctcaataatagagaagaagaaagaatagccaat

SEQ ID NO: 1515 - DNA, 4001 bp, Homo sapiens
ctattttctcttttacatgaagcatttcctacacacctcttaatcacggtagcattgacgtcattccaccagattctatctccagtgttaaaataatcaagaacccagaaatctccaccagggggcaaccaatgcgtatcaaagtttcccactttcctttagatttacttatgggtaacttatgggaaaaaatacttaagtacttccctttttaaagaaaaaaattatatgaattctacaaaattatggcagaaaatttaagaagagcagatgcttcccaactcattctaaagggccagcattaccctgattctgaaacgaaaaagctttacaaaatccaagatccattcctgactaaagataaaagaaattttcagcaaactgtgaatacagaaaactttctcagcctgttaaagagtacctatgaaaaaaattatagctaacattatacttaatgatgaaatatttaatatatttcataacaggaacaagtcaaagatgtctactctaactaattctactcagcattcaacaaaatgaatatagtgaattcatactagaattttaaaagcaaatgtctttattcactgacaacataatcatctataaagaaaatcctacataacctataaaaaactgatggaacttataagttttgcaagtttacaggatataatgtcaaacaaagatctattatgtgcccataagctaagaataaacaattgtaaattgaaataaaaatgtcacttaaaagggcatcagaaatataaaacttagagataaatataaagtacatatgcataaagtacctgttcaccaaaaactacaaaacattgctgaaagaaattaaatgggcataatatagatgtagagatgtgttgaatttatgactcattttgaacaaggaatatattcatcatatattcatcagataagaattatgttacaggtctaataacattcaaatcaatacataatgtctcatagttcctgaatctaaaatatcaaagaaagaaacataaagccatatcatgtttaatgagaagggcttattatatcatttatgagatcctcttgtaaatcactagctgtttgcatactctctttattgctgccttcatctccttattcctgaatgtatagacaactggattcagaaaaggagtgagaactgcatcaaaaatagccagaaacttgtccatctgtgaattagggtgtggccgtgtatacacaaacatgggtggaccaaagaacaaaaggaccactgtgctgtgagctgaaagagtggaaagggccttggatgaaccacctgaggaatgtttccaaacagtaaacaggatgaagacgtaggagattagaagtatgaagaaagtacccacacagataaacccactgttaacagtgaccatgaactgcaatctgtaggtgtcggtacaggctagtctgagaagccgaggaaggtcacagtagaagctgtccaacacattagggccacagaaggctaaattaacaagaaatgccagttggaacagggagtgactgacaccaagggtccaggcaacagccagaaatgaaaggcacattcttgggctcataatggtcagatagtggaggggcttacatagggccacatatctgtcaaaggccatggctatgagcagcaccatctccacaccaccaacgacgtggatgaagaagatttgagcgatgcagcctccaaaggagatgactttgcgctttctgaacaggtcataaatcatcttgggagaagtgacagagcaggctcctaagtcaatgaaggagagactggccagtagaaagtacatgggggagtgtaagtgagggtcagtggtcacagaaaacacaatgaggatgtttccagtaatgcttgccacatagagcacagaggaaaacactaggaggaggagctggatctcccatgaatgagtgagtcccagaaacaaaaactcagataccactgagtgattctctccatccattggtccagccaactgggctgtggctaaaattatgagaactaagaaaatggggaggaaattgtgattatgaagataataatatgtactaaaatcaatattgcaatgtcactatgaataaatagtatacagttattctgttcctcacatattaaaaacaaaaaatcaacataatattatcacaacatgtgagctgcaacctgatttaaacccatcatcaatactttcagtgtaatgtctgatctaaaattaacagattaggtaagaacaagattcctgactatccatgaaattcatcaggtgtttaaatgacctgtgatattaactattcctcatttccaacatattccatttgtacttatacatattcttataatttccttcccttcccagtttgcacccacaattctctgacagaaagtagacataagaggaaaacatgattaacagatggattatcactgcagtaagaggtgcctgggacggacttagttgaggtaggctgtggattgagagaatatagagactggggtatgtgaaatcggaaagcccacaactgtagcagactagagtaagtggactttcacaagaaatagaatcaccaccattatctaccacattttctcatgcttactgctatttaagtgcctcagtttctatacaatctttcacaattatgaagccctaaatggcttcccatcctgcaatgatttcataaggagcctatgccacctgtcatgtaaggctttttccatgcctaataaatatgttttggagggatttcaccagtgtttctgctaagatacatgcataaaatggacacagaggttgtgagaaatctctgcagtttctctttgtctatacacatgaaagtattgaagaccagcacttggattagttaagataatgttttaattcatcactgtctcctcctccccttggtaccagcttttatgttcattgcattccccacccttttaagtactcagtacctcctgcatggtaacctattctgatatttgatattatcatgcttaatttgactgaatccattcggatattttatctttaagaaatttgtagttttatacttttaatttatgataaaattagattaatatcaaacattaacaagtgacttttaggaaggtatatgagctttcttattgacttcaaactataaagtacaaactgtgacactagaaatttagtcctttaacacatattgtatttatatgtgaagtggagggtgagcagaaaacagtgttatatttctctgtgtccagatggatactcacctcaatcattttcctatagtagaaagtagttcctgaaaacacttaatagagattattttagaagttgctgaggtacaaataaaactgctatgctgacatcatacttttttgcaccaacaactccagttcttctgacacaaaggaccatcttcctagtgccataatttatcttagaccccaaaactcacagaggcacacatcatatctctaatacttgctcaccaccactggcatgagtctctctctatcctcttctacgtgaagtgattatactgtcacctctggagctaactgtccacagtctcaagatgcacactttttacaaccagaagcctatggactgggtgagggagcagaaacagccacaggtactgcccatcagggtaatgtaagtcagcatgcaaacaactgatcagatgaacatgaatagcaaggtgctgaggcactgggaagagggaccggaaaactctataattgttgaaaaagactcaagcccttgggaagggaaatgcctatggaattatataaagaccattttatccaagttggtcatcattcagatgaaaaccatgaggcccagaaaagtaaactgagtttccagaattcacacaattgatagaataggaaccagaattcaggcctcttgcttcctattccagaaagacaaattgcaataataatcaaataatatgagcaatcatccagt

SEQ ID NO: 1516 - DNA, 4001 bp, Homo sapiens
ctattttctcttttacatgaagcatttcctacacacctcttaatcacggtagcattgacgtcattccaccagattctatctccagtgttaaaataatcaagaacccagaaatctccaccagggggcaaccaatgcgtatcaaagtttcccactttcctttagatttacttatgggtaacttatgggaaaaaatacttaagtacttccctttttaaagaaaaaaattatatgaattctacaaaattatggcagaaaatttaagaagagcagatgcttcccaactcattctaaagggccagcattaccctgattctgaaacgaaaaagctttacaaaatccaagatccattcctgactaaagataaaagaaattttcagcaaactgtgaatacagaaaactttctcagcctgttaaagagtacctatgaaaaaaattatagctaacattatacttaatgatgaaatatttaatatatttcataacaggaacaagtcaaagatgtctactctaactaattctactcagcattcaacaaaatgaatatagtgaattcatactagaattttaaaagcaaatgtctttattcactgacaacataatcatctataaagaaaatcctacataacctataaaaaactgatggaacttataagttttgcaagtttacaggatataatgtcaaacaaagatctattatgtgcccataagctaagaataaacaattgtaaattgaaataaaaatgtcacttaaaagggcatcagaaatataaaacttagagataaatataaagtacatatgcataaagtacctgttcaccaaaaactacaaaacattgctgaaagaaattaaatgggcataatatagatgtagagatgtgttgaatttatgactcattttgaacaaggaatatattcatcatatattcatcagataagaattatgttacaggtctaataacattcaaatcaatacataatgtctcatagttcctgaatctaaaatatcaaagaaagaaacataaagccatatcatgtttaatgagaagggcttattatatcatttatgagatcctcttgtaaatcactagctgtttgcatactctctttattgctgccttcatctccttattcctgaatgtatagacaactggattcagaaaaggagtgagaactgcatcaaaaatagccagaaacttgtccatctgtgaattagggtgtggccgtgtatacacaaacatgggtggaccaaagaacaaaaggaccactgtgctgtgagctgaaagagtggaaagggccttggatgaaccacctgaggaatgtttccaaacagtaaacaggatgaagacgtaggagattagaagtatgaagaaagtacccacacagataaacccactgttaacagtgaccatgaactgcaatctgtaggtgtcggtacaggctagtctgagaagccgaggaaggtcacagtagaagctgtccaacacattagggccacagaaggctaaattaacaagaaatgccagttggaacagggagtgactgacaccaagggtccaggcaacagccagaaatgaaaggcacattcttgggctcataatggtcagatagtggaggggcttacatagggccacatatctgtcaaaggccatggctatgagcagcaccatctccacaccaccaacgacgtggatgaagaagatttgagcgatgcagcctccaaaggagatgactttgcgctttctgaacaggtcataaatcatcttgggagaagtgacagagcaggctcctaagtcaatgaaggagagactggccagtagaaagtacatgggggagtgtaagtgagggtcagtggtcacagaaaacacaatgaggatgtttccagtaatgcttgccacatagagcacagaggaaaacactaggaggaggagctggatctcccatgaatgagtgagtcccagaaacaaaaactcagataccactgagtgattctctccatccattggtccagccaactgggctgtggctaaaattatgagaactaagaaaatggggaggaaattgtgattatgaagataataatatgtactaaaatcaatattgcaatgtcactatgaataaatagtatacagttattctgttcctcacatattaaaaacaaaaaatcaacataatattatcacaacatgtgagctgcaacctgatttaaacccatcatcaatactttcagtgtaatgtctgatctaaaattaacagattaggtaagaacaagattcctgactatccatgaaattcatcaggtgtttaaatgacctgtgatattaactattcctcatttccaacatattccatttgtacttatacatattcttataatttccttcccttcccagtttgcacccacaattctctgacagaaagtagacataagaggaaaacatgattaacagatggattatcactgcagtaagaggtgcctgggacagacttagttgaggtaggctgtggattgagagaatatagagactggggtatgtgaaatcggaaagcccacaactgtagcagactagagtaagtggactttcacaagaaatagaatcaccaccattatctaccacattttctcatgcttactgctatttaagtgcctcagtttctatacaatctttcacaattacgaagccctaaatggcttcccatcctgcaatgatttcataaggagcctatgccacctgtcatgtaaggctttttccatgcctaataaatatgttttggagggatttcaccagtgtttctgctaagatacatgcataaaatggccacagaggttgtgagaaatctctgcagtttctctttgtctatacacatgaaagtattgaagaccagcacttggattagttaagataatgttttaattcatcactgtctcctcctccccttggtaccagcttttatgttcattgcattccccacccttttaagtactcagtacctcctgcatggtaacctattctgatatttgatattatcatgcttaatttgactgaatccattcggatattttatctttaagaaatttgtagttttatacttttaatttatgataaaattagattaatatcaaacattaacaagtgacttttaggaaggtatatgagctttcttattgacttcaaactataaagtacaaactgtgacactagaaatttagtcctttaacacatattgtatttatatgtgaagtggagggtgagcagaaaacagtgttatatttctctgtgtccagatggatactcacctcaatcattttcctatagtagaaagtagttcctgaaaacacttaatagagattattttagaagttgctgaggtacaaataaaactgctatgctgacatcatacttttttgcaccaacaactccagttcttctgacacaaaggaccatcttcctagtgccataatttatcttagaccccaaaactcacagaggcacacatcatatctctaatacttgctcaccaccactggcatgagtctctctctatcctcttctacgtgaagtgattatactgtcacctctggagctaactgtccacagtctcaagatgcacactttttacaaccagaagcctatggactgggtgagggagcagaaacagccacaggtactgcccatcagggtaatgtaagtcagcatgcaaacaactgatcagatgaacatgaatagcaaggtgctgaggcactgggaagagggaccggaaaactctataattgttgaaaaagactcaagcccttgggaagggaaatgcctacgaaattatataaagaccattttatccaagttggtcatcattcagatgaaaaccatgaggcccagaaaagtaaactgagtttccagaattcacacaattgatagaataggaaccagaattcaggcctcttgcttcctattccagaaagacaaattgcaataataatcaaataatatgagcaatcatccagt

SEQ ID NO: 1517 - DNA, 4001 bp, Homo sapiens
acaaatatacacacttccactcacaagtacagtatcccaaatgagcatctgttaagattgggatgtgtcatatttcacaagaatgttgggaaaaagtaaagtttgaaacttttggctttgttaatatataggattttaatagtatctaatgtttattcatgcttaatatgtctcgaagtgggctatttgatttatatctattttgtcattttccttcataataaccatgcataataggtataatctcctgtttataaatgtagaaactaaagctcatgaaagctacgtaatgtgcccaaaatcatgattaataagagtcagtagagttgaatccagctctttgttttttactttaaagcctgtgcttttaaacattaaccatggaaaatgacatagatggatccaagtaatatactttgtgccaacgtgatgagagcctggatccctctaaattctttctactgcttatgagcagttataccacagacgtctaggacctagaaggcacatttcacattggcaaacttactcttccactcactcctgataatgccctcatggattctgggttgttatagtggtgggaggtgaagtataaacttataatgggaggcgtttgtttttcaacctcttaaaagttgacatatatctccttaccactaagcatatattttttaaattaagatgtgacagttctttttttatgtttttcacaaaatggaccaaataaatttttttttaaatttataagctaggctatattttctctcctttcttctactaaacttagggtcacacaggaaggaacaggtgtacacaaatactaatatatttatgcctttctttgttctaagaattagcaaaagaatattttgaaagcataataactttgtatctgtattccaaaatataacacacaagttgttgaaagataaattgaggcaatgtatgtggaagttcctagacaattactaaattatatgggaatggagggcacaattttcatgagctttactaaataacttaccaacttcactatattttgtgtcattatctgagattaatctcacagttatataagatctaaaactttacactagaatgtgcatcccattttctcagctgtcttattgccgtcttcatgtctttgttcctcagtgtgtatataattgggttcaagagaggggtgatcacagaataaaatacagcaaggaatttatctaatgacttgatggggaatggccaggcataaataaagacacatggtccaaagaacaaaagaactactgtaatgtgagcagtcaaagtggacagagctttggacgacttatctaaagggcgatgctggatggtcattaggatgatagtgtatgagatgattagaagaacaaaagaacacacagtgagcacaccactgttagcaatgaccataatatctagcctgtaggtatctgtacaggcaagtttgattaccctaggaaggtcacaataaaaactatcgacctcattgggaccacagaagagtaagtgcacggcaaacgccaactggctcaccgaatggagaaagccaattccccatgtgacagccataatgccgacacatgcgttgccacacataattgtagtgtagtgtaggggcttgcatattgctatatatctgtcaaagcccatggctatgaggatcaccatctcactcccaccaaagaagtgaaggagaaatatctgaacaaggcagcccttgaaagagatgactttgcgctggctgaaaaagtcagtaatcatcttgggggctgtgactgaagacagagacagatcaatgagtgagaggttggctagcaggaagtacatgggagagtgaaggtgggagtcagataccactgttatgacaataagaaggtttccaaacacgattcctccatagaatacaaaaaacaacataaataggaaggtctggagttcctgagaatcagagagacccagaaaaatgaattcagtcaccatagagttattcgtttcactcgttgattcattccaggaaatagcctctgcagttaccttgaagaagagaaggagaaggaagtcagaattattatattcaaattcaaagcctcattttatatcattctgctcactcttacagtgactttctataatctattacttaaagacattcagaattcaacaagatcataattctatctcgcactacttccctggctatgccttataattcagttatctcggcttctcagtgtctccattaatgttaggtttattcctaatataaaataccattatttatgcttgtctctctgccagattaagtctatgccataactctatgtttatctcctttttctttgaactacaaaacagtttgtagcacacatgttatttggtgatattaaagttcttaagagaaaaaaataggccaaaatgaaatgaaagataaaaaatagaaaaaaagaaaaaataatatcacaaatataatacttaaaaattaacagaggataaaagaatagggaattcaaaagtgaagtgagaaaaagtgaggaaaatgcaataaagtttaaatgagagaaagtgtgaaggactttcataggagataaaactggtaagagattttggaatgctttctaaagcatttctgttttattatagagacaagaactactgaaaaattttgaatgattgtttaatttagctctggactcaatgtgaattggaagggagggagcttggaaatgaagccaagtaattattttaagcctaacaataggtaatagctgcaggttgtggttgtgtgagcaggaaaggggtgaatgaagacctgtaagatcccatcgagcaacgtattaaagtagttaagatatgagcttgtgtgctaggaggcctgtgttcaaatcctgggttatctactatgtatctgaatgaccttagacaagtcacctaagtgatttcagtcttacggccacatctggaaaatataggtgataatagcacaactttatagaagttctgtgaggattggatacgaccaggtatataaattttctagcaaatagtaatggtcaatatataatagccattattaaggtactgataacaaaatattttttggcaagatgtggaaaataaaaaaaatgttattccaatgtctttaagtaattgggaacattgtgatggctttaactctgataataattataacaagcactagtataacaatactttacatagagatcccttttaggagcagaaataaatacagaaaaaggtaaaggataatgatgactgtctagacacaaggaggtattgttggggcatctttgtaagttgctatctgccaggtgagagactgaacactgacttctgggcatgagttgagagccatttcaattgtgtatggaggagagaaaataagtactgtttcaagaagttttgcagtgaagagaagtaacaaataaaaggtgtcctgaaagtgagacatagccatattaacaatctttggattaggtataagagttaatgggcaagtaagatgtaaaagagagaagtggaaattgatcactaacattccacgggagacatgaaggtatagagtttacacttgccatcttttttggaggaatactgttatttgatttttgctgttttttaaagaacagtaattcatagtgcttggaaattccacttttctctttactactctgaatcccatttcttagtcctacacactcaaagcagcacattactgtttttaaagtcctataaaaatttagtgatcttaaatatttttaagaataaagagaagtctaatagtggaataaatcatgaacattcacttcatttctcttctgcttagcacggtaataaatataatcatactaatcattgacagtacaaacgataggatttttattgtgagataatttctgtcctgactggttggttggactgtttcttttgaatcaaagtgtgcaatttagaatagaccttaa

SEQ ID NO: 1518 - DNA, 4001 bp, Homo sapiens
ggtgatctgcccgccttggcctcccgaagtgctaggattacaggcgtaagccactgcgcccggcctgaagaatagcttctattcagccccttaggcatttctttgagaagcagactactttgtctactttgtacacatgtgagtcaatatgagtaagacaaacagaatatccctgtagcctatgttagcctgctggagcccccattttccacagccatacaataatgaggaaagggaggagaagggacctatcatgtgttgatggttgaaaaggaaagtattttgctttctgtggaatgcagtactttagaggaaaatcagatagttattacaattattgtttcctatggttatgttttccctgaaaccactggatgttctatacttgctgacttgccaatggaatctttagtatttttccttttctatgatcaatgttgttatgcaagaaacttctgttgctttgttcaaactctcctgcagtcccgtttatctacttttcatcctccactttttggattgctttgttcactatccttgtgaaacaaatgtggcaccttgtaatgatcaagttctaattccatatctgtctgtttgactataccttatcaaaaaatactatgctgcaataactgcacacactctaatttcagttacatgttttaattcatttaacctttgcctatttctcttccctcgtgttccacaaatgtagttctcaatattttatactaagacaattttgctaatctttaaaaagaaacaagaatttagagctgatataccaaagcactctttttattgcagatgtctctaatttataaaccaaagtccagagcaaacctaattcaatgtataattattttttgcttaaaaatcccatttgcttatgtcaaaaactcccatttttatcatacatgataatgtatagaaaatacagtattgcttgttttgtttgtttgttttttctctgtgtaccaagaaagatttgccctattcctccacattcttacttggaacctctgtatagatgcagagaccatttacaggacatctgttgtggtagaggagatttattttcccttccatttcttcagcagagtctctcttacttccttattacgaagcgtatagatgaaggggtttaaaactggagtcaccacagtgttcaggacgtggacagctttgatcagatccaaggcatctttgatagaggtgcggacgtgaaggaaaactgtggacccataccaaatgagcaccacggtgagatgcgaggagcacgtggagaaggctttgctccggccactggcagaggggatcctgaggatggtgctgatgatgtacacataggagacaaaggtgatgaggcatgaactcaggataaccacaacagcaatcacaaaggccacaagctctactgcctgtgtgttggtgcaggccagggcaatccagggtgcaatgtcacagaagaagtggttgatggcacgggggccacagaaggacaggccactgatgagggctgtgggcactgcaatggccacgaaaccacacacccaggagcccagggccagctgcgctgagagcaggctactcatgatggctccgtagtgtaaaggatagcagatggcaagacagcggtcataagccatggctgccaggaggaagtactctgtgcagcctaatgagaaaacaaagtacatctgcaaaagacagcttgtaaatgatatggtctgacttctccccagtaggatggccagtgctttgggcactgctgctgtggtataccaaatctccaggaaggagaggttgctcagaaagaagtacatgggggtatgcaactgatgggaggtgctcaccaacatcaagatagccacattaccactaactgtgaggatgtacatcaccagaaaaagcataaagagagagagctgaagagtttgagaaccaggaaagcccagtaagagaaagtcctggggcagagttttgttgcctgtgtccattgtggtactgaaaccagaaaacagagtccccgcactgagccctttaacccaatcacacagtcctagaaagataaaaagaatggattcatgaaagagctccaataattaaatgtaattattggagatatgatgtaactttcattgaatgcctgctctgtgtttggaggcatagttaatatcagttattttaatgaaacagtgagatatgtattattataaccaattatcagtttagaaaacaaatgtgcaaaaaacgtcagcaattctggaaagactgcactaatagctacatttcagctccaagattcaactccagtctttctgccttcatcccactctgagccacattccagctcagtcccagattacatctaaacccagaaagcgctgactgaatttactacattttaactagactctgcatggcccctggctgaaacatgtaattttgtctttgtttagaaattggcccagtaaacctaagttctagtcacatacgtatttagcagttgtagcttctaaattgatctaattcataagatttgtcttcaaaaataatgttcaaaagtcaccaaaggtaactttaaaattagtttcaaaatgagttttgtcttctcttgatgatttcatgtttaaacattatatgacagatacttctcatcaaaaaaaatatatttccatattgaacaatacactgaagctaacagtctaggaaatcctgatgcccacttggaagtgagtacactgaaagcaggtgaagggcaaaaaatcattgtgaaaccagtttttaaaattctcatagtttatttctaagcactagttttgagaatagagtctgtaaattcgaaggtcaattgggaagctattactgtcaaacgtacaggtgaccaaaacctatgtttaggagacagagttttgaagaaagacagtgaagactttggcggcttcattctaggaattcccttataaatagaaatgttctctctccatcctcatgtgtcctaccctcgcgttcaccaacgccgaatgttgtttcccgcataaacccaaagctactgcatgtatccactgtcgctaagggcatttagactataaaatgggtctacaaagtaaacggtgcatacattggctttacctcattgatggcagaaggggcttccaagcagtgcttctcaagctctaatgggcacatgaatcacctaagggtattgccaaaatgcaaattttgattaatgcacccttgacatgcagcctatggtttttcatttcatatgtttccaaatgtcactggccaggaccatacactgagaagcaaggatctagcatctttctcattttataaaaaggtaataaatctgcagctttgcttgactgggtaatgaagaagtacagagtatgccaccataaaatgtgctcctctggcactggattattttgaactgaagacaattgtgaaagacaaaaaatagagagacacaagaaaaactctctggccgccccctttctaccaggaaggattggatgatttttaatcaccaaagacaactctagggtcttatcatcctagagaaggcaacagaggaatatactcaacagaccttgcttaaataacccttatattccactaatctccccatatatctaccttcccacaattcatacccctgagaaccccttcctttgtcttgtcgcttctctacaaatttattgtatttttgttaaaatactatataagaccaagttctaaccaattctttgaattactcatccctgaattctcccgtgtgtatgtgcaacgcacttgtcaataaacttctgtttttttgttgcttatatgtctttggtgagtctaaattgcaggattccacccactgaacctaagatgggaagaaggaaaatatttttttcctcctttacactggtaaaggagcctagattatgaattcattaccctaatacagaaaaaaatgccctagatactgatgggtgacatagaataag

SEQ ID NO: 1519 - DNA, 4001 bp, Homo sapiens
tgatttttcttctcttctgtatcccagacttttatttgatagcattaaccctttttataagatctctccttaacttgtctttccattttattttaaaatatcataagatttaggagtaaaagtaatgaaaggattgtggcacaaaagtggggaaatcacactgacagctataggatttgtgttggcaggctagagaagggtaaaaatttattaacatttgcacagtaataagctttatcctatcccagctgaatcatgagccctggagaaaaatcgctttttataaagcatgtatgacatgaagactcagcaagagaaagaagcgtcaatgaggtaggataaaaaagagtttggaatcctaaaagccaaagaagagagcttgaaagagttgttgcctaacacaattggtcgattgtctaaaacaatcagaatgcagcatggcggtatgttggtttattcattcaacagatcatttttatgtttattacttaatatgtacaatgcatttgatcacagtgaatgcaacatctaggttttttatgtatcatgaaaaaactgattatttaatgagtaacaattaaattgcttattgatcaatacttggatactcaatttaaaaatttgagtcattcttcaactatagaagctagaggcaccatggataaaacttagtcttatgaaggatactttttaaattaccaggtcttacagacaaatattttaattgctttaaaattaaagtaaatgtttatgcagaacatttcaacaaaatgaatttactttgaataacttgagtggcagaaactgtaattaataaagtcagattgaaaaatatgtctaattgagtaatgattaaatagaagttattgacgttagctattgctgaatttgtttccttttgtttggtttggtttggtttggtttggtgagctttgggagaccagtttgaatagaaggttgataggaaaagacagattgctgagagctgaaggtgaagaggaaccagcaactatacagaatctcaactaaaatatcttacttgaggtccctggtcttacggaaaaaaatatcttagcttgacctatgtgcttttttatagcttcttttatttctttattcctcaggctatagataatggggttgaagaagggagacaaaactgcaaaggccagagcaatggctatatcccagaacaaagagtaggtggcagagaagcgtaggtacatgagagtcacactgccaaagaagagcgaaaagacaatgaagtgagagacacacgtggaaaatgctgtgcggcggcctccagctgaatgaatacgtagaattacagccacaataccatcgtaggacatgaagatgagcatcacagctgtaataatctccactgcatgaatgacatccactacctgaatcatgacgatggctcgtgtgtctgtgcaggccagacgcagcactgggaggaagtcacagaagatatgttcaaggtgattcgaaccacaaaatggcagtgtagagatccaggcaatctcaggaaggggtgtgataaagccacaaacacagcaacttaaagtcagttgggtacatagcttgggggtcatgatagagggataatgaagagggctgcatatggccaggtagtggtcaaaggccataactgtcaagagacacacctcacagatgccggtggaatggaagaaatacatctgcaggagacaaccattgaaggaaatgctcctctcactaagcaggctagacagcatctttgggattgtggctgtggtataccaaatctccaggaaagaaagagcactgataaaagtatacatgggagtgtggaggtgagtattcaactggaccactgtgatgatgaccaggtttccaacaacaatgaaagcatagatgaagagcagtggaacaaagcagacaacagacttaacccaggaataagggaaagcggagaagataaactcctgaatggtggttcgattggggctctccatctccaagttgaaagtgagagtttcaatttccagtgcactcaagccttctaggaggcatctactattggataaaggaatacacttacaagaagccagcgtctgaatagagccctgtaatggggatagagaggaagacaaggaagaaggacatggtccatattctatagttgcttacgacttaagttgtagtgtggaaaaaatccagtcagaaagcacagtcaatattttggatgtgagattctcagatatattaacatgcatcagaatcacctggagggcttgttaaaactcatattgctggtcctcatactgagagttcggtcctaatctgtagttctgaggtaggacccaagaattttcatttctaacaaattttcaggcaatggtggtcctgctggtcaggggactatattttaaaacaactttgtttaggcgaatatagaattagacagagcattgaaggaataatcaataattaagaggacgttcttttcgatatttaaatcttattgattccctaataatctccccacattgttccatatattttttcttcaagctcccagtttattggattcttggcatatgatttgattggcatatttttataataaagacaaaaccattactggtgaattctttcaaccctctttctctaataactcttcctctcttcatatgtatattcttaaccataattcagagaatatttggagaagaaaagccatataaataatcataagttattttaccttgttttataagatagtctattctatctccttcctttccttctcttctacgtcttcttggtaaggagatcttaaaggggttttgtaccagaagcctttggtcaaatgtagtaacttatgaaaactaactatattaataaataaatgcttaatatagttgtacacttgctctggtacaattgaatggtggtagttagaaggaagggcagagctgcagtgccctgtagaatacaatttaaactacacacattataggaaattgtcctattaatttattctcttttcagaatgttttgttttactttatttgtctcttctgcaatcaaacatgcacatttcttcttatcttgggagaaaatactgtttctattcaggttatttccctcctttgtaacaactgcattatttttccaatgtgtaaaaggtatttattctattcattcttctttgaatctctgaataatgtatccaccctcaacttcccatatctcttttcttaaggtatactagcgactttctcattgaaatttaatggcctccctctgtcttcattgccactaacttccaaaggtcaattgcccaatgtttgaaattcctttttttgcctatttgacaccacactatcctggttttcctcactgattattcaattttttatatcccaagtgtaaacataaccgcaaattctgtgatcattttctcttttctctatatttcctttcacacagaagaatctattgtttcaagatcttatttattcaagattatttatcagctcgtattggccttctattctcggtggttattatgactccagaattccttgtttttgatatctctcacgacctccacattttccttttttttttttttttttttttttttttgagtcggagtcccactcatcactcaggctggagtgcagtggcgcgatctcggctcactgcaagctccgcctcccaggttcacgccattctcctgcttcagcctcccgagtagctgagactacaggcacccaccaccacgcctggctaatgttttgtatttttagtagagacggggtttcaccgtgttagccaggatggtctcgatctcctaacctcgtgatccgcccgccttggcctcccaaagtgctgggattacaggcatgagccaccgtgcctggccgtgacctccacattttcttcagactttcttacttagaaacctcactttgacccaaacgtacatcctcacctattataggctg

SEQ ID NO: 1520 - DNA, 4001 bp, Homo sapiens
taaatttattagtcaaaaagctaaatgaatcatctgtgtttttgacactaccatttagtgaatacaccaaatattttttactgtaaataaagaaagtgaagatgtttaaccttggaaaaggcaaacaataactaaaattgatatttgtggaaaccaaagtatattactgtaaatagtatcttatcttgtagttttcttttaaacatgtgtggcagtactaataatctaatcttactaaacatgtaattattctaatgaataggtaactacataactaaaaataaagatataacttaattaaatgttgtttgggctttttcttagatctctatttctggaaaaccccaatgaggtaatccatgactcataattaaacaaaaaaacttttctaagatgtgttacctaaatagacacatactaccacagagcacattgtcagcttctgaagctcaagctctgtagttctaaccctctaaagtggcaaacaaattttctttaaccacagcatttcagaagaaagaaactacagttattcagccacataataaggttcctcatgatatgcacagcaacttttataacgatgacacagagagtataaatatttttctaggtatagggaaaataattaggatgacagaaatttcagtgtgacaaagcactaggtatagagtaatctcatgttctaatatgttagacaaacattaaagcaatggaaagggccagatgcggtggctcacagctgtaatcccagcattttgggaggcagaggagtttggatcacctaaggtcaggagttcaagaccagcctgaccaacacagtgaaaccccatctccactaaaaatacaaaaattagctgggtgtggtggtgcatgcctgtaatcgcggctactagggaggctgaggcaggagaattgttcaaaaccaggaggtggaggttgcagtgagccaagatcatgccattgcactccagcccaggcaacaagagtgaaactccatctcaaaaaacaaaacaaaacaaaagcaacggaagggaacctgtggctctgtattaacctccaggcttgttcaacactttttgaagacagaacagttttttaatcgcattgttcatgtccttgtttctcaggctataaatgatgggattgaagaatggagcaagtacagtaaacatcagtgcaatggctgtgtccaaaactggtggataagtgtcgctgaaacgcaagtacatgagtgatacactgccaaagaatatcgggaagaccatgaggtggcctgcacaggtagaaaaagccttttgcctcccttcagaagagggaatcctcaatatcacagtgacaattcttacataggacagggcaatgattaggaaggtaatgatgatggtcacagcatgaatcacatcctcaatcagaatcatggacgtgtctgtacaggccaggcttagcacagggaccaagtcacagaagatctgatggatttggttgggcccacagaaaggcagtgtggaaatcatcacaatctcgggaagcaggataaggaaaccgaagaggcaggaacctgcagagagttgagcacagagccggggggtcatgatcatttgatagcgaagagggttgcagatggcaacgtatctgtcaatggccatggtggtcagcaagatcccctctgagttttcaagtgagtggaagaaatacatctgcaagatgcagccagtcattgagatggccttcttttcactgatgaggttggagagcatcttgggaatggtggctgtggtgtaccagatctccagaaaggaaaatatactgataaaattatacatggggttgtggagatgggtgtccagccttacagcagagaagattaataagttatcaatgataataaaagtatagatgaaaagtaaaggaaagaagtacaggagactaccatcctgaagctgagggaatccagtgaagataaattcagtcactgttgattggtttccgctctccatatttctagtagagctacctgtaaatggagagggcatagtccagcacatgagagggtagagaaaaaaataaataagatgtacagctaaacatctttgagaagtaagaagaactaccttgaaggtttcattttttttcctgactttaaactcatgtacatattgtccaatgtttgatttttttcatatcaaacatttttttttgtatcaaacattggacaatatgtacactagtttaaagtcagaaaaaaaaatgaaaccttcaaggtagttcttcttattcctcaaagttgcttagctgtacatcttatttattggcacaactgcagaaataggggtctccaaatgttttaataataaaaaaactagttaaaattatttttattttagcttaatctctaatataggtatttgcatttataagttatacacatttactatattaaggcataataacacaaaattatatatctgtatctcatataataaattttaaaattaaaaagtatgaatacgaataaacataacagaagttatattatgctctttccctacccgactgggccattgtgcacatgctctttgaaaatctctgttctaacgtgttacaatgtaaacctgaagttgacattgaaatcctgtctattgttacctatatgtcttttggaaaattacttaatacctcagagtatcaggtaatcatttgcaaaatgggattaaaaatagtacctatctaacaaggatgctgtaggatttagtaaatacttgcagaaagatttggacagtgtttaataggcaacttctggaaagagtgatacaatctacctctctgcatttcttgttctcctttaacactgctgtgtgcttcctcccgagcattatgctgatactatactgatcacgttcatcaatgccctgctaattactaatggaaactatccagtcatctctggcactcgacacttttcattactcctgcttgagactttgttcctctgtttccacgattccattctcaagggacgtgacgcccagatagctttaaaggcagttctagctttgacttttgcttctgttttatttattttatttatattttctttcttattctgcctcttctctcttatattagcttgtgttgtctttcttaaattctttcccaagagtctattttccccaggttcctatcatccacttcaacctcttatagttttatacactcccttagtgatctcatccgcttacaggatttaaactattaatacttctaaatgtttttctctaaccaatctctctttcataagcttcacaccaactatctgactcttaactctctgtagcttcacctgctaacattctccgactcctctctcccctgcaatcccattgttcatgttgctttctaaaatcacagttctctcctgtttgtgctacttcctctgactttaaagtaacatatctctccctcctctgccccctctcctcacacaaaagcaatatatactgctggttaaaagtctagatgccagaaaaaaaattgctagcatttaaattctctttatggcttaccagctctgtgacttaacatgaagttacttagcttctctatgcctttaatatctcatttgtaaaactgagaaaatattaatactggttaatgaagtcctgagaataactaaacattttataataacaatagaattgtacagtatagtatacggtattattacgtcactaatgctggcactattccaagcacattgtatatatttttcacctcatgctcttaatgctctaatgaggtgaaatgattatccccattttacagaggagaaaacttaggcacagacaggttaagttctttgtccagaaattctcggctaatgcagggcaaagtcagaatttaaatctatgcactgtatctctagagacacattctaacctacatacagttgactgcctctaccaatacatgtaaatgtattttaaaaccttagtgttagg

SEQ ID NO: 1521 - DNA, 4001 bp, Homo sapiens
ttccatgatgccacaatcacgtgagggctggggaattcatggaggaaagaaccattaactcctaggactcattaaaaactggtaaggtttcattaaactttggggaaaagaagtttgcataatttagttttttgaacatcaagtaatttacacaaaattatatatttaatggagacagagaatacagtagagtacctaaggttaaatcccagctctgtcactacgtatatgaccttaggccagtctttaacttctgtgagctttagtttcaacatttaaataatagtgatccctgacctatttacttcagggtattttagatttcaagaggatttatacctgtgaaaatattttaaatagtaatgtgctcaagacatatagtggactgttattgttattaattttggtggaacctcttggggtctaaaattctgtaacacatcatgtacaaaatcagttcacgtttgctgaaatgagtttgggaattaaatgagctaaaagtagagaagacctctctctagtatcaggaaacgatttatttatatggaatgccaaatgacaggggatgcatttccagaaagggaattggggaagttagcagtagcaattctcagaactttcttgtctgtcatgcctcttctattctgcttcccggccccactagcatgtcagagcactgaagagactagcaggggcctagctgctggagtgcgaggaggaagccaacctgtgttaaaagcaagagagttgatctatactgcttcagctataacaagcatggtagaggcattgatgtaaactggccatccacttaccatccacagcctgtatacagcagtttatcattctttttaaaaataatagaacaagtagttgcagcaatacagaaagaggatagacatggaaaagataaataacagtgaaattttgctcttccaagaggctttttagagtctccaggatctgtatctatttcccagcccaaccagccctcttctgatagtggaaaagccttccaatagcctctttcatgtccttgtttttcaggctatagatgatggggttgaaaaagggagcaaggataacaaaagtgacagcaattgctgtgtcccaaaacactgagtaggtggctgagaatctcaaatacatgacagccacactgccaaaaaatagcaagaacacagcaaggtgagcagcacaggtggaaaaggccttgtgatgaccttcagctgagtgcattcccagaatcactataataatccggatgtaggatagagcaatgaccaggaaggaggctacaatttccgctgcatggatggcatccacaatgaccactaggaatgtatctgtgcaggccaagctcagcacaggtgtgaaatcacagaatatctggtggatctggttggagccacagaaaggcaaggtggaaatccatgcaatctcaggaagcacaaggaggaagccacaaaagcaggatccaactgtcagctggatacaaagtttgggaatcatgatggttgggtaacggagtggattgcagatagctatgtacctgtcaatggccattgctgtcaggacacagctttctgtgataccaagtgagtggaaaaagtacatctgcaggaggcagccagccacggaaatgctcttctgctcactgattaggcaggacagcatcttggggatggtggttgtggtatagcagatctccaggaaggagaggacactgataaagaaatacaaaggggtgtgcagggccatgcccacctggatgacaatgaacattattaggtttccagttaggataaatccgtagatgagaagcaagggaataaagaataagaggccacctctgtgcgcatgcgggaacatagagaagaggaactcagtcaccattgtctgattcccactggccgtcaactgtgtcatctgtgaacacagaaaaggaaacaagagactcctataattggaatgttgattacccactgaatattgcttcattcctttctgtaatgagttactcaagctgattctggaatcctgaagaaaccagttagaaatatctcttaagctttacctccatgccaaaatcatctgaaatacttgctgttggacccctgaatgaccttttttttttctagtaaacatcttcaactgatgtgcaaaaagcaaagcaatactcaaatttcattatctggaaatattttctgtaggtttggtcattttttaacgtctgtctgtcccgggtgtgaggtgagaaagctgacatggtttcttcaataggtcaaaagcagatacaaataaatgcatttcagactaggaaaattaattattattattattttttgagatggagccttgctcttattgcccaggctggagtgcaatgactcaatcttgcctcaccacaacctccgcctcccgggttcaagaaattctcctgtcagactaggaaaattaatttttaaaggatgcctctgccttgcaccttaaactgtgaggaaggtagataggagaggcaggctttggaaggaaacaagcaacagtgcgccacagaaaggcagagcttccaaggggaaaagtgtaagatattggagttttcttctgactaaaatatccacttctctgtccttcctgtgtttttcttttctaagcaattgaataatcgtgctgagtagtcattatagagaatatggaaggacagagaaggaaacacagggctataacaaaatacaagaaaataggtgctaagtggctaataaaagccagacagagtgactactttgttgctgtacgcacggggcccttctcagtagtaaagctgcatcattattcatcatcggtacatttattcaactaacactcatatatcgattgatcttctgctatgtgtcgatgatgccataggttcaagggctatataaaggtaaataaatattattcttgttcctgaaatacataaagaaccatcaataaaatcctactgttaaagatatttagtagtgtccaaggagttcaatctaaaaatatttcttgtatgacgtaaagacacttgaattagattagacttgactttgaagaaaagcagtaactttctctgtgactcttcaagaatccacaattattagggtttcaacaagatttaatgtttaaaagaccttagacattatcagtatcttcaaactgttagctgaaccatattctttctgttatcccttcccgatttcatttacccttagtataatatttcactcatgtaacaaagttcttaaaatatgacagtttgccgtgaaacagcagggcaacagttgggttctgaagagttgaggatgtaaggaagctattgggcggcaaagtagaagtaaaaggaggttggatgatgccctttcaatgcagtctttagtacttaccctgcctgacaccatgagaatgctcctcaaaatctctgcagccacctcttctcctagcctgtcaataagggtacaaatgtctctgaagcctcttccaggaataactagaatggaaagatggtctttcctgggagtttctctttggatgatgcaatgtctaaaggaaaattatgtatctttctctcccctctaagggacaaattagaagaacaatgctacatagtaattagacattccccagggtcaggtttcaaaagttgtcctggggctataaaaccttatctctcatagaggaatagagtataaagctgggcactggggcacagctgtggcagtcagaataaacttcatccaggatcatgattctctggaatactcaatcagtaaacactctttcctctccacttttattcattttcactatgatttctattccctctgttgatataatcaacatcatcatatttttagaagtttttaaatgcaagtcttatttgatcctttaagaaacttatttgtatgctgaaaaaaatagttaacatggttaagatttatgtgatttgtttttcatcatattaaaaaaacctcttt

SEQ ID NO: 1522 - DNA, 4001 bp, Homo sapiens
ccccagatctctcatatgctacattttagaattatttttcacacgtttcaggaaataattagcttacaattcaataaagaaatggttcgatgtaaaaagtaatcctatttctttccactgactcaactcctatactttcatacattatactggccatagatattaggaccactaagacaggtacatgaaacttgtcagaacagaactgtgacaaactatacttttcaagtatagtatacttgtatactatacaagtattccttctggctggtttgctcctttcctttggagaaaatacttggaaagtatttttgtttatttatgttttactagatattgttctaagacccagagtaatgatgtgaagtcttcgcagaataaaataaataaaaacaagtccttatttatttactatcacctacatgtcagacactgtgcactgtggtttacaaatcttaacgttaatattcaaaacactcttcaagaaaataccattatcaaataatgaaattaagactcagagatgctaagttactttctaaagattaagtaattagcaagtgactgaataaaacatgatttaaatccagatatatatgagttcaaaaaacatgcttttttctactgtaccagtcttctccacatgaaatgattgcaagtggtacaaaaaacatcatgaatcacattttgtttaggacatgcctgactatatttatattaagtcaagtaaatttgaaaaatgcctataaacgtataataggtaagacacagattttaaaaaaaacctaagtgtgatacataaacatctgagttttgaaaatcactgcactacatcatgttgaagggatgtgtactttccctagtctctggtctcaagccaaatgtggctccagcagacagtatgaaggtcgctataacactggaagtcagtcagcacttgctgcagctccaccaccccacatagaaaagcactgaatttttagtttctcgtctctggccactgttgatccctggggccaccatatcctcaggcccggccttggcctactctcagccccaactcatgccaatatcccaattctctttagctgcctcctcacagcctccttgatctccttgttgcgcaagctgtagatgaaggggttgaggaagggtgtgagcactgagtagaccactgccagggcctggtcatagtccagtgagtagctcttcttcagctgcacatacatggaaaggatgctcccatagaagatgagaaccacagtgaagtgggaggcacacgtggagatggccttcctcttgccggcagctgagggaattctgagcactgtgcagatgatctgcacataggagcagaggatcagcaggaaggtggctaggatcttgcaggaatttataacaaaatctactaggacatttatagacgtatcagtgcaagccaaactcagcacaggagggaagtcacaaaagacgtgctgaatgcgattggggccacagaatgggaggcgtgaaatcaaggaaatttcaactactggcccagccaagcctcccaaccaacagccaatggcaatctctgcacaaagtgttggggtcatgagggttgggtagtggaggggccggcagatggctaaatacctatcgtaggccatagctgtcaggagatagcactcagtcgctccaagggagtgaaagaaatagatctgcaggagacacccagagaatgaaatggtctttttctcactgagcaagtttgccagcatcttagggatggtggcagctgtatagccaagctctgagaaggagagaatgctgacaaagtggtacatgggtgtgtgaagccgggagtccaggcagaccaccaggaatatcagcaggtttcccaacacagtcatgaggtaaatgagaagcaacaagaggaagagataaatctggacaccctggagatgggggaagcccaagatgatgaattctgctacctggctccagttccctgtgtccattgctcaccattcatgtccctagatgtgaagtgtggaaggataggaaagaaagttgaactatagggttctaacaagaaggcaaccctcaaattactattgccctcccttctctcacctccagagtaaagccctctaagtaaatgctttgagaggtcaacatttcaattccatccctccctgcccttcctgtcaacagcctccttcagactattcacctttatgtttagtcttccctgattaacacagctcatttttggccttcctaatccatcctgtaacccagttgactttctcaatagaatctatatagattttagaaatttaggtatttctaatccaaggtatatattaacatttatacatattgttcatctaaggtaaaaatcatcatttatactgataatatattgataccgtactggaccaaatatatataatttgaatattattttctaatttctcattttaatttgttttcttcttcaactttctggctaccaaagaatcaattgttttcccttctgctccctcctattcctttatgagaactcaggtctgctagcatctttcaggggcatgtaggtcagaatttagacctcttttggacactggtgagagctccagtcaaaaataagaaggttagagtaaataaaaaagccaaagaaagacaggaggcaaatctatctttctgcatttcaacttcagactgtggccacttcatcagttcttcctgccatttccccctctatcaacttcaaatgctcttttctggtttattgcttctgtagatattaaatatacatgctctactgtgttgaggtcaatgtaacaataattgattattttcagtactctgggcattatacttagaacagggactaaacaaataaaatgtggcacctgatgttaacaaactaatattgtaatacagagtatagagaaacaactaactattatacagctctttcatggaatactctatcaatgtaaaaacatgctattattctcatctactaaacaaacaaaaaagcaagagccttaaattctttctctttactcatcccacagccactgctctatttctttctatgtccctaaaagaaaactcttccaagagtcggctatacgcattgcctttaatgcctctctttaagtttcttcttaaacccactctaattagatttatactaccaccactccattaaaacctcctttctcatagacattaattatctaagatttcctggatccaatggtcatttctcattcctcagcttacttggactatctgtttcttgacagtattgatttatccagcctgttcacacacttccttgacttgattctcggggtactatacttttggttactttctatcttattagtcattccttctcattctccaactttagtttctcctccatgccccatccttttaatgtcacagtgcccatggtcagtgtttaatcttttttttttctcttctatataaactcaactcctctgctctataccatccaataccagagctttaaacactataaatgtgttgaagacatctaaatccatatctcaggcgatatttttctctgctactccagactcatatatttcactgcctactcacatctcctcttgggagtcgaagagccatctcaaactgaactcctggggtctctacccctagtcttccccatcacaaatgatggcaattgcaatctttcaactgacaagctaaactcctgcagtcatccttgtttctatctttctctcatatatccaggaactgactatgtttgaccacctcggtccaagtcacttttatctctcccctcttactgtaattgactcctaacagatctccctacttgcatttgttcacttgtagcctcatctcaacacaccagagtgatcctgttaaattctaaattaggttctgcgtttccatcgatcaaatgtgttcagtgacatatcatttaaaacctttgctgtagctctttc

SEQ ID NO: 1523 - DNA, 4001 bp, Homo sapiens
ggtagaatattattacattaatccaattgagagatgttggtaatttacaccagggtagaaacactaaagagtataagaaataaattgatttaagaatatattttgtgaaaagattgttggcatacattaataattgattggaattatggttgtaagaaaaggaagcaaaatagaatatttaaaattttctagaagaaacacaaggaaacaaaagcatcaagctttcatggttagaaattttaagaaatcaattttgacatgttaagttttaaattattgacaagtccaatccaggcagtgttgataagtaggaagttgaatatataaatctaaatctcagagaaaaattgtggtttggagataaaaatttaagaggccttgtgatagagatcatatttaaatccataagaataactccgagtatctagggagatagcacggcaggacaacgaagactgggaaagactcacaagaaagataagaaaattgggaggtaatgatgtcatgagagttagggagagttaaggagtaaaaagttaggagaattgaggcataaaaactggtcatgtgtgtcaagagttcaggagagaggaaggaaaagaagtttctcatggatttggcagcattgaggtcaataatggccttcacaaaatattagttggaaggtctgagccaaaataagattggaatgggttgagaagtggatatgaagtaaagaagaggaaatatggtgtgttgagaagtttgattggaaaaaggaacagagaaatcgatctctagctggatggaaatgtgtggacctaggaaatatacatgcttttttttaaaaaaagaagtatgtagatactaaaatattcttaaatgctgacataagtgatcgagtaaaaaatagaaataaagatgtagaaaatgagaaaatcataaagaaatgaagtctttgaagaggtgaaaggaaatgaaattcagagcatgtgtgatgatgggaagattactcaaggaacttttatgaattgaacattgaggtgagaaaggacatgggaagaaagtcaaagatgagcaagactagctttatctcccttctggaagatggtcctcttgatagctttaatgatttccttgttacgaagactgtagataattggattgaccattggtgttagtacggagtaaactatagcaagtgttcggtcaagggtcagggaatagctcttctttagccgcacatacatgaagatgatgctcccaaagaagatgaggaccacagcaagatgtgaggcacaggtagaaaaggccttctttcttcctgatgctgtttttatcttcagcacagccccaatgatccttgcataagaaatcatgataaagaagaaagtgataagaattatgaaagcattaatggcaaagtccaccagaatgttagcagatgtgtccttgcaggccaagctcagcaaaggtggaaagtcacagaaaatgtgttggatttcattgtaagcacaaaatgggagctgggaggcaaggatgacctcagaaatgggacacaggaagccacaagtccaacaagcagcagccatcttggcacagagtgtggtggtcataattatagggtagtggaggggccgacaaatggccaggtatctatcataggccatggctgtaagaaggtagcattcagacgctcccaaggagtggaagaagtaggtctgaaggaggcatcctgcaaaagaaatggttttcttctcactgagaatattagacaacatcttagggatagtggtagctgtataccacaactccaagaaggaaagaacactgacaaagtggtacataggtgtgtgcagagctgcatccagtcggatgactgagaagatgagcatgttaccacagatggtgaacaggtatgccaatagcagcaggacaaaaagccagcccctgacatagcccacactggcaaagccaaggaacacaaattcagccaggcttgaatggttgtattgatccatgggaggctgaggtaaagaaggaaagaagaaaacattggattgagatgactgctgaatccatgccaaaacttcatttctctctctctctttttaacttaaaagtagcactgaaattactactgttgccctcactactattactattactgtaaaaatattaatagctaactcttattagcacttactattcatcatttttacaagtgtcttgcattcaatatttacttaatttttatacttcaatgagataagcaccattgttctgcctattttgcaaataagaaaacttgggaatagagagaaggaagtaattagaacacttttgtatttcctatagatactatttcacagaaacaacatttagaccatcctcaagcattctagctctatactatatgactgttcccaaacattctaactcctcttcccaggtcatagcttttccttcagtaaagacttaaagagtgaattttgggtatgagattaatgtagtagcaaatattttcctattgttcaattcacctctataaacatttattgaacaaatatgtgtcaggcagaaagaacacaaaattcagcaaggtacaatctctgccaccaggcagcttacaaccctgtagagaagcagacatctcaataggatttgtaaagtacagaacacttcagtgtgcctgagaagtggctcatttctcaggtcaggatgactgaaaaaaaacttttagaggaagcccgtaagatgaattttccaagaagatctgggatcagctgtgtaaaagagaaaaagaaatatttcagacaaaaataaaagcatcgagcagcaagcagctcacatgaaggaaacacatgttcccctctatggtaaccaaactgggaaagctcactcaatgctttaagaccttagctccatagatgcagggcatcactgaagaatgtttgctagatgagtgactggtcagatgtagacttttaaaacataagtaaaatttaactattctgacctcaagctcggagatgaaggtgtgaatttgccttgtgggtatggctgacaggaagatgggttagggtggttagcttgtttggtgtaagaatgcagattcggccgggcatggtgactcacgcctgtaatcccagcattttgggaggctgaggcgggtagatcacgaggtcgggagattgagaccatcctggctaacacggtgaaaccccgtctctactaaaaatacaaaaaaaaaatcagccgggcgtggtggcgggcacctgcagttcccagctactccggaggctgaggcaggagaatggagtgaacccgggaggtggagcttgcagtgagccgagatcgcgccactgcactccagcctgggcgacagtgcgagactgcgtctcaaaaaaaaaaaaaagaatgcagattcaaaaacaaacatgatagagtggcaataaacatgcatcttgtgttttcataaaatcaattatataaatacaggtgaagagtatatagctggcttggtgaaatttcatacaaaatagtattggacattctaattattcttaagcaaaatgtgtaacagatgcaaaaagaaaacaataacaaaaattcacaatgcaactttaaatgcataaaatggcaaccagtgccagtcacaccataccctgtgtagatcatactgcaattgaagagaaccgcccaattctagttatcatactgacaaaccagcctcttgcttattttcatcatcctgacactcgtcacaatggctgtcacattaaaagtattcaataagatattaataaccaaacgaattcatttaaacaattcatttaataattagtagaccaatactttccttgcaactctaccactcagccaatgccgaacatttctttcaaactcaaatgccctgcagtagaaatgaacttctgggtttgatattttagaatactaaattcattgaaagcaactgatacttaaaagactcttcttgattctcttctaacctaaagaga

SEQ ID NO: 1524 - DNA, 4001 bp, Homo sapiens
aatttgtgtaaatgagcctagattcaagataagaaaaatttctctgaacaattcaagtaactttccaaaaatcaaaggaacttgctagaatacctatgattcaggctatgaacctgagacatcccaattgccatagagatatctgcatcctatctatggctcttcaatcttctttcttatgaaggcattttctgttcttacaatcctttgactaggaacacaatttaaaatatttcactatcggtatagccctggcactaattacttaaaacaggtgctggccatagcgaaggagaagatctgtatataagctttctagaacattttacctactacctggtcaatatttgttaggtcaaccagctttacatgcccctgagattcaaagaagggagatggagaggatagttagccatattgagtcaagaatatatggctgaatatcagcactgcatctctctctgctttgactttcagtgaatatgagttttgtagataagatgatatgaaattaggtcttggggtataacctacttgtgtagtttcttatgaaagtgggatttgagaatctggatctttgaaattgttacactgaagtctaccaaatttttttcttggcatgtccaccagtaagttcccttgttttctcatattatattttctcacttacgaaataatgggcttggtctagactagggaatcccaaactgtctatgaaataggaattcccaggaagttttgaatattattcacggcagggttacattccacacatactcagtaagactctccacatatttttttgggggaatctgtattttaacaaattcccaggtgattcttctgtagctagtccaaccttagtttgaaaacccctgtaaaaaataaatgattcataaagtttcatttgtatcagaaggtcccagacaatatttagagaaaatgttggcaaattatatttatgttcccttaaagcctattctgattccttgaggaggccctattaagattctgctattttcacctctcccaagacctgttgtatatcagtcctgaacatccctaggatagtgacatctgcccatcactgtcttcctgaaggcctccttcacctccttgttcctcaggcagtagatggctgggttgaagaatggtacaatgatagtgtagagcacagagataatcttgttgtggttgaaggtgtacatggcccggggccgtgcataggtgaagagagtggaggagtagtagataacaaccactgccagatgagcggcacaagtggaaaaggctttgtggcgtcccctggacgtagggatcctcaggatggctgcaatgatggcagtgtatgatgaaaccacagccaatagagggagtagaatcatcaccagggccagaaggaagtctactagctctgcttgctccttgtcagagcaggtgaggttgagtagtggggaaatatcacagaaaaagtggttgataatgttgggtccacagtaggacaattgggaaataaaaagaagcttcatcatggagctgaagaagccactgccccaagaggcagcagcaaggcgagtggccagactggaaggcatgagactagggtaaaggaggggtccacagatggccaggtagcgatcataggccataactgccaacagcacacattcagtacaggctaaggcaataaagaagtacagttgggtcatgcaacctacgtaggagactctaccatcctgggtaagaaaggctgccaagagccgaggaatggtgacattgatgtaccatagctccaggaaagagagatggccaaggaaaaagtacatgggacgatgaaggcttggagcaagccatattgtgaagacaataagtgcattctccaacaatgtcagaaggtaaattgcaaaaaaaaggacaaagaggagcagctggaggggaggcgtggtagggaaacccaccaagacaaactcctcgacatggcctccactcaaatttctcatggctctctgtccacttgagtgcctaaaataaatcacaggaagaacaagaggtttgaaagatagctgcaacaaaccaccaacatactctcacaggttataaccactgaagagcttagtggcatattaattattataacatttttcctcttcactttgctgttttttctctcaccttataggaaaagttaacagacctgagtactcaattacctagcaatcttaactacagtgggtatttgataaatactttctgagtgatttcagaactgcttggcattttgattcttgttttcttgtccaggacatgctcttcctttacatcccttagaaacaacaataaactcctaagcccacagcacctttactcagtatctgttgaatgagggaataaaagaaagtgtgacagcaagctagagcctacaagcttatttctcaagggaaattgtactaaggggaagtaataactcaaggagattgcttgaactataatgcaaggcaacacggcagtatgaagattgctctgaaaaatattcatttccaaatagagagacaattcaatacaaaggagataatgaagttctgctccagagaatagttatttttccgttcactttacatatatttttgaatacatttgtagtgctagaattaggcagtcttatttccaggaggtataacagattaaaaaattgaacttctgaaagttgtacatgtcttaattcctggaatctataaatgttacatcatacggcaaatattttgcaaatgtgattaaattaaggactttgagatggagggcttatcctggattttctaggtgggccttaaatacaatgaaaaaggtctttacaagacagagatagagtgaaatttgaaacggacacacagaggagaaggcaatgtaaagatgaagcagagacagatttaaggatgctggccttggagactgcaatgatttggccacaagatctttatcttgaatgaatgcccacagccatcagaagctaaaagaggcaagaagaatttctcaagagcctccagagggagtgcggctctgcctgtgccttgaattgagccaagtgatactgattttggatttctggcctccagaactgtgagaaaataactctctgttgttaaaacccaccatatttgtggcagtttgttacagtagccatgggaaactgatgcaactggtgaggcaggaaaatgaaagaggaagtcattttctcaaccattcttctatgcttttccagtcttcttttaacattgtcagtgacctgacgtctccagggagaccctggtaaaattacaagtctgacttgagattgggtgacatgtcattaagcatttttacttttggtgtgatataagtacctgtctttaaacattattttcctctaagaaacttaaaaaatgatatactaatttgcatagttttaacttgacatcaaattttttatttttatttttatttttaaaggatgagtccttgctgtgttcttcaggctggactcaaactcctgggctcaaggaatcctttcacttcagcctcctgtgtagctaggactacaggcacaacatctactttttatcagacatttatgtggccacagggagtctaattttttactgcattatgagaattgaacttttaaatgaaactattagattacttctttatgtattcaatgaaatctaatgaaatctaaatatcagtgctatggtaatgatatccactgatacttgtttaaacaagtacacaaatgagcgtatctttttaaaactggaaattttaaatcatttatttcaccaaagtcacaattcatggtattgtaatatatttataattgcaagtcttttattgatttctctgtatcatctacctacatgtttattgtttcctgtacttttaagactatgagtgctttataaaagattttctctagctgttatataattagcatacatttacctaaagcaatataaatataaatatat

SEQ ID NO: 1525 - DNA, 4001 bp, Homo sapiens
tctttcctctgtgtgtgtctgtgtccaaatttttcctttttataatgacaccagtcatattgtcttagggcccaccctagcagtcaaattttagctcgattaccactataaaaaccctactttcaaatatggtcacattctgagagactggggttaggacaacatacttttttggagggagggaggagtgggacataactttgcccataacaactacctatttttaaaattatgtttatatacttaacttgtttttccattgagagtttaatttttataagtttattttaaagtgttttttaatatttaaggttggtatatgttattataacattaataataaaaattagtaatagttttcactttgttatttggtataaacttaatcttttgtttttaaacgccttaacaaattagtcatttatgttatttggagggaagtgggtggggactccctatgttgaccaggctgggcccaagttcctggactcaggggatcctcctgcctcagtctcttgagtagctgggactacaggtatgtgccactgtgcctaacaggcattaatttatgttgaactttttcttttacttctacaatatagagtgtttaaaaacccttttctaaccatctgagagatgaacgatggttttattctttatatttaattgtttgtcctgtatggcatttattttgataagttgtgtggaaaaagtattcatcttcctcctttcctccctcctaccacccactctctctgtctctctctctgtgtttcttcctgatttcaaatagcttttctaacattttaaaacttgtctctcagcctgataccagaggttacttcttgagaacatgtttctccagtcatgattgtgtatacacacacacacacatgcacacacacacagaggagagcagtgttacagtactggagattgggggataaccaaagacaagactgagggggaaagtgtgtagtgatcatctctcagttcaagcctgaaaggaatctatacattttttaactactgaaagccccatttccctggggcccacttcctctgcaatgtatggtctttctgagggctgcctttacttcatggttcctcagacagtaaatgatggggttgaggagtggaacaatgacagtgtagagaacagataccactttgttggaattgtaggcatacatgagtttgggacgggcataggtgaaaagtgtcatggaatagaagagaattacgacggtcaggtgggaggcacaggtggagaatgccttttggcggccctgagcagaagggatcctgaggatggtggcaaggatagcagcgtaggatgccaccacaacacaaagaggaatagcaatgaccatgagggccaagaagaagtccaccatctcagcctgtgaggcatcctcacaggagacgttaaggagtggagagatatcacaaaagtagtgattgatctgaggcatgccacagtagtgaagttgtgctataaaaaccatcttaatcatggcagtcatgagtccacagaaccagcatcctccagccagtgtgccacagagctggttggtcatgatgactgggtagcgtagtggattacaaatggctacatagcggtcaaaggccatgatagcaagaaggatgtactcagtgcagacaaaggtcacaaaaaagtaaagttgagtcatgcagccattgaaggaaatactcttgtcatgactgaggaagtcaacaagcatcttggggctgatgactgtgacataccacatctccaggaaggagaggtggctcaagaagaagtacatgggcttatgcagctgcccatcactgtggatagctaagatgataagaagattctccagcagtgtcagcagataggttgccaggaaaatggagaaaaagagaagctggaaggctggtcgtgttggaaaccccagaagaatgaaacgtgttgtcactgtatgattatctacttccagaattatggtggtcatgactggctgtgggcacagacaaagtcagttccttccatgacacaagcactagtctatggttatttgtattgatagagcccaccaccagcaaatttatcacaataggaggtttctgcttttttatcttactgcctcttgaattatgaagagaaccaaagcttttgagaaaagatggaatttagggagcttatattttaacttgttttcagattttctcaagagcagtaacttgtccaaggtcatacaaaatagagtttataactttctaaatcccagttctgtgctttaccaatatatcacttttgggcacataaatggtctccagaccaccctttcactacaggcaaaacatccccatctgctgaatatggagaagagaaagaaggcccaactacccattctctaggggcaatttgggtgactctggagtggttgcatgaccccacttatctgtaaaatggagagaacgttcttgcttgtgtctaacaatgtgcttaagcttgaatgaagcaatagttgagcatacccacaggattaacagcaaaatcaggtttgatgcaattattcaccagcttttcagagaacaaaattgaatggataacatgaagggtaatagtttcttcaatacaatccattgtataaagtgcttgcttaggagtttgacaaaagtgcattcaaatccaacttttgtctttgtatagctaagtgagagtaccacataatcttttagaatattagttactttatttctaaaatggggataatacaatggggttcacattttgtgaacatcaaatgggatttagagtttaaattcagttcctatgatatttgctgtgacctttccaggctactttacttaccccacatacatagctcctcctccttttaaaaaaacacacactccaccccacacaaagtttcccccaccccaacttcaacccctgccaaaaacagcaaaaaactggtgcaaacagcagccattgttaatgaaaaaagggagaggaccgtgggacttttccaagggtaataaatttaaaaactgtaatctgttgggagtaatatcagagaaaacaagcaagaattctattagtgactcttctgcatttctgttcattaatttagcaaaatgtgtgacctctttttgtgttaggctgataatcattcccaaacccattgatactaaacaccttcccatttcaagtcttgctctgtgtcctattgcttcaattctcttttctgctcttctccagagccacagtcactcttgatccccatttctcaacagctctattttatggcataaatatgtaggacaactaggggatggtttttttttttttttaaggaatgatcatgaggttgcagagccagaaaactactgcccatactatccatttcctcttcccacttagatttcagctttagattcctgaaagaaaggcagaatagaaaggcaggattattccttctgagagagggaaatggacacagataacccagaaaaggcaaagaatatataacagtgtaaatgcaaataattttcttttctgttggaatatagttcctgagaaacacatgcacaaacacaaacacacacacagtcaacacaaaacttgtccttgctcattgcagcttggtattcactaggcagtgtgagagtgggacttacaagcaaggcaaggtttatgaatcctccttatctttttcttcatcctgatttaaaaaaatatctttgagtccaaaaattcaaaccaacttaaaatctatttgtgaagagtgtaggccagtctccatcttgctctctcttactatatcaccaccattttcaatgaattgatgaaatgaacatgtttctagctattgagggtagtattactgtttgggaggcactttcttggtccatagtgataggataccagtctccagagccatgtccttgggcttaatctttgtgtctattttttaaaaatattctggaaaactacaggcaagacatta

SEQ ID NO: 1526 - DNA, 4001 bp, Homo sapiens
ggaaaacagaaaggtcaattcctaagaaatgaaactgtaacatttagaaatactaggaataaggcagaacaataggtgtaaaacatctaacaaagtgaaattaaaagacagtgatacaggggttgtaaatgtcttcatgacgcttataaaatgcacacaaggataaaacagaaatacaaaggctgggcgcagtggctcacgcctgtaatcccagcattttgagaggctgaggtgggtggatcacctgaggtcaggagttcgggaccagcctggccaacatggtgaaaccccgtctctactaaaaatacaaaaatcaggtgggcatggtggcaggcaaatcacttgaacccgggaggtggaggctgcagtgagccgagatcgcaacactgcactctagtctgggtgacagagcagaactctgtctcaaaataaaaaaaagaaaagtagatgttattatcacttcaaggtgataacttatcctatcttatacaggatggcacagccttaactcaaacccggaaaagccagactgcaattactgtgctcttaactacttcaccttacaacacactgtgtgaaactggataatgttaatatgtaactgagagcttgcttttggtgtacttattacaataaatcaggcttcccagccactgactgaacattgtggattgggcctcaatttgcttacccacaaaatggagaaaatagaatcttccgtttattcaaccaatatttattaagtacccatcgtgtgccaggcactattttaggataatggaagattaagtgaaaaaatgcaaaatggtaaatccactttcccactaccttaatcccttgcatttatttgtaaggtacagtggttttatttattaagtatcatttgatgaatactatggaactaacataattcaagcaaaattttgcattcaatttcggcagattcacaaacctcctaaagtccacatattgccctccattaaagttaaaaactgttgcaaagggacttaaaccattctgtcatattggaaactcctttggcatttccagcccacctaacacagcagagacgagggtactattattcatgtgttacagacaactagaatcgtatataatcattgcagtttcacaaatagatcaggataagaatgccttttccaactgtcacagcagaagactcttcaattccggggttagaaaagagaagtaggaagggggccaccagacttctcttctgaaaagaaggtgaatgacagacagcccagcagttaggagctcatctgaaaaaaagatctgggtaggagcccagactgcttagtcacgaaaagcgacctaagacacgtccctccctgggcgcaatttacgtccgtaaaatggggtaataacctctgctccgccttccctgtagtggttcctacactatagctcaaagaacgaaacaagtagagtgctttacaaatgcagatggagggaaagtcatcactgagcatcagggtgcggagggcaggaatgctcctgcttctaggctgttggcttccgccttcccccctgcaaactcagttccctgcagcgcgggaagccttttaggaatcggagtgtggaacagaggaacgctcttaacagttcagaacagtgcctggcactgaacaggcgcttggtacatgtcagctaaaagaatcaatgactgagtctacagagaacgtcctcagtttcagaggttccgatgcgccctcccccgagtccctcgcagcccgctggacgccacactcacccggctccaaagcttcctccggctagccgcaagccctccgtttcctaccgcctccacttcgagagctccgggggatgcggcacctctaacctgcaccagcagggctccttctacaactacgggccgaaagccaggaccaaagcgtgtgtctcactagaaatgaaaagaaggtggaaggagaaaagaaaacttcgcgccaatcggcgtggccccgcccccagaccgtcccttcgttgcgacaccaactagctcgccccgcccactccgtacacctaagaggggcgcatgacgtacatccgctaacatgcagccgccatcattgattcgataggcgacgcggggagcggaagccctttacactacggtgtttccggcttcaagatggtcgcctaagctgtttagtgaaacttcttccacctttctccattcctctaggtgctttttctgaacctggatgtgaggcattaaaggatccgacggaaatagaattgaaggcattctaaaatggctaaccgtacagtgaaggatgcgcacagcatccatggcaccaaccctcaatatctggtggagaagatcattcgaacgcgaatctatgagtccaagtactggaaagaggagtgctttggacttacaggtaagtggaagcgcgcggagcgcctctcagcccccttgtggcccatttctcctgaccgagcgcgggtaggactagcgactggcctctgggggtggtactggaacggagtatgtcgatcattcagaaaaattttgagtgcctgctaagtgcctcgtcttgtgttgagtattagaggcacagatgaatctggtaaggtcatattctgaaggctgtctcagttgggtgttgtgagttattccgtatttaatgatagcaggctgggttgcaacagtgttaagctcagggatccggatataacactttgacacaatctgttgaaggtctttaaggacctaacgttaatatgcctgaaaccaaattcatgatcttactattcttagatctgggccggttccagtatttataaatatcagtgcttcagagaagtcttccaggtaatcttccgatttgaattgtggctttaaatccatgtcctgtgacaatctgtggaccttgagcaagtcactttacctttcttagccctcattttccttacctggaaataagaacattgctagaactttcttcatgacttgttaaaaaaggttaagtgagataatatgaaaagcttagcagggtacctattttattatccattctcaatgtatattagctgttgtcgttactgttattaatacacattcgttctcctaatattacactgttgatgtatatttaggagaaccaaagcttgaactaactccactccaactaggaagagcttagccctaatatgttactgtattgtttttgttttttagctgaacttgtagtcgataaagccatggagttaaggtttgtgggtggcgtctatggtggcaacataaaaccaacaccctttctgtgtttaaccttgaagatgcttcaaattcaacccgagaaggatatcattgtagagtttatcaaaaatgaagatttcaagtgagtgcaatgttcactagctaatataagaggtttaattttggcggtttagaattgggctttggttaagaggggtgtacacaatgtatctcatttctagagagttccactccagatttttgcttttgagcccttgagtttgtattttttgtttgttttttgttttggaaacagagtctctctgtgttgcccaggctggagtgcagtggtgcgatctcggcccactgcaacccccatttcctgggttcaagtgattctcctgtctcagcctcccgagtagctgggattacaggcatgtgccatcacgcctggctaatttttgtatttttagtagagatggggtttcaccatgttggccaggctggtctcgaactccagacttcaggtaatcccctccccccccgggcctcccagagtgctgggattacaggcatgagccaccacaccctgccaagtttgtattttatctgttctgattgtattaatcttctactttactttctcagttttggtaatttttccctgaaaaaggatttcacagattcactaaatacatattaagcaaaagtgagtgcctgatatgttggtaggcactggacgctcaggggtgaaaatcaaacaacaaaaggtggt

SEQ ID NO: 1527 - DNA, 4001 bp, Homo sapiens
atctgtttttttctttaagagttttttttttttttttttgagacagactcttgctctgtcgccaggctggagtgcagtggcacgatctcggctcactgtaagctccccctccagggtttatgcgattctcctgcctcagcctcccgagtagctgggactacaggcgcccgccaccacgcccggctaatttttgtgtttttagtagagacggggtttcaccatgttggccagtctggtctcgaacccctgacctcaagagatccggccgcctcggcctcccaaagtgctgggattataggcagcactgtaattacaggcgtgagctactgcgcccgcctttttgttttgttttgttttgctttgagacagagtcttgctctctgtcatccaggctagagtgcagcggtgcaatcatagctcaccgcaacctcaaacttctgggctcaagggatccttccgcctcagcttcccaagcaggtgggaacacaggtgcacatcaccaccacgctcagctcatttttaaatttttattggggcaggggcggggggaaggttctggctttgttgcccaggctggtctccagctcctggactcaaacaattctcccgcctcagcctcccaaagtgttgggattgcagtctgagccaccacgactggcccaaatctgacttttaatcatacaccttccctgaactagaaaaggtaatacggtatttttatttaggttgtctcttgtcgggctgcacaaaaaaaaaaaggtgggggggagtaaagcaatatatttaaagtataaataaatgacaggtgctaacagtattcattaaagggtttcatcaactacttagttcaatacaggcagtgttcaagagagattattcataattaactacgtgagaatttccagtttcaaagttcactgtaaaaacttttaaaactacaactactattctaagatgcttccagcttctccactgagaaactaggaattacttgattttaacttccttaatacagctaaaagtaaacagtttaatcaaaaagcaaaacaaagtattacttcaaattagcaaaactggttttcttgttcaatacatctctcaacctttcataacaaatacttataatacagtatgaatgtcagcaaaaagtgcattactcaaatatgcttcctagtccattaattatactcaactttccataactcggctgggctaagaaccccataaaactataccaaagttttcagtatttttgcacaagctacccaaaaagcgtaaaatcacctccttcccgacacacatactcaaaaacaatagcatccgtaattactttatacacaaaaaatacagggccaggcacgaacaccgtgccaaaaataaaccaccaccaaaaaacacttggcctgcaactggagattctattaatgggcaactggtcaaaattaagctttcacataagagaaagcttaacttttctgcttaaaatcatattctgagacagctttcaaaaggaaaacagagttccacaaaaatgaatagaaaaaaagagacctcctccaaagtctcatttgggggcgaatgccctctcggtggaactggaggccctgacctcagcctccaccccatctaggctgaggaactgagaactcccaaggaagaggggcccgggcagccacgtcgtcctactcaccccagggggcggcgggaaggaggcagggtgagcacgacattcgcgctccggcctggcggccgggaccccggggactcaggggtaggggccggcccctctcccagaccctcggggtctactcactccgcaagtggccagcaagaaagccattcgccaaggcccccgccctctgtgcctccaggggaggtagccgggggctgctcccgagcacccctttttcttctcccctcgacccgatccccggactgcggtgcaggcggtcctgactgaggttcagcccgtcccccgggacacccccttcacccccttcaccccccacccctttcccgtcccctccccggcggaggggtcgccccgattggctggccctggcggctcctggcaaagagacccctggcgattggccatgggtcacctgctgtaggaggtgagaggcagacgattggcggttgggccagttttgggtggagaggccgagggagctggcagctcgcgggaggggtgcgcagcggcgggagggcgtccggagcgccccgcccagacccgcgacccagccgcctccgtggggggcgggggttcaccttgggggagtgcgcctggggacacgcggcttctgcggcgccggcgctgctgggggaaagggaggttgcgctctgggacgctcagcctggtttcggggcttcagccccgcggattcccactgggtagcggctggagaagggcccgcgggcgccagcgtgcctcacctacacccaccggcttctaacgtgccatccagtttatggcagctgtggagcctggtccccggagtttcaccttgataacggattttgcttacttccggaaagttgtgtcgcgtgggggttgatggagtgaggggaggaggagatactatatcggtaaacaaaagcgtgagcgcctatatttttattaatccggtgagacatcgtgggcttgctgttgtgccacagctccataaggaatgtaggtggcttgtaaagatgcttcaggaatccaaatggcgcaaactgcagattatatcaaaagtctggacttaagaggacctcgacagagaatcacccaaaatgcagggaatcacaaacataagtgattaacttattgatctggaggactagctccttttccgctcttgctggtttttcttatggttaggtatcttcctatcccgccccctttcaggactctactaaacgtccaattatcttttgtacttttatgtctctactggtacccactgcaagacctagcacagggcacactgcacaaacagcgcgatgctggccaggcgcggtggctcactcctgaaatcccagcactttgggaggcggaggctgggagaggcgggggaaggagggaggattcgaggccaggagttgaagaccccaaaaacaacaaaaaaaggtgcaatgcttgctgaataaatatgctaacctgctggactcagtgttaaagataccttcagtttgttgtatgtaaatcacttcaaaatgcccaacaccagatgcactctccccttccccctacccactctaaaagctgggtactctgccagggctccctgtctcagtaaatgaaactgctatcatccaccctaatacgcaaaccataaacctagtagtcctcctagacaccttccccatttcacattcagtgcatcaccaagttctgtcatttttacctcctaaatacactctccattctgtccatctctctccattgccaccaccctataacaggtcctggcctgttggaataatcttactaaagtcttcttgaatctactctggctactccaattcattctcaacactagagccagagcagtatttctataaccaattttattaccccttcattgcctcccccaattaaagaactttaactgctttccactgagttgtgcttaggatacaattcaatatttaacaatggctgacaaggtttagccttacctaccgcttagctccatcttttaccttgtagtacctattttctgctttgcacacaatggcctttttcaaactcctttaatttgccaaggactttccaattttagggccttggcgcatgctgttatttcttttatactgtccccttgacatcaatccccacacttcacttatttacttctactcatcatcatttcctccctgccaatgtcagttcttgctatcttacatcgtcatagcccatgtaactctcctttgtagaacttactacagctgtaattttacatttatcttagttatttatttaaatttttttagagacaaagtctcacaggtctcat

SEQ ID NO: 1528 - DNA, 4001 bp, Homo sapiens
tagtagaaaaagtcaataatttggcatcctgattccatcacttagtgctatgtgatgttgagcaaattgctttaaaagcctggagcctcagatttcaaaactgtaactggggatattaaatggagataatgaataaccaccttgcagagttattaggagtgaaatgaattaaaggactcaccaagctagtatataagctccagagaagaggaacagtgaatgtcttttttactgtctattcttgctggcatgaaaacgcacatagcagctcaataatattttttaaatgaacaaataaattcagtgtcccctttctctcatcaaccttaatccttcttccataatcatgtttttctttctgtcttctattattttctaaagctttctgggcattctattttgtcctcttatgtattttcttccctcatatcggctatcgtcaactatacaccattcagagaaagtacctttctaagtaagttatctccctaataccacctactctccatatcgaatgcgatgagggtggaggggatagtcaaaacataagattcaaggccggacgcggtggctcacgtctgtaatcccagtactttgggaggccgaggcgggtggatcacctgaggtcaggagttcaagaccagcctggccaacatggtgaaaccccgtctctactaaaaatacaagaattagcagggtgtggtggcgcatgcctgtgatcccagctactagggaggccagaggcaggagaatcgcttgaacccgagaggcagaagttgcagtgagccgagatgatgccattgcacgccagcctgggcaacagggcgagactccgtctcaaaaaaaaaaccacacacacacacacacacacacacacaaccacgtaagattcacagcaattcatctacttttccacggccaccaactcatgttaacaacagtgaagccctgaacccagaatgtaactgtaaggggacactgcactatcacttgtctctcttcgctgacaagagtctcgcgtgtaggaaatccttggctctcaaaagttaaggcgtcgtttgagctcgcctcccgctaaatagaggggtgcgtcccttgaatgagacacacaacctgaaccgactggagggatttcggaccccctggtgttgcccgagggctggtcacttttggacctgtcccggctcctctggccactcctccgaggaagcagagctcttcaatccctggagggaagctaaggggtgcggccggctacagggccttggtgggacagtgtaaagtccatgacaacatatgaagacagcatgaaccgcaagactggaccttttaagccatgactacgatcacccttacccgctcacaaccatgctggaccccactaccgcttaatagcggaccctaagaaagaaacttggctcacccccaacccataaatcagacagctagtttctatttattggctgcgcccctctctccctcaccctcattggctatccgagacgtaaaaccctccccaacaagggaaccctcgcgtacggcggcacccccagactagcaacctcaactcagccacctaaaaccccggtcccccacctccacccaggaaacgcggccccgaggcgcctggagctgtgccctccaaggactcaccgtgtagtaggagagcagtcctgcattgtagtccagcacgaaccaacggtactgccagcccttcatcacgttagtccatttgctcagcggcccttccatgatggacgccatcttgggagccgccaatgacaacaaacggcctgacgtcactcgcctatatggcattcagcatgcggggggcggggccgcagggggcggggcgggtcctgggcgggtcctgggcggtgccggcagatgctccagcgatcaagtcaaacacgctttcttagggcgcctattgtgtgtaggactccatgccacggatgcgagaatgcaaacgtgaatactgctattaagattatttataatctgtcatgggattagagtaaagaaaaaagattatgaacatattaataaataattttactggccatgataccttccacttccaaaagatttcatatctgatattcatttatgcattcattccacaaatccattcatttaataaatattcgctgttttgtgctaggcattcttctagacattggggatacaacagagccttcatgacaggtgaggggaatggtaaaataaatagtaaattatatcgtacattaaaaaatcataaatgctatggagaaaaacataagcaaggaaggagagagcgctgggactgctattttaaattcccaaacagggaaggcctgagtgaaaaggtaacttttaagcaaagacctgaagaaagcgaaggagggagcctggtggaagagccttccaagacgaaggaatagcaaatgcaaagaccaaatgttaggagtgagcgtggcatcttgagggatcaacaaggaggtcagtgtgcgtggagcagtgagccagggagaaagtggtgggagataaggtcaaagaagtagggatagatcactaacagcctacaggggcaatttaagcatttattggctgggcgcggtggctcgcacctgttatcccagcactttgggtggccgaggcaggcagatcacttgagatcaggcgttcgagaccagcctggccaacatggtaaaagcccatctctactaaacatacaaaaattatctgggcgtggtggcgcaccctgtagtcctagctgaggcacaagaatcacttgaacctcggagccgagattgcatcactgcactccagcctgggtgacagagccaaattctctctcacacaaaaaaaaaaaaaaaaaaaaaaaaaccaaaggatttattgaccacctactatatctaggcactgttggaggtcctgggaatacagcagtgaataagctctctcagagcttaaattctgtggtgaaagcaaacactaaacaagtaaacaagaaaaatatccaatactgattaacactgcaaataatttaataaattattttaataggaagtcagtgggtagctaatttatagggggtggttatagggcaggcctcttaggaagtggctttaaacttagatatggaggataagaaaaggccagccgtgcaaatatcaagagaaagagctaaaaaggaaactaaaagatgaggcactagctggaaacggaggtgtggtcaagggaagggctttctttgtccttttttaaaattattatttagatcgaagacactagagaatattactttgctgattttcaagagagggaaaaactggggacatcctagagaaaagagagaatagcagcagtgaagcccttcataagattgagacctctttttgtgttggcaaaacactggaataaaatacaaaaaaagaaagaaaggaaaagactgagaccccaagcccaagtgcaaaggttgacttttgatactagcagagatactttatccaaagtaacaagaaagaagagcagagagtatgggttcagatgccagtggatcagtagttagatggtatagaaatgaatgagtttctgttttttttgtttgttttgttttgttttgttttgtttttttgagatggagtttcactcttatcgcccaggctggagagcagtggcacgatctcggctcactgcaacctccacctcccaagttcaagagattctcttgccgcagcctcccaagtagctgggattacaggcgctcgcctggctaacttttgtatttttagtagagacgaggtttcaccatgttggccaggctggtctcaaactcctgacctcaggtgatccacccacttcggcctcccaaagtgttgggattacaggtgtgagccattgcgctgggcggagtttctacttctagttgaggagaggctcaaagcttagtacttaagaatgtggatcctggtgccatagtaccagggttttaatatccagattcatcacttagt

SEQ ID NO: 1529 - DNA, 4001 bp, Homo sapiens
caaagatgaataagacaatcaagcgggagatagacatatacacagatcatttcagtatagcatggccagtggtaaggtactgaggagcaggcatggggtgctatgggagcacaggctgctatgagagcatgcacaggccctttctgcatatggggaggattcctgaaggagatgattcttaagccgaataatgcaggattgaaggggaagaatgtagggatgggaattactagcacagaaatacgaacaaacatggtttaagcggagatctatgagcagtttggtattattgggaaacaggaggcaggcagtggtggaagaagggactgcagaggaagacagagatcagataaggaagggccctgaaatggcctgtgcaaggacttggtcttaacccagatggcagtggaaagctgacaaagggttttaggcaggggcaagtttggacagatacacattttagaaagctcattggcggcaatgtgcagaatgaatggagggggtatgttatagggagttatttttagctctttatgcatggacttgcactcagtcacacacacacaatagttaatatctgaatatgtatgcttagcatctgaatatgtatgttgaacatcaattgagcatacaaagattaatggagagaatgttttaattggcggccatgtcaattgccttttcaacttttcctcctccactttgaaatataatatttccttcatacttaatcctaggaaatttggtataagcaagttgtttgccgagaagggaggaaaagaggaaaaggaacagagtggcagagtgttctgagtcgtcatttttctggggattagtgtggtgtccatgggaggcagattttgcattttcgaagctctcatataattattttcacaattgtattcccctccaacacttgtgaggagatttataactttcttatttttttcatatttatctatattattttagaacaccaaatttctagaaatacttctgagatgagtaagaccaatctccagcttatgtgggaagatactaccataaagaaattaagaatctgaacctgggctggacgcggtggctcacgcctataatcccagcactttgggaggccgaggggggcagatcgtttgagtccaggaattgaagaccagcctgggaaacatggtgaaaccccatctctactaaaaatacaaaaattagctgggtgtggtggtgcatgcctgtaatcccagctacttgggaggctgaggcacgagaatcgctggaacccaggaggcagaggttgcagtgagccgagatcgtgccacacactccagcctgggcgacagagcgagaccctgtctcaaaaaaaaaaaaaaaaaaaaaaaaaaaaaaaaatcagaacctgttccttgggggtaaagaggatgcttggactagcaaggggtatgatactagatggtgggcagctgggactcctacatttggaaggcactgattgacaagagagactgggaaatcacctctcccatttgaagagatggggaaattagggaggtcaggcaccctagtgtccactgggagtattaagttcctctgctgtgaaaaaagcttttggggggatttgactcccgaggggctccaaatggatgtggcttgtaagaaaggtccctggttataagagtgaagtgtgtaggggtgcgggtctggctgtgggtgttagggcgatgatgagagggccgggctgctggctgcgggtctggctgagcgggccgggggcctctcacctttgcgggccttgtctcccgggatgttctgggcccgcagccgttggtcgaggatgtaaagcatctccccgcccaagttcaagaagagcagcggtagcgtccgcaccgacatggtgctggaaacgagctggactggtgaagagccccggggttcggtagccagtggcctgaaggccaggccgcagcgtcccaatagtccggttgctggggcaacgccgtgacgggaagagcgagccaatcagaaggcggtttggtgggaggtgccctgaagacgggagctaattggtctgggtggtggaccgtcccggggggattggtccgagccagaggccggcgcggcgttgggcgcggctggggagctgtgcttctgagagtaggtttccctcgaaagggcgagggccgggccagggctgggggtggtctcgacacagccagcccggcgcttgggaccccggccgctggcgcggggcctcaggttcctataacagaggaaagcccaggcagaacggcattagagcaggctcgggtcagacggacctgggttggaatcacggctcgtgatttcttgctgtgtgacttcgggcagggtttgagccttggcttcctcttacgtaacatggagctggcactcacatcacagggcggctgagaggaatcagtcagatcatggaaaggccccgaaagcactcaataaaaatggtaactgacttttcttttagacgagggaaggatcagaagtcctgagtcgtttgcatcgcctcccaaaagtttacttgaagtgaagcccctcctggtttcatactccatgaagcaaaccagtcccgtccgtccccgtgtgtccagttcccagaggatgcgcctgggggctctgggaagttccctcctcgacgctgttccgaaggcctcccaaccatttcttttttcttttttttttttttttgagacggattttgcccttgtcgctcaggctggagtgcagtggcgccatctcggctcattgcaacttccgccttcagggttcaagcgattctcctgcctcagcctcccgagtagctgggattacaggcgcccgccaccatgcccggctaatttttgtatttttagtagagacggggtttcaccatgttggccaggctggtctggaactcctgacctcaggtgatctgcccgcctgggcctcccaaagtgctgagattacaggcgtgagctatcacgcccggccccaaccatttctctttgagggcagcgactcccttccttacctccatcttaagctccaggattactttttgccatctgctgtatatttttactctgatgaacaaccatttctgtaaatttcagtacttccaaaacctactaattatctttccctccagctactcaaacttgaaacttgggccttggcttccaaatctgtttcccagggtcttttatcagtcatcatattatgctttttcctccaacacctttcttacattcatcccttcatttgtttttctgtctgcattgctatgttcctctgtatcactgttcttttctctcttctaccttgcactggctgctaagctaaatgtcagaagacatcacttttttttttttgagatggagtttcactcttgtcgcgcaggctggtgtgcaatggcacgatctcggcttactgcaacctccgcctcctggtttcaagcgattcttctgcctcagcctcctgagtaagctgggattacaggcatggaccagggcaccatgcccggctaattttgtatttttagtagagatggggtttcaccatgttggccaggctggtctcgaactcctgacctcaggtgatctgcccgcctcggcctcccaaagtgttgggattacaggcatgagccactgcgcccggccagcatcactgtcaacatgacacatcccttcagtggtttcctactctttgccagatcacagtctagatgccttggcatggcattccaggctctccacaggctccagctaccttttttttttttttttttttaaagagataggggtcttactttgttgcccaaggttggaatgcagtggcaccctggtggctcactgcagcctagaactcctagcctcaagtgattcttccacctcagactccttagttgttgggatttcaggtgagagccaccatacccggccaactacctttttaaagccatctcctgcacctggccacctcctctcccccagtccagt

SEQ ID NO: 1530 - DNA, 4001 bp, Homo sapiens
gtatgggggtgtggggatagggagcagaagtagtacccccaaagtttcccataaccttatgaaagccccctcaagagtttacaactccctgtgctaattcctcctcataagtaaccttctattgagtacttcagtttcctgggcaccctgacattgagaataccatacccagtatagcagacacaagcaatccaatcatttgcaaggaaaagccccaatgtcccacgccaattccactgtattcaattggtatttctgtttctataagggtgtcttgggcttatgcttaggctagctgacctccctctattatttttatatttcattcagcaaaaacgtactgactgccttccatgtaccaagcactttgccagatgatggtgaataaatgtaatcaagttccaactgcatcttaagcaaaaacagcaacgcagcaaagtgtggtgaactctttgtgagcaaaaagaaatccaatctgcctgaagcaatgagcataaacaggaacggtgggaaagggaaattaggaccagttcacagtcttaatcaataagctgcaatgtaatgtgaaaatttttaaaacaccttattctgcagttaatatctaaggcaattcctggccgggggtggtagctcatgcctgtaatctaggcactttgggaggccgaggcaggaggatcgcttgaagccaggagttcgagaccagcctgggcaacacagcaaaatcaccgtctctacaaaataacaataataatgaactaaggcaattccttatggtctttaatttcattttagtcttccctctgcaggatctgagcactcaaatacggggaggaaaaaaacaaaagccaggctgttattaacactctctcttccaaagtgacacagctgacaaccagacccctttttacctgcccctgcaatggggatcctaactgttctcccctcttcctgacccttttccttcttccatccatgttcctggagccatatcccctttcttgaagctaattttcttcctcctccccactctccccctccgcgttccctaaagaaagctggacctggatccagtctaagtcccaagaaagcttggggaagcacctttgcttacagagaaactgaggcccatggaaggaagaattagagaagctgccttcagctcagtaaacaggcgacctaatttcacaaatgtaaatgggggcaccacccaaaaaccaaggactcaaaggaggcaaagcgttctaccaagtggggcttactcaaactccttcaactggtcttatcgtcatgataactgtttttccaatgcctggctccatctcattccttcagaactcagcttaaatgtcacctttgagagagcccttcctggccacaatccagtggccctgctcccatatacggtctcagcacccactttctatttcgctcgcggcgtctgccatgattaggaccctttgggatccccgcgagcgtctcggggcgaggggcttgtccgcctcactcgcagctggacgccctgcactcggagcgtggctggctcgcgggaggcgcccgggccgcccgaatgaatggatggatggacgcgagcgggcaacggtcgccaggccgagcccggcgcgtcccccggcgccgcctccctcgctcccggcccgcctcacccgtcccccggcacctcccgcagcttcagccccagggcctgcagctggttggcgaagctgacgaactcctcctcgcagccgccgccgccgccagactccggccgattccgccgctccttggccagggcccggcgcgccgcccgctcgtcccgcttgcgctcggcctcggctttccggctgccgctgcccggccggctcttcgccgcctgctttcgggacatggccttagcctgcagtccccagcggcaggagggaaaggcgcaggaccccccagcgtccgcctcaagcgttgggaaggtaaaacagcgcgggcaacggagcccggcgacgactacgcagcaaccgcgcctgcgccggcgcccagcaccccggtcacatgatggaatccccgcctcttttgcggggctcggcgagcagacgccatagagagctggaggggcacccatcttggtttgttctattccgccctctagtggtggatggtactcaacgtgagtggcaggagcgaccggagagggaccagagagaacaaagcaggaacaagtcaagcagagaaattaaagatgatagaagagtggaacacagagcagcggcaaaagttaggaccggagatgaataaaaacgatttaaactcttgctgcgagcctactacagttggataggcactttcacacggctcattcttgtttaattatccccaaattacaggaaactgaatctgagtggttaaataatttcaagatcacacagctaaaaggcagagctttgccctggctccaaagcccgcatacttgtttatttaatcctgcccttcatctctccgccttccttcgtaactcaagggagaggtcgcccttctgtccaagaccactggaaatcctaattccatcctagagcgacccacctaggtttgcctggactagaggttttcttgggatgcaggactttccgttttaaaactgagacagaccaggctgggcgtgatggctcacacctgtaatcccagcactttgggaggccgaggcgggctgaccacaaagtcaggagatggagaccatcctggctaacactgtgaaaccccgtctctactaaaaatacaaaaattagccgggcgtggtggcgggcgcctgtagtcccagctactcgggaggctgaggcaggagaatggcatgaacccgggaagcggagcttgcagtgagccgagattgcaccactgcactccagcctgggggacagagcgagactccatctcaaaaaacaaacaaacaaaaaaacaaaaacaaaaactgaggccaggtgcagtggcccacgcctgtaatcccaacactttgggaagccgaggccaggggatcgcctgaggtcaggagttcgagaccagcctggccagctggccaagatggtgaaaccccatctatattgcgtgaggctgaggtttggagtacaaatgaatctgtcacccaggtagtgagcaaagtacacaatacacaataggtagtttttcaaccctttcccccaactgcctcccgactcttgtattccccagagtctattgttcccatctttgtgtccatgtgtatccaatgtttagctcccacttataagaacgtgcagtatttggttttctgtttctgccttagttcacttaggataatggtttccagctgtatccatgttgctgttctcccctcttcctggacatgattttgttcttttttatggctgcatagtattccatggtgtatatataccacattttctttatctaatccactgttgatgcgtacctgggttgattctatgtctttgctattgtgaatagtgctgcagtgaacatacgggtgcatctgtctttttgatagaacgatatatattcctttgagtatagacccagtaatgagattgctgggtcgagtggtagttcaatttttagttctttgagaaatctccaaactgctctccacagtggctgaactaatttacattcccaccaacagtgtaaaaatgttccccttttccccacagcctcagcaacatctgctattttttctttttaacaaaagccattctaactggcatgagatggtatttcatcgtgattttgatttgcatttttctgatgacaataagaatgcaaaagagagttgtaaagattaaataaaaatgtaaagccccaggcatgaagtaagtacctatttaatgaagttgtttgaatcagttctctggaaatctcatgagctcaggggcaaagactttcaaactttagaaaccagggaagaaaggtttctcaccagcaaataagtaaatacagactgctaacatattgatagaaaagcgaacact

SEQ ID NO: 1531 - DNA, 4001 bp, Homo sapiens
tggcagaaaggtggtgataatcaaaaatgagggtaaaatcgaaaaaatctattttggttttggaatatatgttttcagcatatttaccttcttaattattcctagtatgagctaatatttgcattgatttgcaatctctaagtacatagtaactggccactttgtcagggaggtgctctgaggcaagctgggtcaatagtggaaattagaacggtcgggggtattcagcctgcagaggagcaacatcaagttcatttattttacagttttgttcagccttcaaaatatcaatagactagcacagcaggttggttactgaacgttaaaagaactacttgaaaaacaatgaagacaaagcgtataattaattcttcattgtttgcgcataatgtatttgtaagttatacacagcaaatatttaactacctctgattctccctagccacccagcttccgtccctgaagtcttctccccatcaggaatgcaatctcatttagtaggaagaaaattttctacatgttttcagaagttacatagcatagaaacttttttaaatatttaggggttagcaactctttggagccagtcttaccgccacctctttctctactctgtccttttccacctttgaaatagattctgaaagacaaagggatccagcctcctcaaaaatctcctaaatatacagtactagaggccaaagactgaaaaattagcagcatgtgaatttctaagcaaagcgttacgtagtacgtataaaaagataaggaaaataaaagtcaacgtcctgctaattctaggctttgcattcgtgaaaagctgcctgaaaagtttgtggggaacttcttccataaaattccaccagtcagtttctaatttcaaatttttacatctttattgtgcccagagaagccacctaggttagacaagaaagactaccacgagcggggagaaagagactctgagcgctggtccttgtgagccgacaagctaaaaatacgccggcccagtaaacaaatcccattccatcccgaccggagccacaccgttaacctagtaattatgagaagagtgagatcacgcagcccccggcttactcatcatcagcttctaaagtttccatcggctcatggcaacttttcttttttctaaagttcttaagactgccctagaatccgtcaacctccgtctctctccctctctcacacacacacacaaacacacacacacacctttttctcgcctttcctccattactgtatgcaccttagtttggctatcaataggaagaataagcttatttgcttttcattttagtattatattgagattttaaatgaactttatcctactgtggggataatacactgcatcttaatcaccttaaaactccaccatccctcccgaaagtctagctgacaaggggggaccgtccaaactggccagcacagctcaggaagggaggccgggagctggagagcgcggggtaggaacgcaggacgcaggtgaaagggaggaggaaagatcgggacgaagcaaggagcagtcagggcgagaaaggagtgccgaggggagatggcttcgggtgaaacagattcagaaaggagaaaggggacagtggcgatctgaggagcagagtttgcgagtctgagaagccgggaggggcgggagcagacgggggacggtgtcaggacggggggctccgttaccctcgcgggctcccggggcaaggccctaggccggggcggagcgcggggcccggccgcctctcttcattcctcggcagtgaccccggggtccggccggcccctcccccgacggcgatggaggtggaggcggtggtggagactgcgaccgcagctgttgctccgcacgggatctggagctggagccagaaaggactgatcgggactggcctcccccagtggctttttgcccactccgcacccggtcgccactccggctccggcggctggttcaggatcggtggctttctgctgtccggccggaaacaggcgccagtttccggccggagcgggttggtggtgacacccaggccgcccccgggcctcctcccgctccgccccgtcgcagccccgcctttagcgccgctccccaggctgcggccagtttggcgcttgccccgcgcgtgaccccgtgttttcccgacccgagtccctaaagctcctggtctggagcattcttgaacaggagttggaggagtacagggtggactcttaggactctggggtagaatcagttggctacagccgttgggaaggagctgaaaggggtggagtagttgtagaaaggtgagagagatgaaaatacttcagaatgaaaagactgacattctagtaactctacacaatcattctggagtgaccggaggaagattagcttcttccacaccagtctccacccaattatatatttctcttgttccttcactcttgaagtgaacatatccttctctgtaaacacttaatatttatttacttgcataacagtgataccctgttgatacatctgctttagactgctaacagtaaaaaaaacttacatagtgcgtttgttatgtcttctagtgcgtttgttatgtcttttaaaacattatggcataattcaaatatgtattgtatccctgtgatgtgtatcactgctctcagtgatacagggggatacaaaaattaacaagacataatcccagacatcaaaggttttacaatttagtaaaatacataaaactatattatatgtagcagaacttgtatgtgtcctacctgagtgacaatgagctatggctatgagaacataataagccatccttgtcacatagtagaccttccatatttgttgaatgaatgaataagtattaggcctgtgtggactgtttcaagaaagaaaggccatttagtaaatacctctttatgacaaacacaaaacgatgccaaccccggctatactctaacaaaagacatttgaaattttaattcagattcctaacattatagcacctggtctgcatattcaaaataatgtattgcctaattgtgcccattatgcctatgtaaaaacaaatactctagtcaacttttctttcccctcacttcttcctcagtttctaaaggggaggcgtggggcataggcattttagaattgtctagctcagaataggaaactgacacctgaaacagggaaacttcctagacagctatatctcttagggatacacctgggtttacaatcgaaaatttagggctgggcccaaggctgtccacacatgctaaggccaaacaagtcagagtgccttgcatgggggcatatccaagacatacaatagaggttgacaagtaaagtcatttggcgtgggcttcaagcgtataagggaccacaaattttagctaccgtttagtggtaaatttaaggaggagagcaggatgagatttggtcacctaaattgactctaactgaactctaactgaactgaactggaagggtacgggggtggacgcttgggactctggggtagaatcagttggctacagccgttggaaaggagctgaaaagggtgtcgttctagaaaggtgagagggatgaaaatactttagaatgaaaagactgaaattctagtaactctacacaaacattctggaatgattgtgacaacaatcactgaccacacctaccctttgctagttaaatctgagatgggagcacagatctgtagaagaggagcctcaaaatctgaaagttgccttgtttcaccacagctgtccagaaccaggttatacccatataaatatgtctttctaatcttaacgccactgccacagacttaatagaaccaggcgtggagctcaaaggcactctaccctcaatataagactttttcttttggcagtgaccatagaaggtctccagatttgaaagctgggccaagttgctggtcaaagtcatttaagtgaccacactttataggcttgcctggaaatttagg

SEQ ID NO: 1532 - DNA, 4001 bp, Homo sapiens
gtctatgtgccatttactgctttaggcactttagaacaaagaacaacacagataagctccccactttcagggagtttataatctagtggcatagaacttttactctgcccatctataaccattaatgcagtaacaagccttcctttgggcacagagagatcccaggagttccggagagaggaaaatgtaagcaaacacttactgagcaccaaccctgtgtgagacactgacctagccactggggatacaacaacacagcagacactgccccttccctggagtagctcaccggtaacaaacggtaataaaaacatgagcatttgttgagcatttgggatgtgtaagcccactttaacagcattaataactaaaatcctcacaactaggttcaaaggctgagttgggttttgccaggcagagaagagagagaagcacattccaggcagagacaacagcaactacaaaagtaaggaggcaggaaagagctcaaggtgtctgtgacaaggagttctcaagttgggggtgctctggacccctatttgagaggaaggtaggactggaagaaatagaagaaagttgaagagtaacaggagaaatagactgttatcttatacctgtgaaatctgaaaatacaacccccacatccaatatgaacacacctctcctttagtttgttgaactctgggtagagaattttctcatcctggagatccttagcaacaatctgattgttgttcattgaggcaaaggcaaatatcaggtgggtgcagagaaaggggtccaggtcatggggcaagatcgaggcagggcctggccgactgtgtgcccagttggtgaaataacacacgagtttatgggcagcacctggtaagggagagcacacattagttggcaaaaaccaagggaggggatggagctcagcttccagaaagcaatgtgaacgcagcccaagagaccaggccacattttcacatcctctctccctggccctgaagtacacctcagaactacactgaggttctattcctcccccactgctgaggtctcaggaagaaaacaatgccttgtgaaatcctggtcagaacagattctcaagtctggaccaaggcacacagtcagcgacacaaacagcaggtgaccaaaaatcctctgagaaactgtgttggatcaataatccctgtcagagaagccagggcaaggtgggctgcaggggacactcaatgtggaggacttctcagccagagactctccctggctctggaagggaaaacacagtttccttaccatcgtggtgtttcagcacaagaaccagccctgtgagaaacaaaggaaggagtcacacagagattcataccctcaccagagtggtatggcacagcacaccctctgattagcaagggtgcccaccaacacaccaccttatgcagatgcagacacacaaatggggacacacacaccatttactcgtttcctagtttctaaagttggaccagtggagctagatataagttccttttctttttgataaacatgtgtatatgctcatgctttgcccagggacaatgacaagtgttagaagtcccagaaaaagctcgaggccagtggttctgaaccctggctgcaaattaagaagtactgatatcctggctggtcatgcagagattctaacagaactggtccaaggtggaactcaggcatttaaaatttctaatgggccaccaggtttgagaaccactgctctgaccacttctccctgggtccctctgacctctgaccattaactatggcccatcccatctctacctaatctaggcttccctgagtctcaggctgctctctcaggcaccagagagatgacgaactcataaagcctggcacttcctggactgagtgacactgctgggacctgccacactcaccaacccacagcaacagcttccacatctcaatggtctgatagctgtgagtccagagatgcagccctttataggagcttccctgtggatagcgctgggacagcccagctacacatacacacacacacacacacacacacacacacacacacacacacacacacacaccccagtgccaggatcagtaatttatgagagtcacagtgaccccagaacgacctggcctccctctccaacaaagcaacagcaccaggttggcactgaataccaggaagagggtcttcctggtattcagtaccacagggactgaatatgggggagaaaccccatatggtagcagcaattctattattaaaagattattggctgggaagcagcgtaatttttaaaaaaagtttaaaccatagctttggatttaggctttgaatccaaggtttgaattcaaagtttgaatctcagtgtcaccacttagaagttttgtaatcttgcacaaattacctgcctctgtgaggtcagtttccatgcttgtaaaatggagatgacagctcagacttacctcatagagctttatagagatcaaagagataatgggtcaaaaattgttagtttcgtgctcgcatataataagggctcagtgaatggtagctattattagggatgtcaaaagggttgcccagcagagcagagttctcaaactcagatgacgcttgccaggcaggtaatgtaaatggatggtgtagatgcaataaaacagctatctctattttattagaaaagtaacagttcatgcccaatgatgtacatcaactgacatgaagcctcttggtcaggagacaacagagatcagtataaagagggacagcactctgagcagctgctaatggtttccctgcagggaaacagacccagtgttgctggatccttcagtttctcaggagaaggcaaaacctgaatttttatgagtcaacaatatttgagtcagtatatgagccaattgtgaggatgtgtcatgaacctcaagaatatgatggatacaattctggacatctaagagccagttttttaaaaatgcaacaacaggagtatgaaagataaaatatatatatatatatatatatatatatatatatatatatatataccgtttttattaccagactgcaagccagatgcttttatgattcatcagttttctttctctgctacagagggtcttggaccttatgcccaccttcacagagactgatgctgctcatctaatccacatgaactactcacgaggtattaaccagatgtcaatataatccacgacacagggaaataatgactagtggtcaaattcatataacatctatccttcatttccagtatgaagaaaccaggagtcattgttttaaatcagcagtttgcttggatatgatggaataaaagcaacaaattgtatagaatgtttggagtatttcactgaaactctgggaaagcctgatggaataccccacccaacccagactatgtctccttttcttcatccatctttgcctttctttatgtattcaacaaattatcactgagcatgtgccatgccctgctcggcacttgaaacattttctgctttcaaggagcttatgatttagtgaacagattgatcgtatccctagagctagggtatgtgtctctttcttggagaagtagcatgatgagtgcagtgaggaaaacatgagttttgttgccaaaatgatttcagattcaattcccactctgtaccatcactgaggcaacttgggtcccacttgcatgctcaatgccaccatccattccttggactaatattaacctgaattaggagataattaggcctcctgagaccaacactggatcatgcttggcaacaacttgtaccattggttagactacccctggtacgttttctggctacaacaaccatgctcttgttcccccattcctagcccttgtgccctcattcttgtaactgggtctggtccctgctttgacttctcttcctgttctacaaactgctggcaccacagttgggtcctagggcctgggtcttctgactctgtcttg

SEQ ID NO: 1533 - DNA, 4001 bp, Homo sapiens
tttttatctccatttcatggttcaagtacgagggaggcgcttgaatcaaatcttgctgtgaatgcactgagctgtgcacgctctgtgtaaacatcacagagcaaagcggacatccattcctcaccactgcagacctgcgccttgcagtgctcgagaaacacagtgaggaactgatctgttttcctgttgtttttaattaaagtcgcagctctctagaggagcactgtccacctagggaggaaagtaggaggccagtagcaaacccctcccagagctggggacatgtattcccctggggaacccggtggcacccgccctgaggagcgcaccaccccgcccagatccaggtcccgtcagggtgccacctgctgcatgggcctgaggttcggggacacagcaaaggcacaccccgtgctctttttgatgtcgtccaccgtcaggccctcccagagctccctcagcgtcagctctttcttcctgtgcacgtcaaacacggccttctcggtgatgatgcggtccacgcaccgcttcccggtcagcggcatggtgcatttctccatgatcttgggggtgttgtcctttgtgcagtgctgcatggtgaccaccactctggtcttctgactggacaccaagtccatggcaccgcccatgcctttcaccttcttgccagggatcatccagttcgccaggtcgccgtatttggaaacctgcatggctccaagcatggttagttggatgtgtccccctcggatcatggcgaaggagtcgtcgctggcgaagaagcagcccccgggaagcaccgtgaccgtctgcttgcctgcattgatgaggtcggcatccacctcatcttccgtgggaaacgggcccaggcccaggatcccgttctcactgtgaagatggacagtcatgctgggactgatgaagttgctggccagcagggggatgcctatgcccagattggcgtacatgccgtcctcaaattccagagctgcgcgtctgatgatgcgcgtcctggcgtcctcttcctttccagcgtctccatcttcctctttcaggatcgttaagcgctcaattcgtttctcgtatttctgcccctttatcacgcgatctacataaatgttaggaacgtggatgtcttctggggggaaagcccccacctccacgatctcttccacctccaccgccgtgacgtctgcagctttgcacatgggcacgttgaaattgcgggcgcttctcctgaagaccacgtttcctgcccggtcggccttccaccctttcaccagggcgaagtctgcccggatggcgcgctccaaaaggaagtggtcgccgttgaactccctcacctctcggggctggctcatgagcgccaggtggccgtccggggtgtagcggatgggggcgcccccttcctggaccagggtcccgtagcccgtgggggtgtagaaggcgggcaccccggcgccccccgcgcggatgcgctcggccagggtgccctggggcgtgagctccagctccagctctcctgccaggtactggctctcgcacagggtgttctcgcccacgtaggaacagacgatgcgacggacctgcctggcggccagcaggaggcccaggccgaagtcctccacgcccacgttgctgctgaccacctgcaggtctttcacgcgggtcctgagcagcgcggcgatcaggttctcggggatcccgcagagcccgaagcccccgatcatgacggtcgccccgtcagagatgtccttcaccatctccaccgggtccgcgtagaacttggcacggagccggggactggtggcaaagcagcgggcgcagccctgggacagcgcgagccctgagccgccggcggggaccccgcgcccgagcactgacgccaggagccgcagcgccgccatagtcggcccgggtcggaggccaggacaggtggtgtgagccctgcgtgcgcctcgggccgcgcgtcacagagcagggcgggcgcccgcgccctgacgcactccctcccagcaggtctccccggccaggcgcaggctctaggctaggcccgcgacccgcaacagggagggggccggctccgccctgggctgggggcccccgagtcagtcctccgtgtccagcgcacaggcccgggcgcaggacagagctgaggtcaggctccgcgagaagggcacaggctaggtcccctcctgccccagtggagcctcagacacaaactccaaccaccccgcccaagcttccccccagcttccccagctcattaaagacaccaagtgtccaatgagcaggcgccgctgggtgacaccgacgctcatgaacaccttcactgggcatcactctgtgccaagcaccctcctttaatcctgtgacaacccggagagtgagtgcctgccccactacagcctcccagagctcaggttcacccctcactgcgacagtggggacagtatccctcacctccatcaggaagggtccctgctctgaagaggccccccgtcttgtcctctgcatccccccgccctctccacctcccccactccagctccctgctccaacttgtgcggaattttgcagttttcttccctctgcacagaatcactgcatcaccacagcagcgtgcaggcgtctcctcacctggaaaggacctgccttgtcccgggttctctccagccccagcccatgtctctgctccccttccccagcaaaggttctggaaagagctgtctcctgcctccactgcctgtctccctccacctcctcagtcagacccacactccacggatatttaggtcatcaacaacctctgtgatggcaaaacccttggtcacttctctgttcttgccttcagtgcccacagcaggacacaaatgacaaacccttgcttctggaaacactttactctggcgtctagatcacctcatcctccaggtgtcctgctccctccctggctggtctctgtgggctctctgtggcccctccttgtgaggtctctggatgttggaggtcccagggctctgggccaggccctctttcttctccatcactaccctccttccctagatgacctggtcccatcccatgctttaaatccacttacatgccagcacctccctcgcctgggtcttcacactcaccggtccctgtaatggcatttccatgaggaccagtgatctcagtaacatcccaggggggtcagtaatattccagccaaaagagaacccttggccacccacctcaaacctgcccttcatctatcttttccccaaaaagaaaaatctattgaaaaaaatccactggctccaaccacacatcattcaggcttcctcctgttccctcacctcctcgccagctataagcatgtcctgacactgaaatcgactcatctttctccatctccactgctaccaacaagtcgctcacagcgcccacctggaccactgtggggcccccacacgtctctctgacttcactcttgtccatctcagtctgctctctccactgaagtcagggggttctttattttatgcatatattaagttttaattttacaacagttgatagttacataaaactttgtaaagatagtacagaggctaaggtgggaggatcgctcgcgcccaggagttggaggttaccgtcagctgtgattgcgccactgcactccagcctgagcaacagagccaaaccctgtctcaaagaaaaaaaaactacacaaggagttcccatacacctggacccagtttcctctgggaaatgctaatattttacactagcagggtacctttctcataactaatgaaccaatactgataccttattattaagtaaacaccatgatcgatctggatttcataacttctccctaatgaccttttgctggtccaggactcaacccaggaccccacatgcactgagctggtcttcttaggtgcctctgggctcctccaatttcccaaccttcccttttttttgatgagcttggcggttttgagaag

SEQ ID NO: 1534 - DNA, 4001 bp, Homo sapiens
cctcctgccacgcctgcagcatacctctctccatgctccacgctaaggccacaatctgaggtggcagagcactgtgctgggagtcctaacttggcttccaactttttgcattcgttctccttctcaggagtcccattttcttcagattagatgaaataaaagggctctgactagtgcaaagcactgttacagctgaggtgacaaatgacaccagattttcaagtgacgcttccctaaactacctccacgacactctacagcacagagcctggataccatttgtccagagtaaagcacttctccactccagtggcaaacacacagaccaaggaggtggcctggcacacgcagcttttgtggcactaacctaagtctctgcgaaagtttaacgcacagaaaccttccccctgcttcctgcctgccctgactgatcctttatcagcacaacatcaggtagtcaaggttagtaaaggtggcggagcgggcaggagctttacaatgtaaaactttcgcggggaattgtgtttcaaacgtcccgcctttttggccagcctgtgaggggcacaagcaaggatctctaacagcccagccccactgacaaggaccacacgcagtggaatgccagtggcttcactctaatcctgttttacagtctccttggtttccaaccccactaccagcaacactaataagtagcccaaggtcacccagttagcaagtggtagaaacaagattgaaactcgagtcatctgatgccaggtccgcgttctcaatctccgcaccctgctcccagcttcggtggcaacatgctgtcgtgatgccgccctcctcggcaggagggccctgccagaagacgactcccggggtcctccgggctcccacgcacgtgtgggcacagcttctactcaccgtcggccggctgctggaagttgacgtaggcatagcccagggagcggcgggtgatcatatcgcggcagacccggatggacagcacaggccccgcggggctgaacttttcgtacagcatggcctcggtgacgtccgaatgcaggtcgcccacgtacagggaggccatggggtagctgctggccgcagcgttcatctccccgccccccaccaccccgagccccgccaggaggacttcttatcgggcccgccgcaggacaaaggggcgccttcggagcccgggcccgcgccgcggctcacaggtggcaccggcgcggcgaggacgagctggagtcggcgggcttggagacgggacggaaacgggaggcgggggccggctcccacggccgcagcaccgcagacaaaaggctctccgcacaatacggccctccccgcgactttgcacttctccgcggtcctggtgcgaagctccaaatttcaaaaaatcaaagtaggaaaaaaattaaacggggaatccccttccgaagggtaaaaatcctttaagaggcgaccggacgctgcccacggcggcctcggggacacgcgtttctctataaatataggcctcgggctccggcggtttaagattacaaccgccggggcagagggaaaccaaatctttgtgggcgccgactcggcgagccccgggcgggcggcgaagggcagcacggacacgtggtgcgccggggcaggcgcggggcgcggggctcggggcccgagcggggggagggcacggcgggccgggcgggcggctcacccccggaccgacggacggagaccgacggacgccaagcgctgcggcggcgggcgcggggcaggccggaagcgtacgaaagtgacttccccgcgggttctccgaggattcgttttttcttttcctttttttttttcaggattttgaagcgttttcagattttttttatctttttctctttttttcctcaggctgcgaagcccgaaagcggcggaggcggcagcgacccggggcggagagaggcggccgagggagccaccgctccatttatacccgcccgccccgggcgctgctggtcgaagggcgcctcgcgacctgggcgcagtcgtgcccgcccactcggcccgggggcccgaggcggggcggccacgcgagagcgacccggcgcggccgcgcggcgctacagcgacccctggcgccgggaggaccgcccagctcgcggctgcgggagaccccagggcccctttctataacaaataaatcttaacaccctcccacccatcacccgggaatggaacctaggagccatttaacctgcacacacgcatgaggtttaaaattaaatggtatggggctgggtgcagtggctcacgcctgtaatcccagcactttgggaggccgaggcggatggatcatggaggtcaggagatcgagaccatcctggctaacgcggtgaaaccccgtctctactaaaaatacaaaacattagccgggcgtggtggcatgcgcctgtagtcctagctactcgggaggctgagcaggagaatagcttgaacccgggaggcggaggtcgcggtgagccaagatcgtgccactgcactccatccagcctgggcaacagagtgagactccctctcaaaaaaaaaaaaattaaatggtatgccaaattgtgaaatgaaggtgacataaaataagttaaaataaaataataggtggtccaataggtaaatgtctgggtccaaatacaataaagatttgagaagttttcaggataccgttgacctagaggtagaatcgtcaggaactagaaatgcaagcagtatccatgggtgatgggattttctgaaaagatgagcacattttggtaaagcttcaatgaaaccaaacacaagcatcccctctattgacatgctggtggcattcccggacatttagtttgtgtttaagggcacagaaatactttctgttcctatgtttaaagtttcttctaggcttggataattataaaaagacttttcatctgcatgagagtctggcaggtcatttgaaagtcgtatcacaggccaggcgtggtggctcacgcctgtaatcccagcactttgggaggccgaggcgggcggatcactgaggtcgagagttcgagaccagcatgaccaacatgaagaaacccccgtctctcctaaaaatacaaaaagtagccagacatgggggtgcatgcctgtaatcccagctactcaggcggctaaagcagaagaatcgcttgaacccggcaggcagaggttgtggtgagctgagatcatgccattgcactctagcctgggcaacaagagcgaaactccgtctcaaaaaaaaaaaagtcatatcactttataggactatgttatatgggactgtccacacgcattacaagatatatagcatcccttcttccataagtgccaggaaccacctttgccatcactgtgaaaaccaaaaacagaaattgccaaaagacacagacatcccccttcaaaagcactgatttaagtaaatgactaaagaaatatgtgtatttatatattaattaattcaaataaatggttaatctgagcctactctatgccaatgtcaatacaggggctggagataccatggtggaccagaagtcactccctctctcatggagtttatattctaataactatattaaatcaagaaacattggctgggcacgatggctcacacctgtaatcccagcactttggcaggctgaggtgagcggatcacctgaggtcaggagttcgagaccagcctggccaacatggtgaaaccccatctctactaaaaatacaaaattagccgggcatgatggcacgtgcctatagtcccagctacttggaaggctgaggcaggagaatcgctggaacccaggaggcagcggttgcagtaagctgagatcatgctactgcactccagcctgggtgacagagcgagactccgtctcaaaaaaaaaggaacatttatgggagtgctccttctatagattccctcctcaggaaagtcttcctagacctcctgtggtctaaagtagccgtcaacattg

SEQ ID NO: 1535 - DNA, 4001 bp, Homo sapiens
ccttctagaaacagccatgccctcagatgagagcagaagcctgaaataagaagaagggggcctgcaagggacccttttcctactcttggtgtgaaagtagattcccagatacaatgtgggatgcctagttagatttcagctttagtggccaggtacggtggctcacgcctataatcccagcactttgggaggccgaggtgggttgatcacttgaggtcaggagtttgagaccagcctgaccaacatggcaaaaccttgtctctactaaaaatacaaaattagccgagtgtgatggtgggttcctgttatcccagctactctggaggctgcggcagagaattgaacccgggaggtggaggttgcagtgagcaaagatctcgccactgcactccagcctgggtgacagagcgagactccatctcaaaaaaaaaaaaaaaaaaaaagaaaaagaaaaaaaagacttcagcttcagctaaacagcagattattttagtagaaatatctcccatgcaatatactaaaaaagctttttgttttttatctgaaattcaaacttaaccaggcatcctgtatttttatttgctaaatctggcaagcctatgttaacagggcaagagacaatggggtctctgctggccacctagacccgagagaaccagcccccacagcggggctcccagcagcaacttagagtcaaggtttggtttccatggctcctggttttcctccccagccctgccaccggggtcacagaccactgcccaacagagaagcaggaagggcttctcgagcagaggatcaccagaggccaggtgggcagctggccctgggccccacatacattaaccagaccagcaggtacaggggctgagtcccaagagggagaaaggagctcagatctcacccagtaacagacccccagcacccagctcctctttgagggagactcccaccacgagccccctatctgcaaggggttcagccccacctgctccagcagggatggaatccatagacagcctctcagagttggaaatgccaccagagatcaccaaatccaattcccttagtggccaggtagggaaactaaggctgagtccccgagtccccatctggacacagccagcacaggaaagatttgggtcaacaggagaagcaaatgctactgatgccccctcagatgtcatcattgccaccatcaccgccatcatcgccatcatcactgttcatcaccataatcagcgtcatcaccatcatctcacagcaaacataagtcccagccgtcttgctccaggttctctcttcatattaattcatcgagtatttcctaaccactccctcctgattggaatcaatctagttatctctggctgacctccaagggtcaagctaccacacacgtcccttcacctcaaagagatgggggcttggcaagaaattgagggaggtgggaaccagttctcttccccatcttgagccatctgatgttccacacaagttctacctaggtgtcagaatgcagggcccagaccccaaagcctgaccccagggctcagagttagaaatctaaggctggactcttacccaggggattgaagccaatgtcctgagcccagtgcccaggagctggggccccaaggaggacctgactagaccctagttccttccttccagactccacagccaactccaccttctctgctatctcctgccagcatcctttccaacgtgcctgacttgtctaccaggcacccaccccattgacttacactctaacccagctctctgcagccaggagagcgcctcccagctcttacctgtgaatgtccacatgtgcctcgactcccaccacacacacggcatgggtaggcatcttcagggacagctgcacaactctctttggggccatcctgtcacctggctcccagcctcctagatcagccctggctccccagctcccgtcctgggcacttctttgccaggaagaagtgtgagttctgatggactggtgcctcctcctccctttaaatttcaccctgcgacctgattagcctggctgagcctggtccccacctcctggctccacaccctcctcactcagggctgtcaatccaggaggtcaggggaggaggtgcccaaggcctgtctgggagatggggaaggggagcttcaactgggggccccgggcgaagcaggactcacctgctgacaggagaccctccagagctccccagcagcctctgccctcccctccaaagactcctggtgcctgaacccctattacaatgatgtcagtgtttctgtgggctgactatgtgcgggctctgcctataaccacctgtgatccttatcaaaccttttaacctctctgtgactcagctgcctcatgtgtaagttggcagctgtaacagtagtacctgtcccattgtgttgatgtgggaaagacatgagttatgtgtaagaagattagcacagctcctggcacctgtgttcactaaaacactaacaattatgacttttatcctcattttgcaggtaagagaaccatggctgcaggtctcactgctagtaagtggtagagttataacttccacgcaggttcacccgtctcgccacacaataccaccccccaacaggtgagggtaggcccttgtgcccagactccacagacagcagaagccaccccaggcaagcattcttggggagccagagaggagggaacttgaaaaagagctcagagcaatgacctgggagcgtggactcatttctgaaaatccctcttctttcagctcagcacagcaagcttcagcctgttctgaggctctttgtagaacttcatttgttaatttgacaagtgtttgttaatcatcttttatgtgtcaggcactcatttaggtgatagggatacaactatgaacaaaagagaccatgattcctgctctgacgacatttatattctgggggagacagaccgtaggtgaagttaaatgagtaaagtgtgtatgacatcagatggtgcattaaggttcttcccattatctaagcgagggatggcatggcttggtcccagggtaacagggaaggtggtgggaagtggttggatcctgaatgtatcttgaaggtagagccgatgaggtttgctgatgagttggatgtgggtgtgagagagagtggtcaacgatcactggagtatttgggacccgagcaactagaaggatggagttgtcatcagagagatagggaaggctgcaggagggcaagctgggcagggagcttggccattctctgttggacttgttcgacatgagatgtctgttagagcttggggtagaggtggtgaattgcaggtgacgtgttcccttcatatcgggcattgggggtgatgagaagagccgtttgctctggaatcgcaggacacccatcctcagtaatgtggtcctcttcttccagggggctcttatacagagtgggaaaaggggcacataaaccagaactctagtgtccacagggctggggtggcagggcagcaaagagcaagaaagagagagagagagagagagagaaacagccttgcctgaggagttgtcagtctgatggaagatgtgggggacacacagtccctggctgcaggaaccccagcctgattagggaggcaggaaatagtaaaatggcataaacatttatttggttacttttgattttgaagatatttttgaaaccatctttcttattgcaaatgttattgatctgcaaagttcattacacctgaagtcaccaagacaaagtctaattttaccccatggatacagaacccagggaaacaggtgttcagggatggttttccatcacccaaaccccaaacctcaatttaccaggacctcagtcattttgtttaacagcatttattgacataaacgtgtccatttcttatggaatggaatgcagagtggaacaagcagtttcctgcagagcacatgggtgtgttcccattagagaagatt

SEQ ID NO: 1536 - DNA, 4001 bp, Homo sapiens
ctggacagtactggtctagagcgcactgcccctctctgtggtggtggagaaccttaagtgccggtgggggttagggtctttgtggtcgttgagacaggacaaggggaatcgtcacactgctgccccctgctagagggaggctgagtccatatctgccccactctgtgcccctaccccagctgggcctctctttgccaggatagagcgatagcagggcgcctgagcaggaaccctcctttgctccccacccccgactgggaggatcatgccagcttttcaggcggcaccaaccatgccccagcaaataaacaggtgggtatggtgacagctgaggcttagagacctgagcactctggctccgcgcccactccctagcggtgcccagttcagggctgggggtggggaaggcaggggagctcttgcaccccaccagagcctggaccaccctccactgctgtgttcttgttctcagagaccacccagtccacctctgaggtttacatgggggacaactgaagcccaggcccaggggaaggcagaggttgaggccagggacagaggcatggagtgggtccctagtcctggggcttgttggtatcagcgtggccagtgcctctgcagcggtggcaggagactggttgggcaggtgggagggctgccagggctgtgtggggagacacatgatgggttggtgggggcctgggagaggcagggtgctccaggtgtcaggatgatttgagagccataaaccacgatggtgcctccgtgtgagttcagcttgaggcagagaggataggggactcatccggtgtcagcacagggtcccacctcagagtcctgcatgctccctgcccccagcactgacccctccaaccctagcaatggggaggttttaaatgcttggaatagagggggcagatcaaaccccagcataaccccaccctttcattcacaccagccacacctttccaaggccccgtcccattactcagggagacagatcattggacttggctgctttctgggattgcggggggagtggtagggccctaccctaccttcagctgtctcggacatcccgcactctaccaagttcttggacagagagaaggggagggagcagaactctgaatcaggatccttttccaacaaagtaccccgctatacaccccaagtccccgtcgtcagctgggtagaatattgtccctctgtggtctcagaatgaagtcaggggaaggtatctggggacacggagctcagggccagtgcctggggacaagcaaccaccagcagcccccacagggcgaaatcggagcctgagtaacctccagggccggattcagcctcagggcagctcccttcgggtcctgccccagtccccggcaagtctccgcggaagctccgctgaactgggagtgggaagcaggagaggggctgggttgaggtgggtccgaggggaagtgaggtgcggaggggaagtgaaaggggagaggacggcagggaagctgaaggggtgtgaggtcccccgggaggagaactggagagggccagacggagggttacgggtgaaagggagggtctgtgagggagctggggctgaggctgtgttagggggtctgggagagtctcagggtttctggaaggtggacacaaggttcgggggttgtcaggtttctggatgagattcttaggatttctgggctcgggggctcgggatgagggacaactcgggctggacaaaggctgtccacgtccccgagtctgagcgcgtctcaggatttctgggctcgagatctcggcccgggcatcacggtgggccggctcacctgtagacatcggtccagaggtaggtgcccagcacgtacaccgcctccacgcggctcccgtactgcagccgcacggtccgctcgcgcagcatcctccccgccgcagtgcccgcgctcgctggtccggggcggccgggagcacctgcagcaggtgcgccttctccagcagcctgcgccccacggccccgcgcgcagccttatccagcggccggtgggcggggcggcccgccccagtcctctcgcagtgggctgcgggcctgtccgtcaagcgtggtcccgcccctaactcgtcccgccccgctgaggtcgtggcgaagtcatcagggaccagttttgtgctttccatggttggattgtcattctttcattcgacaaaccttcggtgggcgcccaggtgttggagggccctagctcccctccggacgccccagcccagtggggctgaaaatgcaaatgtgggaacacaaagagggtgccctaacccagcctgggggccaggaagccttcccagagaagacgatcctggaaccttcttaaaggaggcgtttgcaaattaaaggcgaggagagggagctgcctgtgcaaagccgggtgcagcccggtacccccatcccccaacagtcagatgaacctcaccatagagaaaacgggaagcggtggggatggggaacccggcagctgagggagaccaggacgccaagccaaggcattggagggtgggagatgggagcctggagtggttgtctccgcgagccgtggtcgggtgtgctcgtgaaatgggtcattctgggctggggaggggcaaggaagcccctggctgtggccagagctggagaggtggggactgacccggccactgcttagggactgggattttggtggcacctggtgactgataggatgtgtgggtggagggagaggagaggggtaaggattagggccccggttctggcctgggccaccaagggaaggggggtgccacccagaggtcatcgtgtgtctcacagaggctgagatgtaggatgacaatcagtgtgggcctcggccagcccctcccatgtcccagcccttcccctgggacccagtgggagtgctgttcagacacatacatcagccctgtgtgaggaagtggtctttggtaggtgaggacagaaactgagggggggtgggcagaggccgtgggagggaaggagtggggcggaggggatgtgtgtttgggaaggagttagagctgatggaagatggagctccaggaacgggtgcccccagacaagaggggtgaggcccacaagtgcccagtgctgatatacccagcccttggactccaaccttctccctgaggcggcccaaattaggaggtggtgaagagcccagctgcttctgagtggcagggatttgggaggaatgtgagtggggaagagggaaggcccgagttttagccaggaggtcatttgtcccccaaaggcacagctcacagacccagggagaggccagtaactgttttttttttttttttttgagacagagttttcctcttgttacccaggctggagtacaatggcgccatctcagctcattgcaacctccgcctcccaggtttaattgattctcctgcctcagcctcccaagtagctgggattacaggcaggcaccaccacacccagctaattttgtatttttagtagagacggggtttctccatgttggccaggctggttttgaactcctgatctcaggtgatctacctgcctcggcctcccaaagtgctaggattacaggcgtgagccacagcgcccggccgaggccagtaacttctgatgaactccaggcacccggctgagcacatcctccaatcaggaggaatctctcgggtggccacctgccaaactgggacaaaacttgtgtagcttggagagacttcgaggcgcccccagaggtgagctcgtgtctgggcacccctctgccacgagtgactttggagcccttactgtgtgacagataacgggcacccaccagggttctcaccttcctggggctctaactttcatttgactcatggggagactggggccagagtgggggaggacactgtaccccccactgacggagaccccgggcagctcataacaggacactgggcaagatagtgataacatcagaccgcaatacccaggg

SEQ ID NO: 1537 - DNA, 4001 bp, Homo sapiens
gaaatacttgaagaatatgtgaatgaacgaactaggagctctccactcccacccctggggggtttggccaccagggcccaagaatccctcatttgaaggtatcagagcttccatcccccaccctgtggctgtcccaccgatggccttctctgcaaacctccagtgtggctcaggtgactccaggaagctatggcctttatctcttattgccccaatccatcctctatcctctaaggaagctctgcgggggaggagccaggcccaggcttcctgggacaggtcaaaccggagacacatctgcccaacgggcacgaggcagcaggggcaggtgagtcaccccatggcacgcagcccagtcaccccatggcaggcaggcagtggtgccaagtggcagatacccctccttcctcattacctccttggcacagcctccgtggctgccccttccttcaagaaccactgaatccccttcctcctcctactgcccacccaccaataccaggatttatttcctgggctggctctgctcccgacttggttccctcccatgaccagctcctcaccccctctcatccaatgccctggatcaaccccatcgctgctcccgactaagttcgccctgatttttcgagtcttagtcttggagactcgttctcaatgggtgggctattttcttcccaccccagggcacatttggcaatgtctggggacatttttggttgtcacaactcgggagtgtgctgctggtatctagcaaagagaggcccagaatgctgctctccatcctacagtgcacagggtggcccccatgacaaagaggtatcgtgacagcagtgctgaggttgagaaacctggcctgaggagagggctgggagacttgagaggtgagagctgtcccacagttctgcaccctcccctcccagtatcctgattacctccaagccaggaccctggattctccccaaaagcctaagaagccagctccctggtggtccccagagcccagctcttaaaaccctaccctaaccctcttttcttcctaagagagagaagataaggccttacctccctctaccatgggcctcaaaggcatgacctggcacacagtaggagcataatgcatgggcattgagtgtctagaggaaaccaggttggaaatctttattttccaagtatcagagcagctaaaaccataagactcctgagtaagaccacaagcgggtttaaaccctggctttgccacttagtaactgtgtgacttgagcaaatggcttgccctctctgcctcggttttctcatttgtctgatgagatgatgctaataataagcctagctcacagggttgttgtaagggttaaattcaagattaaagttcaaaacttaactcaagagacttgtgaagctcttagaatagtgcctggcacatggtaagtgctatgtattaacttattttttaaaaatgattcatgctctgtttctaggctcataggctcaggatggggctggggatatctgcctgttcctattcttgtgtgccccagacagatcctcagcccaacctgcagcatcccttggacatagaaaagtgccatctcttcgcggcaccagccccctccaagcccccggtctggagctcagtcactgaagcctcttctacctggctcagcctcccaaacttcaaattccctggctaaggtcttcaggaaactcagtagagcaagaggaggacccaagcttccctgattggctgctgttccgaggccaaggctggggagtgggccctgaagaagccctgcccagcctgcagggaggaaggtccaagggcatcagcaccaagggcctgcaaaccactaggcctctgactcttacccataaatgtccacgagggtctccacgccagccacacacaccgcgctggtgggatgctccagggacacacgcacgattctctgcagcgacatgctggtgttggacttagctgtggccgccaaccccaacactgcccctgaggccccttaggatgaggtttaaaagcccctggccccacccctccagcccagggtgccaattcattggctccagtcatgaaagcccagccccttcccagagctgagagctcaggattggctggaagggacccagtatttgtatacgaacctgttgtcccgaccccggcacccaggaagttaatttcttgggaagcaagtccccacaggtacctggctaggcaccaggaactgttgggggcaggtgctgttgagggggtgcagagatatatgatattgatctcggacgcttcttgcttcctcacctccattttctgcattttcagagactataatggggagctttcttactctgctggggaagctggtgaaaatgcggattcccaggtctgttgtccactctgatccagcaggttaggggtgcagcctggcctctggatttttttttttttttttgagacggagtttcactcttgttgcccaggctggaatgcaatggtgcgatctcggctcaccgcaaccttcgcctcccaggttcaagcaattctcctgcctcagcctcccgagtagctgggattataggcgtgtgccaccacttccggctaattttgtatttttagtagagacggggtttttccatgttggtcaggctggtcttgaactccagacctcaggtgatccacctacctcggcctcccaaagtgctgggattacaggcatgagccacagcacccggccctctggattttttaataagcacccccaaagcattttggtgccctttgagaaacaccaactttttttttttaatggattttagagccagacctgggtttcagccctgcctcagctgcttcctggatgggcgaccttgggcaagtttctttttttttttttttttgagacagagtttcgctctgtcacccaggctagagtgcagtggcgtgatctcggctcactgcaagctccacttcccgggttcacgccattctcctgcctcagcctcccgagtagctgggactacaggcgcctgccacggctcccggctaattttttgtatttttaatagaggcggggtttcaccgtgttagtcaggatggtctcgatctcctgacctcttgatccacccgacttggcctcccaaagtactgggattacaggcgtgagccaccatgcccggccgggcaactttcttaattgttcgtgcctcacttttctcgtctgaaaaatggttgctgtgaggcctcaggggccagcgttggtagagctctggtatggagcttggcgttattgtattactattgttgctgttattaggtcccaaaaacctctgaaagcggtaaatgatgagggtgagaactctctccagccagggggagcttggcatgtcagagtaggaaagctcagtcgtcaggtgggaaaccgaagtcagaggggcattcaggctcctggaagagcaggagcaagggctctggggagagaagtcttgggttcagaggcaggctccaccgtgcacccactatagggccttgggtgtcagtgtcccccctcttggagactcggtttcctcatctgtagaaaatgcagctaatcactggccctggcggagataatagtgaagacgcaccctgcctggcggaggctcaggaggtgctgaatagaggtttcctcccttctccctggcagtgctgacagcctgagacaggatggggaccaggacccgctccccagcatctccagctgggacatctgcaccagttcaagggcctcaacaggaccctgagattgtcattcccatgtctcagtttttgggaaagatgttcttttcaaggagaactgctgggcttctgggtcaagggacagcttcacttttttcagctgtggaatggcttgatggctgagtcagccttgggagccctgggtaagagttcgagctcaggaggaagccttagtctccctagccttcttgtgagcacagatggggaatagatgcag

SEQ ID NO: 1538 - DNA, 4001 bp, Homo sapiens
cctcccaaggccattgaatgagttgaatgtaggaagtgtgatgtaaatattagccattgttacgtgagatgttcaggggatagagtgacaggctcaacgtgtggctgaaggaggagaaaagaaggatttagaggcccctgtgaactccggagtccccatcctttctgggagaaatgggcagtgccttcctctctgcccaacactgaccagctgtccacccacctctctagggccagaggaagcacttgtgatcttgattactactcatggacgctgggtagagggctagcctgggcatgctgggagaggccctgggctagcttcagctcctgtcatttccttcacacccattctcagaggagttgggggcgcctcagatgatgtcaggtgattttctttttccttttctccccaacttcttggtctcctgcctccaccatgtggccctgggagaccatcccgacatttcctgctgttctctggctgctggggctcaggcagtagcaaagaaatgtccccggcactcctgtgggcaccattctagggccaccgatgcccagactgggatggggaagccaggggcaaccactcctattcctgacaacagcaattgttgcaggataatttaggaatcagagagaccgaggggttgaggaggatttattatttagattcactggctcagtcaggctaacatttcaaaagactgagccctgaacaaagagttaagttatcttttaagcatttcatggggcgggggtagatctgtgcagggggaagcatattatagaggcaagaaacaaagacagttatttaattgagacatgcattatattattttttactttttaaggaaaaaaatttttacagcttgagtttatctgtctagtgaccttgcagctgcacagctggagaaacagggtctttacaatgcctggaaaaagaggagcaataaggctcactagccacaaaaaaacaggcagttaatttttaagggactccagctcttttttttttttttttccagggaaaattgttttttttttttttaacatagaactgagtttttgcttacacgttttaaaatttcttttaattcctgttctacaataacaacaatgaccctgcacactccccgagagcattcctcaactctcttgtttaacccagaccctgccacagagcatggcactcagcatttgttaaatgagtaaataaaaactaccaaggatgggcccaccactgtgctaagtactcagccaacatctgcacattttttcacattgaattcctataaccagcccatgatgtgagtattatccccatttcacagatgaggcaactgaggctcagttgcccaaggcctccttgctagccagcagcaggtccaggcttcctacctcagtctctgccgccacagagccccgtttcgccatccccacccacgctattatgcacccactgagggaggcttagctaagagatgtggggtaacaaactgtgctgtgaaccaggaggcccaggggctaaccttacttccagggcacacgtgctgtgtgaccttgagcaagtcacagactctctgtaagcttctgttgcctcgatgaagacagggagatggatggcctggtttgccccataataatttatctgtcgtgtgttcctggggaatttgcacttgtacatggcaaagaacccacagccatgagactggcacttcccagggctgctggggtcttctctctccagctactcccctggcagtggctgcagaggctggagcctagagcctgggccaaacacatgctcctgtgtcagtagaactgggtcatccagcatctcctgacctgcctccaaaaccccagaaggcccccctcttacctgcagatgtcaagctgagtcaaggtgcccagcacacacacggcatgggtgggctgctctggggtcacacggatcaatgtcccctgggccatcgtcgggctagctcgtccctctggctgtaggaagcccctgggctggttcctttatatcgcccagcagaggccatgagtcagcacctgcggtctgtggcccagaggctcaacccctccccactcaggtcaggggtgtgggctctcaaaatctcctctgccctggggctgcccctcggacctctagatgggtgtcaatgctggtaccagtggcagggtggctctgtcagtttcttgggaaggatggatggctcagaaagcctggggtggagagtggggctgaggggttgggtcctggtcctcatgcccacagtcccatccctgcctagaggccctgaacaccttgatctatccaatctcacctatgtcaaacaggcatatcagagaggagaaggtgggaaaagcggggagattttaggtaagcagtcacaggccaggctacacgttcaaagaccaaccaggcttgggacaagtctctccacctgggccacccacatgacagctcacattctctatgccaggcacgttttcctgcacttcacatagaatagctcattacgacaaacccgtgaactagatcataccattatccccttatttcaccctcacagcagccctctgaggttggtgccattattatacccattttacagaggagaaaacagaggtgcagttcttccacagctcgagagtggtagggccagaattggaaccaaaggtgtccagttccagagtgtgagattcattagctgcctgtctatatgacacgtgctttccagactgtatcacagctacatctcgctacaatacaaggtgtatatgggcttattattacaacccattttacagaaggaaaattgaggctcagagagtaaaagtgactagctcttgcccaaggtgccagagctagaatgcggcagagctgggaagagaagatgagcttcctggcatggaagttgatgttctctgcatgctccaggatacctgcctcttgccagggcctctgggtgtcagaccagacagtgcaggtgtgggccacgcctgccagggggatgcccatgtggcctcagagctgtggttgcacctgggccattggtgccaggctctgcctttaatgaggcaactggggggtggtggatgggtcccaacaaggagcactcaaagggtgcatgcatgggagtctggcgtgaacatagagcgtttcgtgggttggatatcttgcgtttgttttttgtttgcttgctttggctttgaagcaaagaatttgcctcattaattcagagtcaggctgtgggatcaaacaggctttagttcaaatcctgcctcatctcaacatccctatggagtgcgtcctatcaggatgcccatgtgtagatgagaccacaaagacttagagagattgagtgagacccccaaggtctcataagccctacagtggggatctggattcagaccaccttctctgggctcaaaatttatcttctgtaccagcagatgatgatgtggccaggtccgacgttctgacgcatctacatgactgcctgcacacagtgttaataaacccaatttctctggctgaccgcatgattagaactagtttgagcttctactgggaagtggcaggagggagctgtccattgttagagttgggagggcccttagagaacacccaatccagtcctcgttttgcagaaggggagactgaagcacagaaagggagtgggacctgcccacggtcacacagcaaatcagagggagggctggcctctaccccaagtcttaggtctcttgaggttgttttcttctgttccttcttttctttcttattttcttcagcagtttggggtttaaatttgctgtgaacgagccacaaagaggacgagccccaaagcagttttgttaattcaacaaatactgactgagtgcctattgatggccaggcactgttccaggcaccgtggatacgctgtgaacaaagtggacaaaaatcctgccttcatagagcctttttgtttgtttgtttttgttggg

SEQ ID NO: 1539 - DNA, 4001 bp, Homo sapiens
agctctcccagtcctgaactgctccatcatggttctcacccccagccccgcactgggtgcacctggagagctttaaaccagcggccaggatcctagccctgaggttccattggtacctcaggtttaattggtagagggggtgtggcctgggtattgatgttattagctccccagtggttctcacctgcaaccaaggttgaacactcctgccctgaatgagccacctgcttctaccacaggagaacctccccaacataggcaccccattagggagacagcttacccaggggagaatacacccttgggctcaagctcaaatcctgggtctatcccactctaggtaggctacttaggtttagacacagcactctgtgccttagtttcctcatatgtaaagtgatggtaggccaggtgtggtggctcatgcctgtaatcccagcactttgggaggtggaggcaggtagatcacttgaagtcaggagtttgagaccagcctggccaacatagtgaaaccctgtctcatactaaaaatacaaaattagccgggcatggtggtgggtgcctgtagtcccagctactcgggaagctgaggcaggagaattgcttgaacccgggaagtggaggttgcagtgagctgagattgtgccattgcaccccagtctgggcaatgagcgtgagactcaaaaaaaaaaataataataaataaatgaaaataaaaaataaatcccagtcctgctggttgctgacttggcagggcaccttcgctaggtgcctctgtttctttgtaaaatggggtcatggagtgcccacaccactggtctgttgcagacactggatgagatcagacgtgcaaaacaacgtgtttcccaggctcgagtcacgtctgcagccaggaggaagccccagtggctgtgctaggtcccaccccgggagatgcccctcacctcttcccctgaggcttaccttatccgcatccacggaagggctgggcgatgtcatcttcactgtggcgtacgtgggatcagacaggggccaccagatggtggcgtcctccttctcagaaatcaccgtgttggccacatcgatcaagaccctcccagagccatggatggtgaagcactggcacttctggggggcacacctggtttgcccggtaagagacacgcgtcagggcacaaacaccttctcagcctaggagatgactggcatgggggaggggacggctcccgaatcctcattctccttagggtgttgaggcagagtggtctggggtccttattcctacccaccccctcccaaaggacccctgtgtttgctctccgacgggctccagcccaaaccccatcccgctaccgacactgcagaagttaccacagctacatcttagtaataagcacccaattcccaagaaggggggagccacaaaggatccccataaagaaaaagatcagggcaagcgactcaggaagttgtactgtgaccctgctgagtcacctccacctgcaggctccagcatctagcagtctccctggcctgctcctcacagccccccgaggccagcgtccccatggtttcacagataggggaacagagaggccaaggcccttgcctcactaagagtccatggcagctgctacagggcagaggcaggatttaagtcagaattctgcgtggttggaactgggaggccccccactagagacccaaggcttcccaagatggggcaggatagtgaggctagagaagtaacccccaactcccagatcaaggggactgggtcccaggcctgcctgcctgtctgcctgccacctctggcagagctcccagcatctcacccgctgagatccaagcagatttctgtgcccaacacacaaacggcatggacagggctgtccagggacaggtggatgatactctggaaggacatggctcggccctccacgctgaccatcctcaggcctgcaccgcagccctcactcagcacagcagcctcagacgccccagggctcaccctgcccttccctgttatacagtccaggcctgtgcaggccacccccttgttaagaaggggaggggtcagcagctgcccaggtgtcactgattttccctctaagagcttcctggtggctgatagtctggggagcaggtggcatcagaaccccttcatcaccaatttatcaggcacctcgtgcctgcagagctgcaggccaggggagtctgaggccggttgcttaggcatctgtggccttcagctgggaagaggaggggctctgggaagtcggtgccttggagtgatcaacttggccatgttgctggaggactcagctggaagctgtcggggcaaatacctgcagagggcagttgggaggagttgatggtagcagtcaggatggcaatgtgtggcagcatgcccaggctctggggtctcagttctagggtgtgtgtctcctggaaattgacgaaggagctcggcaaagtgctggactggtggtttggttttgtttttgagacagggtctctacccatgctagagtgcagtggcgcaatcatagctcactgcagcctcaacctacctggctccagtgatccatctcagcctcccaagtagctgggactacaggtgtgcaccaccatgtccagctgatttttgtattttttgtagagaccgggttttgccatgttgcccaggctagtctcgaacttcttgatcccagaaatcctcctatctcgacctgccaaagtgctgggattacaggcgtgagccacagcgcctgcctagactaggtggttattaaccctctggtggtttcaaaaattatcaagggtgcttgttaacattgcaaattcctgggcccagaaggtctagggtgtggtccaggaacctgcatcccaacccccagtgattaaggtgagctctttgcttacagctgtgtcggtgggggtgggggcacagcaagtgttagtggaatgaatacatcaagccagggtcatcagctgctactcatctcagcggagcccacagagcaaagaaataggaacccttctctggcacaaggaacttacataactgactttaaaattgtgttcatttcatgtcttaagcttgggttgagtttttttttgttgttgtttttgagacagggtctcactccgttacccaggctggagtgaagtggcgtgatcatggttcacagccttgacctcccaggctcaagtggtcttcccacctcagcctcctgagcagctgggactacagatgtgcaccaccatgcccagctaatggttttacatttttccgcagagatggggtcttgttatgttgcccaggctgggtcatgcttactcctgaataggtaccacagtcacatgattccaagttcagagtctccctcctgccctgtgccttacccacctgcaggtggaggtagtgacagtgttacccgtttcttatatgtctttccaaataaatgttatgcatgaccaagtaaatatgtgtgtgtatccttttcttcttctcttcctcctccaatactagcatacagttagataaatttgaaggggctttatggtgagaaagggaaggacgtggagtctattttaaggttaagggaaaaaggcttctgcaggttccttcgaggttacatctcgagactaaagagaaaagttgtaaaatgtgctcaaagttaagctgcttggttacaattacaaacttttcagttcagtggagatgcccctggaagcccattgggttatcttttttgaggaaggacaaggaggtcatttagtcatttgctccactagaattgctgaacacctactatgtccggggcgcttttgctcttttcttctctcctcctactactgtcttcttatataaacggtagtatgtgccacccagtattccataccttgcctctttcacttcatagttatactggagagaagttctttgtatcagtacgtaaaaagcagccttacccctttgtacagctgtgtatttt

SEQ ID NO: 1540 - DNA, 4001 bp, Homo sapiens
ccagcctgggcaacatggcaaaatcctgtctctataaaaaaattaaaaaaaaaaaaaattagctggatgtggtggtatgcaactgcagtcccagttactcaggaggctgaggtaggaggattgctggggcttgggagccggaggccacagtgaaccaagattgtgccactgcacttcggcctgggtgacagagcgaggtcttgtctcaaaaagaaatagtaactatgggccgggcgcggtgggaggccgaggcgggcggatcaggaggtcaggagatcgagaccatcctggctaacacggtgaaaccctgtctgtactaaaaaaaatacaaaatattagctgggcctggtggcgggcgcctgtagtcccagctacttgggaggctgaagcaggagaatggcgtgaacccgggaggcggagcttgcagtgagccgagatcgcgctactgcactctagcctgggcgacagagcgagactccatctcaaaaaaaaagaaatagtaactactcacgagattgttgatgaggattaaataatgcatgtaaagcactcgatggatagaaggtactataaccataggaggcaactataattattttaactacatgcctctcaagttccttatacgtaaaatggatacttcgtaagtgaaaatattgcctagggcctggtgcattttcagtgcttataaaatgttaggaactaattaacaatgctatgtctctctttcctagccaaggtctctcatttttcctggattaagccctttggcaaaacagattctttcccagcagccttttcaggcctcagacacccctaccaaagccagtgtctactgaacaggcccagaggagcccagagggaatggatggggcttaggttgcagctgtcctctcctgctgggaccctgtttctggtgagcagaggactgctgctctgccagctgtgtgacactttcatcactggctatttcaagatacagtccaagataagcacttctcttgtgcttcctttcagacaaagctctctgaagactaaaagctcattggcctgacctttggtctctggaggaagtgaggaaatatcatccagctcgtagacaatgaagacaccaagcactcgagggatgagattgagcaacaaggtggcagagctagagaagaggcctgataagagtgttccagagcattaataattgtgataaaaataatctctgtctcttgtgaaggtcttacagtttacaaggcatcttcacacatactagcttgttggctcctcaacactcctcacctgagactgatggagcaacagtcatctccgttttagagaggaagaaactgagtcccagagttgtatgatttgcccaaggtcacagagggtgagaggcagagctggcctagaaccgggtctgctgacttcgagtccagggtaatcgcggatcggaaagaaggaatggggacccttcttccaccgccatgaaaaacagaaaactgagagtaagagtaaagtacacaaagggtggaggagcataaagaagcccggggttcagggatgtgaggctgcagggtgaaggtagggccgaggaatcagggtagggctgtggggtccaaggtggggctgcgggggctgggtcctgggacgggagctcagtggggattccaggggcactggccgttaaaagtgcgaggcgaccgtgggagggtcaagggagcgggtggctacaggtgtctgaataggaaacgtaaaggacgaagattaatgtgcaattcctatgactgagagacgccgaggccccaaaccgggccagaatacaaaagtctgcaggaagctcaattgagatataggtgttttctccaatcaaacttacccagtcaagctgattcctcagaagcagccccagacgtttaactcgacggaaatgagaaacgacccatgaacccgtggccctttggtcgtcgtagtttccaaggctcaaaatggacgcttggaagcacttctcgttcctcaatctagaactacaattcccgatgtacagtgcgcgagattgcgcattacaactctaaaactacacctcccagagttctacgcgaccgtccagccccgcgtggtcgtgcgaaaccgcccaaggcctgggatgcggtgtgattcctccccctggtggcctgaagaggtgccgccgcgatttctgctctcgagcggagggttttgccttagtcccgtgcgtaaccctccgcctcaccctcctcaaatagtcctcaggcgtgcctagaaatggtccccgcttcgctttattctcaaggaggtgggaggaggttggagtttgttttgtgtcttctgcacactttgcttcctgtaagaataatagactgatcattcaaattaaggggacattccctaccagcctgcatctgttgacacctgtgattttccattgtcctcaaaagactccctggcagagaaaggggaggaacccgagtaatctgctgggccgcatccatcccacattactgtctaatgctggttcttagcgacactgatggacaagataccgctcctagcctcaacagaatcacagtctagcagagaattcagacaaatgaataatgacagcacagagccgtgatctcatggggagacacagcaagcgtgggagccttgaaaaggggcctctggccaggcttgggggaaaagggcggtgtccgcaaggctttttagagggagtgatgtttgttaacattgagacccgatataaggaaagaacgtagccaggagtacagagactgtgaaggacgtttcagagtatggcattaagttcagtgctggctgcagctaagtgtgagggatggaaggagagtattctcgggggagtgggcgttaggcagagcccatcctcaggagttctgtaaacttctataggaaatttggatcgttcaggcagctcaaaaacgttcaacggccctctactacctatgaagtgaagtcccaactgcttagcctgacattcaaggtcttctccaacctgcactcccccacgccccaccccccacccttcagcgcccctcctctgggagctttgttcatgcctccaaagtttccgccgacatctgtgtgtgcctcgcacatgtgagtcgactcacactgccttgggtatctcctgtattagaggtcttaactcttgacacattgtgagctctttgaggtcaggtactgagtcctgcagtcgccccctccaccctactcttgcagcccacatccccccgaaacaccagggtccagagtccctgctttaggctctcctctcctgccgacacactgttgtcacccccatccttccaggagccaagataaagtcatcaggagagagtgctggcagccctgcactgtggtaattaagcctcggatctcattaaatctgtggctgatggcggtggccacagaacctgaaaagcttagcgcagatcagagagcggctccctttggcccattaatccgtgctgtgcagctggccagaacactcacgacaagccagaggtccttggtcatgagagggacagctggaggtcatttctttcagtctcctactcccagaccaggccatgctggagccatttgctggccagctgagtttaaaatttcccagggatgggcatgtcaccacctcctttacctcctttgtcacagttaggaagctcttccttgggcacaatcagattcttccctgttgcaaaataaaacagttgagtttaactatacttccttccaatccggtcttttctaggataaacaacccaaatgcctttacctttttaagcaaatggttgattttccagcattttcatcatagatctcatcctccagtagcccaaagttcccttcaaatctatcagctaccatcccaactctggcctttactttgttgctaaattgcttcaagttggtatttgggtgaccagctttggatttccttttttttaggggggcgggggggacagagtctcgct

SEQ ID NO: 1541 - DNA, 4001 bp, Homo sapiens
cactggagggaaaaagggcttgagcgagggtgtcccccaactgaaagaggcaaattcagaacaagggtctacttgtctatttcaattagctaattaggagatataagcattagaaatagtggagcctgtgaccacacaactcacgcagtctaataaagtaacctttagacaacagctgtaatgtaaaaggcccatgccaaaaacaacagagcagagccgagttcctgtcccttaaagcaggacagctgagatggtggctgagtttaatgacaaaaaaggacaaaacaaaacaaacaataatcccgaccaaggttttctgaagagaggaaaatgtaataattagaagctagacatttaacaaagcattgttttatggaaaagtgccaaccttatcaatagacttctggtgtcttactattggctaagaagacatttcaatttactgaatgtttcctgggtgaaactaagatattgtatcaattagtaaaaaatctaaattaggattagcataattagttatgcaatgaaaattttaagaacaacaacaaaaaatccctgatctagcatcagtttttaaaaagtactcatttttttcctatacctaatgtcagtggcagaaaatgctgagaaattgggatattgctttccaaagatctttttcttcttaaaacaattacatcaaaagttatagctagggataaatgattgtgacacagatttccaagttactgccaaatacagggttttataaaattaaaaagaaagctggatcatttaagaaaagtaatttatttctggctttgactttttcccggaacaaacataaaaaatgtacgattttccttctcggtattaacaaaatattttccaaatccactgcatgcactgcattcctttatcaggatcttattcagtttgtgactctgctggaaactgatatcttagaattaatctgatacgtgcttttacctagttttctcttgtttaatgcttaaattacgtatattaacattcattttaattattttaggctttctggaacatgctaccacactacaaatataaagtttcaggtcatttttaaaatttctttttctctctttaaaaaaaattctaactttttgaggcattcatagcttaaaaaagtttccaagttggggatctgtttttttatctaatgccagtcaaatggacatttaaggaaaaactgcatttctaaggtacaccacagagtgtgaaagatagttaatcagactgccttaacagcttttgattgttgtttaaaatgcaggcacagcctttttgaaaatcaagaacgtttgccctgcactcaggttctgaagccccagagttacagagggtcatgagggttaagagagaaacagagactcgtccatgaaggctgacagttctgtttttccacttgcgagggctcagcgacaggggcagccggccacggtctgccttcctctaagtaacaacgttaatgagttataactgtatgcagacttactgtgatggcctggagtcttcccttcaccagctcagcttcttccattctagaagtcaaggacagtcagacggggaagcaagtccaaagctaccataaatcaaggagcctcctgggggagaggagcgggggtgacagaagagaagcagggagaaatccgctctttgcaccagtggagaaatagagaaattcccgacttgtcaggagcgtctccgagcagatgcacagatcaggccagacagacacatgtaatgagggtgtgctggggaggcagacgctgaggctgctggcatgagttgactgacaagtttgaacggcagcggcacaagcccttttccttcaggagctgccagctctttgttgtaatgtgcacagttagcaaggcacattttcttattaactgttccttacccaattcattattttccaggagtggcacagagagccaacacactgagtgtttaatcagcctctgctctagcaacacacagccatccccggatgtgttggtctgtgtgtgtttgtacaaagctcgtttacctgcttgctagctctaggggagagagccttaccttgactgaggcagaagtgccaagtcacttgtttgcctttcttccactgattggatttgataataatacaacaatctatagctactttaaacttcatgtagtggtaaatttacattggttcgttctcccccgtctacaccccacccccgacccccctgctcagcactttgttgcaaactttggaatctttaggtcatggagaaatcaaaggtgttaatgtgactatattaagaagttggcccaccaaggtatttagtgtggcttaagcaccaagtgccaccttttgttattgcttgacttggatttctatggaatgcagttttctttcttggacgctgttcagaaatgacactcttggctttcaggaaggtgcccattttgacctcaccggttacgcaagagagaggagtgagcctttgaaaatgtgatgagacatttggtaactgcctggagcccggcactgtgtgaatattcgcccatcctttagaaaaaggcaggcaagcccagtgagactcttaggtcaaagcagaggctgggaagctgtacaattggctctgtctgttttcttttccctacaggttctttaattaaattttgctgaagtaaatcctaattaccaactaccttattattatgtgtttgaatgctattaagcgctttcatatcaacattcagctgaagaggttaaaaggacaacccaaacattgaacatatggtttaatttcctttgcagttttgatattagtaataataatagctaatatttgttgcattctttctacaggtaaatgcatacttgcaaagtgctgagagataagtgctataatccctactttaaaaatgagggaacaggctcagagaggtaatttgccatatagctagtaagtagcaaagccaggattggaacaccagctgcctgactttataagtggcattcatcaaggactgcccaaggacacggggcaaggagaggcacaggctgaaggttaagtcagtctttatgagaagtggttggacccccagcctccttctctgtctagctcctagaacactacagctgggtgtaacagcctaaggcagaacggtgtgggaatgtcctctggagaaacttattggccctactgaggtttccccacattgttgactggagttccccaaccacagagccctcattctgtcagtcactataaggtgaaacccatgttttaagagtctgaaattatacttgagagtagtttgtccttgctcatacaccctcagaagggatacttagggagaccagagaatgggaggattgtttggatgtgtgccaagtttgattactgttggaaacatatttaagtgtaaaaaaaatcaaaccttcaagacttctgattatgtttatttgtagatcctggctgaaattaaagacaagaaagcagtaatgataaatatctcagtcagaattgcatatttggtgcctagaacaaatgggcagtcatccaattattagtctggatcttttcctaaaaacaatttacctctcaaatctcatttctgctagaggaaaacccaagattttgctagtgtaggggaggacaagatttaaaaaaagaggatgggaatttaggagggagcagagttgcaacaactgattggtatcatcatgtgagtggtaggcagaaaaggctggagctgggaaaatctgggggacctgagtggaatcctggagccagagctctgatggtcttgacaatctcccttggactgcaatacagattaggatgtttccactcaacttcgcctccctttctctttcacctgcctcttagacatgtccagctccagccttttctgcctgtcctcccatgttctctcatacagtcatttctcctaataaaattctgtacatttaacccatcttggcatttgtttcttat

SEQ ID NO: 1542 - DNA, 4001 bp, Homo sapiens
actccagggccctctagggctgcgacagcccttcctggacagccccagctctgcggcttcactggcctctcggggccacacagaacatccacggtgagccctgttctcctggccattccccaagtgacttatgcaggtcaactgcaattgcatttcagaaacatttaatcccgacttgcttccagtaacagaatcccccagtgtaagggcagcagaaccttgcagagcacacgctctaccgggcctcaaggtctcagaaggctgggaagcatggctggggagcctctggtgaggcctgcggtagacaatcccctaggctagggctgcaagctcagcacctgcagcccaataaccagtcagtcccaagtcctatcagcggtccctaaagatgctactcacacgttctcatacctggcaccaggccacaccccctaagaagcattgcctcccataagctcactgaaaggtgggagccaggacctatagctacttccattctcatcgccccccacttccctagaggacacccttccctggctggacatctcagagagatgatgacaccaacaaccccgaggacaccacagcagcaaacatgtcagatgcaccaggagcacacagctcagagggaatggcctgggtctctctgagtcccagcttttccagggaggtgggaagcagtcagcggcaggcccattcatcccagtatttactgggcggcaaagacaggttgggcatccttttcgggggctggggctacaagacacaccgctgctcttgtgggattcacacacaagcagactcagcctacgaccgagatgagtgctaagagggagaggtatgtgaagccgcagcggctattcaaggggggtttctccaggtgaagctgcccccaggaagccctcatgcctgaaacatgggcagagtaggagagcagggagtggctggttcaaatcctggttctgccactttctagcccgatgaccctgggcaaattagttcacctttctggggcttggtatcctcatctgcgaaaagggagtaattcgcgttcctcccctagaggtggctgggaggtgtccgggagtcaggagcgtgggaaaaaggtctagaacagagcctggcccgccgtcattactgagagcacagccatcaggcaggagggtctgcagcggaccctggagaggccagggcagaagtgcaggccgccttaaaggccacggaaggcacgggtggcttttaaaccagaggcacgagttcccaggtcccacgtccacggccgcctgaactcacgcccggcgtccactctccagagagcggggcctgtgcacggactgtccggcccgcgggccacagctggccacgccgcgggaacgcgcggccttttcggggccactctgccaagggcttcccgccgagctcgtcctcgtctcgaccagaactaaggaccccaaatctcaggccagccaccagccaagcggcggagccggggcgcccagatgccgatgtggccgaagacataaaattccgccgaccctcccacctcgcggcgggtaacgctggaccccggcccccagccacccaggacggccgcgcgaactaccaggcccggcaggccccgctctggtccctgcggcgcctgccggtagctgtagtccggccgtcgccccgagcccgcgcatcagcgaccctgcggactacaaggcccgtgaggctgtgcgcgggcccgcggactacaaggcccgtgaggctgtgcgcgaggcccgcgcccccgcccttcgtccttcccgccgcccccgctcgccggcccaccgccggcgccccgcccgcccccgcagcccgcgcccggcgcccggcctgcggctacctatgtcgatggcgaagcgcttggcgttctccaggttgcggaagatctcgtcggggggcagcgtgatgctcttgtccagactgtccccgctgctcccgctgccgctcgctccacactccgccattttgaaagtgcccggccagctcatcagccatggagatatatgcgcatatatttgactgccaaacgccccctcgcatagattatgttaatgaggcgccggccccgccccttccctcccccacccccggcctctgaggtctcggccgctacagggcgagctagggccagtgctgggcaggggtccgagaggcccggggctgcgggcgggcgggcggttatcctccagagatcgcgcatcagcacagaacatctggactgatgttcttttaccgcgctgtccacaggcttaactcaagtgctctgagccctgctgagggaggccgcagaggccgcccacctgcttctaagggggcacgtgggtctgcagactgtcagagagccctgcccttcagcgagtgcctgctgtaagcttggccctgcacgccagggcgaatgtgatgcgctctttgctagggtgactcaatcctggcttcccaggggcgtgggactttcaatgttaaaagtcccatgcaaaccagaggagtggggaaccctgccccacctgggaggagccccagcctggcatgcacctgcgggtagggaagatgtgtgctgtaatggcgatccgtggaaagtgctgtggtcgggggaagccaggcaggctgcctgtgggcaagacaggtgcctgggaggctgcaggaacaagccttggaagcagctggagccaggacaggggtataggtggggcaggccagggttccagggtgagtggctgggaagccctgctggcatgaagagatgcgtcttctccagaggctctgggcgccttgggaaaaagcccagtgttggaagcagacagatcagcccctcccgggtaacccggggtcattactgcatgtctctggccctcagcctctgtctgcacgtggagaatgccaccagctgcctggcagggctcctgggagcacaggcctgtggggcggcacaaactccagggataatgcatctgtgtgcgcagggcaagccttcagggaggaggcatccttgcctgtgtcttccaagggggtgggtgtgtggctctggagggggagcctgccccagggaggcctgggtggaagagtggagcacaccccaggcggcttagacctctggcagctcagacccctggcagcatggtgtgccatgggccaggctggcaggaggtgccctccatgaggggcgcccacctgtgtgcccactgaacatgcgggaaacatgcaggtgaatgggggccttccctgtcctctgcccaccataccccggggctcggtagggaccactggcaggcactgggttggtctggtggggggaccctgtctagactgcctgtggagtagccagaaaggggctgaaggctgagcggagcgagaggggctgagcaggaaggagcaggcagggcaggcccacacacggggctaccattcagcgggggtgggaatgcggcccactccggcccaatccttgctggatggattttgccccttgggagctggtccctgggagccacaggcctcagttcttgcagactcagccaacaccctgtggcctgcctaaaaatacatgccctttctgaggcaagggatggccccgtgcaggctcctgccaggactgccagatcctgccttggcacggtggccagcgggcaggtgtccccggagcccatgccaggactggcgctgcaggccgtgggagtgtgcagcagcaactcggggcaaatgttttctcctgtttggcccagggccaagcccctttggctgtagcaacagatctactgcgggctgtggccctgggtcgcctctcagtggacacagcctaaggtcctgcgctgtcaccttgccccacccctaccttccggaagctagtgaaaggcctgggcggggggagacccagggctccgaccatgtccacccctccagcccacctccccctgcccctgcccctcacctgctttccctccatccctccctccccctgttcttccggagcaaggacc

SEQ ID NO: 1543 - DNA, 4001 bp, Homo sapiens
aacaacttagatgtaccccaaaaaatgggaaggaagaaaatatatcatggcacatccacatgtcagaatgcaacaaacacagaacaccatgttttggaaattattttatgtcttgggaaatagcaaatatgcaattttaagtgaaaatgcaagattataaaattatacgtgtattagaatcctacttttatttaaaaatataaatatgaataattcaaagtgaaaacacctatccagcaataaccactatccagccacctatccggtgataaccactgcatatggatattgggattatggattgttttatagtttcttcttcaaatttttctgcatagttctaactttctacagtaacttctattatttttataattaaaaaactatttatatgatttggaatgctttacagtgaactagttaagaagaaactcttcaaactcccaggtagctaaggcagtgtttagcagataactatgcggagagccatgtccagcacctggggtatttcctaagcaaagagctggtggcagctagagagagtttgggaaaaagctatatcttttcatctttgtatcctcaacacccaatatcgtacctcatctggaccagaaacataatttacaaggcctggtgcaaaataaaaattcagaacttcttgtttgagaaatattacaaatttcaagatgttaacagtgcattgaaccaagcacagggccctcctaagtgtagggccctgtgtgactacagagatcccacacccatgaagtgggccatacattgtaggtgctcaataaatacttgttgaaaggaaagaaagaatgagtagatagaataaatacaaacagacttctcaactgtgcccaatggcaaaactagactcagcaagatttgaaattatgggagtgttctgtactcctagaggttaaatttttaaaagaagaagaagaaattatgggagagtatgaggtcataggcataagaaatcactgttccagaattttcccagagagtttatattcaaactacactgtcctgttgtcctcaaaaatgtatctgttagatcatagtccacagtttctatttttgatctggacaacatgatcagtgcatctatagaagaaataaatattatcacttctgtctgttccaataagatatttggctcaattatatcctccctcactgcttttgcctcaacctacttttcctctcataaccctaagcttagcaatagaactctccttacccatcctttccttcctgcaccccacacacactcatcctcagcactccctctgcctttaatgccagccaagcagacactgaacatgagaaggtgtctgcagaggatgtgaataaccctcatcctaatcccctccatggtctccctgcacaggcctggatgaggcccaggagaactggagttgccagctcacagaagcagttgcagcctaaaagaagaccaggcagccaaaggttgtcacttatcaaagaaaaatgagacaatttgttacaagttattagactggagaaactgagccattaagtgggagcctgacccttggatgggaacaatgatgctaaagggagatgctcatccccgcttacagggctgcgtcccagccctctgatgccaaaagaatacaagaagtctaacacccccctgcacaagccaagttagcaaacgtccagcatcttgttcagtcagcagacatgctatggtaatagtagtgacacccccaatacataccaagtgttttgctccttaatcactgtcacagacaattgatactgccattgatactcgtgggcttggggaggtccccaaacacccgtaggacctcaatcctggctggcgtccaggctcttgacactgttgtgagaaggaatttaaggatgagttggaaaatactgaaagtgcagagatgtatcacaaagcaaaaagtacacacccgagaaaagggagtgtgtgcctactcaagagagagagtcatgcccagtggggttcagggtttccatctttatgagtttctttaactaagaggtggaatattcatgaagattcctgggaaaaggtgaacatttcctggaactgtggtaccacccatttttacaccaatttgggtgttcccggactatcacggcactggtgggtgtgtgatttagtaagttaatgaacatataatgaggttataggtgaaacccatgtcaaatccagcaccattttgggtccagttggtcttagccagcttagcctacatctggttttcaggatcttatcagcccctagtttatgcagctatttcaacaatttccttttgctagtcatgtgaaactgctaactgctccattctccagctaccacccagtattaccacttggtccttacaagaacatgtgatgtaagataggacaagtattcaatctcagtttataatttaggaaactgaaacatcaagaggttaagtgaggccaggcacagtggctcatgcctataattccagcactttggaaggttgagacaggagaatcacttgagttcaagaccaacctgggccacataaggagggcccatctctacaaaaaatttaaaaattaaccaggtgtagtggtgcatgcttgtggtcccaactactaagaagggctgaagtgggaagattgcttgagcctcagagatcaagcctgcagagatttgatcataccactgcactccagcctggaagacagagcaaaaccctgtatcaaaaaaaaaaagaaagaaagaaatagagggagatagagaaaggaaaggaaaggaagggaaaggaaatgaaaggaaaggaaaggaaaataaagggggaaaaaaagctgaagttacttacccatggtcagaattttagctaatcacaggcccgggacaaaaacccaggtttcctgagtttagtttaatggctctttctacattgctatggttgaggctaggtgtaagtatttctcaattacagccagactaatggaggtagggaggtatacaggaaggatgagggtggatgaaacagactctaggaggaatttctgggcatttttacattaataaataagacataaataatttgtcatttatattgcagcttagtggctaccctgtttttaattaatcacataaaagcaggaagcctgaccaaaagtggaacaaacaatttctattttggtttggaatgagattatttttgctttatttgaatatatgattctgatgtcctggggacactttttaaaccagatagtgaagccagccttgaatagctgactcaattcaatccaacaagtgttattgagcacgttctcccagccttagacttgtggctgaccttgattgtctccctcaggcagatgcttctttcaagcccctattttgcaagcaaaggtcccattatagcagttatcagattagaatatttttgtctgtgtggctgctttaccactgtattgtgagccttggaaggcaggacccataccctagtcatctttataactcaaaagtctaggagatgagctgagagatgactggtgttggtaaatctgtctgatagataagctaatgaatgcacaaactggctaacctgaaaagatcattgacctctccaaagtttcaggtctcttatttatgaaatagatatgggtacacctattctgcctgagccatgggtttgttaaaagattaaatgtttatatgtttattttctggccttcacacacacagacctcaagcaaacttaaatgtcaaaaacctgaagacaggagccttgttcctcttgttcatggttgtgtcctcaatatctatactggtaccttagtaagtgctcaattaatatttgtagaagggaggaaggtgggacagaaaggtataggagaatattttataaacactaatgtctccaaaaagttagaattcccccaaccaaaatgcaatacattgtgatcatcagaaagcaccttgtgctgcttaaagactctgt

SEQ ID NO: 1544 - DNA, 4001 bp, Homo sapiens
ctcaccaggtgggcaggaagtgagtccagatgttgaccgtctcgttggtcatctggaaggagctgaggacacagtccaaagccgagctggtggggcggcggtagccagacatgatgccatcttcccagaacacctagggtagtggtgggagaggaagggcgtcactgtgcccggaccctttccctccatctgagatctctggaagcagggtcaaagaggctgggctggagatcaacgtggcccccaagccaaactaaatctgatctgatgttaccacaggtcccagtacccacaacccacaaaacaaataggaaaccgaagagccagattggggtgggatgggggtggagcgcagcacacagggcgctctggggaaggggactccagatggagggccacaagcttgttcctcagagaacagaggaagagtctcacactggaatgggagggtaagagttcgcctgcaggaggggctgccccaatagctaaaagagaagaacgtcagcccctagtcagtcctctagggaatgggggttggtgggtcagtgggtggagcccctcacccgggggacctggtggacttgaagaagttggggcagcttgagactgagcatggtggcctggtacctccacgttgacctagagacagagtgggaggtaggggatcagataactgcccccatccacaggcccctttcacctgggttcagccgcaggatgggctgtgcgtgtgggaggcagatggcaccctccctcctggagctgcttccttcaggcctggggaagctggtccaccttccccagcccttgcaccacttaactccaacccctgttctccttggggcattcagtccccacactgaggggcttggcggcctcagcccagcaaagagtggcggggtcctcccagccgggaggctgcctcaaatagtgatccagccccgcaggccccagtttttgtctcaggaagaatcctgactcctggaggccagcacagagacagcctgagtaccactccctttcccaccagaatgtgcttcgcccacagcgcctgaactgagcacagaacactcttggcactccgaatctctggagaagccagatgccatcaggtgggacaaggaggtagggggatgcctggcttttctctgaggactacacttgtgcccccaggagaattttggggtccctgcccctcctgagcccaggtatccctcagccccagacctgtgcactgcctccgggtggccgcagctctgctgccccgcccgcctctcccggcacattccttggcacaagtggaggggctgggccagctgggcaggcggagccgccccaggaggaggactaggacactccccccacctccccaggccaaaactttgcagcaactctataacttagcccctcttcttgccaccagctctgcatccatgtttttgccgcatgcactttggggcttgcaccagcagtcactcccccagcctctgcccgagatgggtgctggagaccctgctgggcaaaggcaaacctggccctagtccctgcaccccagcagaacaaagatggatgagggcctcccagggtatcccttgctcgctcccacaagtgggatggtcgggggtctcccctaccctgagtgctgcccatctatctgggggaggagtgaggaatacgctggggtctagctgccctcacggtgccttcccttagtagtagggtttggagatctctggagtggagtgtgtgcagttgctatggaaatgggggaggggtggctggagcaagatgctttacctctattttcccagaagagccccagaaggtgagcttccttacccagagcttggtgggtgctcctaagctggtgggtcaacaggcccagggctccacgggcggagtccaaggctgctgccagccaggctgatggaggaagagtggccaggcaggcgggccaggcctgggcggggagtggggagacaaaggggagccagggaacaatcccagccttgtccagcctccagggagcagcacggggtggcccagccccattagcaggcagctcactcggccgcctgcacacagccagctcctccagcacgacccaaactccctgtgctgactggctagaacagggtaggggcccaaggcaggatgtggccatggtgctgtagagtccccccggcgactcagagcagtgttcccgttccaggttctcccagcagttggggacagctctgccttaggctggcagaggaacccaaatccccaaatgcagaacagatttcagaagccatctctcaccatgctttgctgcctcttagcacctggtgctgcctagggctcagagcaaactgcctttggtaaatgttggttctatcatgggggattcaccaggctcaccacctccccctccccccccccccccccccgaatacaatttgagatgccaatccttgcaggacaggcacttgaggactcagaggctggtttttttttttttttttttaaggtggagtctcgctctgtcacccaagctggagtgcagtggcgcgatattggctcactgcaagcttcgcctcccgggttcacgccattctcctgcctcagcctcccgagtagctgggactacaggcacccgccaccatgcccagctaatttttttttgtatttttagtagagatggggtttcaccgtgttagccaggatggtctcgatctgaccttgtgatccacccgcctcagcctcccagtgctgggattacaggcgtgagccactacgcctggccagaggctggtttcaaggctcacctccccacccccttggggaagaggacccagctagtgacagcgaaccaaccccaggcagcgatgttgctggcaagagattttcactatcacccctgcaaaggcaccgcctcagtttacagtcaaggaacttgacagtgcctatcaaaccatctccagggccttcactcaaattgcctgcttcttgttctgttccatccacttcaaagaagcctttccaaaatgcatttcaggatgccatcttcagtgccccaccccccaatgaaacttctgtacagacaggcaccaggagacagggattgggcttggggggtttattaagtgatgctttagtctcagtctctgccagcaactgggagtggggtgactccactcaccccaggatttcccagacttgctattttagaggagagaggcaggaagccaactatcctctaagccacagcttgggaagctaggctagtactggggtgggggcagcagagctgagaccctccaccccgagcccctagcctgtgctatcctcccagcctgagggggaggagctgaggcaatcctggctgcagcctcccacacacagccctgctcttggtgcgccattcactgccctgagctattcatgatctctgctcccagatattcacctcaacactccaaaagccagccccttcaggtcttcagtcctgcggaaggcaaaaggagggacgggggcctctgactgagcagcttcaaggagcctctcctttctgctgcccactgaatgccggccccttgtcttcagccctcccttagataggaaggggggtggtggcctcagactgcaccccctttcttctcttcctggcatcccattctgtcccagcacagcagccaagagcacaaagcacagcacctgtggggctggtgggcacaggagaccgtgctggcacaggccagactgcctgcagccctaggtggggcctgctccctgccctggaagctagacagagggagacacaaagcagaagtggggcaatgggatgtgcagcccctgcagcaggaggaggagcacacgaaccctgaccctgctactcggtgcaggccactccaggccttgcttctctaacagcccctgtggctggctccagagctgcctggtccccataaagggggctgaaaggaggatgggtgatccttgaggaggggaagggtctg

SEQ ID NO: 1545 - DNA, 4001 bp, Homo sapiens
tgcggataatgaaattcagagaagtcaaaagctcccagctgggcgcagtggctcacacctgtaatcccagctcactgggaggccgaggtgggcggatcacctgaggtcaggagttcgagaccagcctggccaatattgggaaaccccatgtctactaaaaatacaaaaattagccgggcatggtggtgcatgcttgtaatcccagctactcaggaggctgaggcaggagaatcgcttgagctcggggagctgagattgcagtgagccgagatcgtgccactgtactccagtctgggtgacaaagtgagactctctaaaaaaaaaaaaaaagaaaaaagaaaggaaaaaaaaaagctccttacccaaggttggaggatgggggagggaggtggagccaggactgggctgtagatgcttgcagacactactgctgccctgctccaggcacacttgtctgcatcctacagaacaactttgcaaaatcctggtctaaagcaggcaaccaggctctttcttataaattactttcttaggcttctagcaattcagtctccctcagttgctggctacctgcttgcacctgatcttctccagggaggccctggctcaagccacctccttaggtgagtgacagcgctcgcttatacctccctcccccagatataatgggccctatggacaaaacctgaggcaccatgctaggatgacagagaccccgctgccctattttctttagacctcagctagaggcctcactccacctaagtaggtctgttttcagaattagtttccacctcctgactccatggaaagggactctgatccaggggaaaggaaaaagcaggggcaggggtcaagcctgagccagcaggatgaggatggatatccggagggcaccatcagggcatcctctgagtggtcagcctctgagtcgtgtgcccaccaggctgctgggccctgtctattcaggcagctcagcccagcccacctccatgggcccctccaagtctggcaaattgcactgggtacctgggggtttctctcaagcctgggggctggtgacctctactatgggactgggcaaattcaccagatgctgagcacttccacagatgaggggcactaggggcggggcttccagggactgggggtgtcttgtgtgatgtcaccagagggtggggctaaagacaacctcccacacctctcctccccaacttcaccactcccatagtggtgaaatccatgctaaactgtgtgccttcctagccaggcctctgctgcagcaagcagctcaccattcacctctgcatgagacttacggggaaaccgagggccagctgaaaagtttgacttacctaagatcacacagcagggcaaaggcaaagccaggtgactagggcctggttgatggtgtcaggcaaacttcagtggttcctgtccactactcagtgggaatcagaatggaagaaggttaggaataaaggaaaaagcagacggtataaaagtgcacagagcagatggacttcagattcagacaaaccaggtttgactcctgattgcataacatgctagctatgtgaccttagacaagtgacttaccttctctgatccttagctccctcatgggaatgacaatattatctacctcataggttgctgtaaagattaaatttattagaacaaagttttagcttcatttagggactcaacaaatattgcaattgttattaataataatagtagtagtctttgaaatatccccagcctgagagatttgcttcgagttttctaaaaaaaccatcctcttttagccctcaatagctagttccattagatttgggggcctcaggaagttcactgtgtgcttaaacatttaccttatccctaggggtgtagaccagggaaatctggctagagtttggacttccaaggacactgaccttacttaatcattaaattgttcttagcaaagaccattcagagtaactgttttgaattcacagagccctgtaaattggtgcttacccacaggcccaagagatgtggctaagcagtgacagtcccaggggaaggggcctcaactccagcagctcagaagccctggagagcacgagggcacaagagggtgaaccaaattagcaggtgatccaaatggcatatggtctggcctggacatgtcttgcagaaggtttgggagtcttctgggttggctgaacctctgaagtgcgatctccagggctccagtgggagtgcctctgtcagcctgagccgctccttcctcccttcccctcccctccacttcctcacccctcccaattcatattcctcaactcaaggtcagccctcctcacctctctccttaacgaaggcttgcaagccccagcctgctctccaaggatacacactgtcaaaggttcccataacacccgtggggcaaaacagaccaggctgcagggaggtggtggaaaatgggcttatggagagggagagccctgggttacccccatctcacagatttcactcagtgcttatactatatgccagcctcaacgctacccaggcattctgtgtgctggggcacacagaaaatgaagcagacaggctccctgccccaacgggctcacccacacaaatgcccacagggcctaggaagatccagcctggagggaagccagccaggtagtgagcctggagaactggagaagactgctgccctggtggtggacatcctccactaatctctgcaggctctccggcaggctgtttcaagagacgccacaggcctcatttttatgtgaggatgaaatttcgggtctggaattcacctgctgtgtgactctgcaacagtccctcaacctctctgagcttgtttccttttggaatcagaggattaaaatagctgcctcttgggctcttgtggaagcaaaacaaagccatggatgccaggtgttggctctggcacagtgctggctctgccgtttctgtgggattctcgtcctgactcagccactcaatccctgtgtgaccttggacaagtcccctcccctcttggccctgtttctccaaatgtcaaaggagagagtaaattcaccagtgacttccaagggcccttaggccctgggacagtccaagaatatttactttaggcctcctatgtgccaggcgctgcagcttcctcagtgacagagccatttaaaccactgccctcgcagaactaacagcccagggaattcataccaatggtaacaccacaggattttttttttttttttttttttttgagacagggtcatgctctgtcccccaggctggagtgcagtggtgcaaacacagctcactgcagccttgacctcccagtctccggtgatccttcttcagcctcttgagtagttgggaatcacaggcgcacgctaccatgcctatttttttaaattatgtgtagagacgaggtcttgctatgttgcccaggctggtctcgaactcctggtctcaagtcatcctcccaccttggcctcccaaagtgttgagattataggagtgagccacagtgctcagccaacacctcaatatattaataccctgccctcctggagcttacagctcagctaaataacacctattataagcattatttgggtacaattccacttcctcttttgcctccttcttggcatgcaaaatattcgttgttgcctttctgggccctgattgttcagcacattctcttaaagacaactttttctcagcatggaagggaaagtctaaccccattagatacaaataataaggccagaccaatgttaatactggggctattggaggaaaaccctcttgaagggtctttagtgaggatgacccaatatggcacctgaaatatcattaaggagattaggtgctaccactcataatatatagtggctgggtgtttaccaagaactttcacacacattttacctctccctcacaactctctggatccacagccaacctgggagcccagc

SEQ ID NO: 1546 - DNA, 4001 bp, Homo sapiens
gcctgtaatcccagcactgtaaaaggctaaggcgggcgggtcacttgaagccaggagttcgagaccaacctggccaacatggtgaaaccccatctgtactaaaaatacaattagccgggcgtggtggcggacacctgtaatcccagctgagggtgaggcaggagaatctcttgaacccgggaggcagaggttgcagcgagcagagatcacaccactgcgttccaggctgagcgacacagagagacaccatctcaaaaaaaaaaaaaaagaagaaaaaagaaatgggtctaaggacagtgcagtggctcacgcctgtagtcctaacactttgggaggcctgaggcgggtggacaacttgagctcaggagttggagagcagcctgggcaacatggcaaaaccctgtctctacaaaacatacaaaaattagccaggtgtggtggcacgcatctgtagtctcagctatttgggaggctgaggtgggaagatggtttgggcccaggaggcagagaccgaaatgagccaagatcctgccatcgcactccagcctggacgacagagctcaaaacaaaagagaaatgggtctgaaggaaatatggcaagacattaacaagcgttaaatgtgagcagtggatcaacaggtatttattcttatgtcatctctgaaattttgtgtatatttgaaatatttcatagagcactttgaatattttattcaaaatgatttaaaaatccaaaaacatttaaaacaggaatggctaaaaatcgatgtgggacttaccccagctcgcctcatgacatctacagggatgaccgtctccatttcctctgctcctttagccaggatgaccagagctcttttggaagccatttttatgttatatgtttacaagccttaaaaaaaaaaaaaaaaaaagatttcaaaaaactttcattgcaaccctgagataccccaaaatttaaagtttaggagcattttcaagcagagtaagtacttcctagggaaacggttttcatagacaactgaatacgaaaaaagcagcagtttagttatcttaacgttgatttgtatagcagttttaattgctctgagatgaaaacataatgagggtgctaaaaggtgtagtattgcttagattttcttctaccatgttctcttaaatccaactttaatagtatgttgcaaatgggttttttaaaaatacaagtacgtgggtctcctgcatttcacacaatgcggggaaacagtcttttttgaagcactgtttcagagaaacgactaaactgaatttcatgggcaaaaatttaaatgtggtctttcgcaattaacttgtaattttttggaggggatttttgttttcttagttataactgtactaaaaaattgtgtgtgggggtcaacagtgttaaatgtctgaacactttttttaatgactgagaaagatggaaatcccctcactgaagtcaacccaactacatctgtctctctgcgcggagttctcactgccaacgacagcagctcaacgaggttccgaattttttttagcctatttacagattatctggagggtttaccgtccacgcaaaacagagtttaataaaacggctagccagttccatgccggcgagaggttaggcagaagattctggacgcttcagcgttgccaccacgctggcggtcagtcaaatccaacgccagcgacagggcccgactgggaggccggaagcgagggcggccccgacccaggccccgcgccggttctgagccagcgggacaccgtccagcacagggacaccgtccagcacccccacgccgcccagcgccacggcccacacatgcgccgcgcccccgctggcgctgacctgcaccccgcgcctcttcctgcggacgcggcgccccggcccgttgggtaccactcaccccacaccaggctgaaaatgaacgcacgccagcacgcacgcgcgccgtccggcctccctcagccccacactgcgcagactcacgccgccttggcctcacgctgcgtcacgtccggccgagtctacctcggactgaggcgggggtggcaccggggagtttctagctggacagccctgggtgaggcggctcggtcccacatggtaccccccacgaatggcacagtccggcctgccccggcgcccgcggggcttaacagtctctaccgccaccctccgtgaggagccggtctctggaactgccgagggactggggttgtcagaggggttccttagttcgcgctccgtgcacgcctgctccctttgcgttgttccttttctggcgcgccttcccgtttcgcctctggtctgttaggactctggtccaggcctcccggacctctcccccacgcctggtctcccgatctcgggcgactctgccgcatttattcacacccggatgtctcaggggtgtgagtttttttctcagcattgtttgttttctttaacgatcctgatgctgctgcacccacaggactagagcagtgctgcgcacataagtctaataagtaccaagttggtcagatgtatttacatcataatctcaagttgtatttattgatatgtaagagacgtatgtgttttctgggtacatgtggtattttgatactttcatataatgtgtaatgattaaatcagggtaaatgagatctctatcaccttaaacatttgtctttatactgggaacattccagttactctcttcaataataacattttaaaatatacaacagattactgttaactatagtcaccctacagaactctgccaacgctaggtcttattccctcttaaggagagcacagatcacctggtgaccatcaagcaggccccttatctgaggaatttagaagtaattagatatccctattatctaaagttggcacctggtaccaggttaaatcaaaggaaatagttaaagcccaaaattcttgaatgagcttagaaggatcctggctaaatgaacgcaacttggattgaatttgcaaaaaatgagacattcgaaaagggacatgaaaaatccaccgcggcatgctcagttctctcttgctgaggctgcactcttctgcagcgttctaataaaactttcctttttcaaacctatattgttgtcgataaattcttcttaccaaccagcaagtcgaccactttctgatgctggggctcttgacaccttgcccagcacttctaccaatttttgtacctattaatcaccctgttcatccccttctcctggctacccttcctggcctctggtaaccaccaacttatcttcatgatatccacttttcaacttcccatttatgagtgaaatcatgtgatgcttgtctttctttgcctggcttgtttcacttaacataatgacctccagttccatcaatgttgttgcaaataggattttattattttttatggctgaatagtattcattgtgtatatttacattttatttatccagtcatccattgatgaacattttggttgattccatattttgactgttgtgaacagtgctacaataagcataggagtgcaaatatctctttgatatattgattttctttctttttttttttttttgagactccatcttgctctgtcgcctagcctgaagtgcagtggcaccatcttggctcactgcaacctctgcctctgtgttgaaacaattctcgtgcctcagtctttcgagtagctgagactacaggtgtgtgccaccatgcctggctaatttttgtatttttagtagagacagggttttactatgttggccaggctggtcttgaactcctgaccccaagtgatctgcctgcctcggcctcccaaagtgctgggattataggcgtgagctaccgtgcctggcccttcctttctttttggtatataccggtagtgggattgctggatcatatggtagttatgattccagaacttatgatttctcagaagttaatcttctgaggattccatattgttttccatagtggc

SEQ ID NO: 1547 - DNA, 4001 bp, Homo sapiens
aatgagagtaaattatattttgaaaaacttccaactgtaaagtgatatgaaaatatctgtaattatcactggtgaaaaaaaaatagggactgctaatatgcctttgctttgctgcttacatttatgattagaggaaataattttatctagaggttagtggagatggagatatcaattttttcttatctaaactcatggacctcttgccttctacctaccatcccacagaccctgggttaagagctcctgcaccaggagtgagaacttcataacaggctgccttgtatattcaaagtaagttctaggttccttagtgggcaacaaggctcttcaaattgtaggccctgtctacttccctattctcatctttctgctccacttctgtgaattaacgactcctaatcaagcttccacccttagctgggtcatctcggactcctaggcacacaatgcctagagcacagctccatcaggtggcatccatcctctcttacggtaacgtttgtttaccagtcatttcccgtttaaccaaactggaaattcccaaaggtggattctgtgtccttaaaacctaacagagtgcttagaacttaaaaaatgcctaccaaataagcactgtgtgccacgtactgacttaggtatgccccgaggacaccaagatgacaggcatattgtgaaataagataacggaagtacacctggcacttgggtatccactcggtaaatgtcgccctcccttgtactaagtactgaaaatccactgagggatatctggtcattcctaaaacacattacagctcatggaagggaggaaaatcaagctaccttgaccatgagcactaagcttgggtaatatgttggaagcgaggaggaacagggcagatgagaaccagaattattaatacaaaggtagacatcggcaaactggaagctggaggcaggagcccctgggaaatgacaggggccttcaagcccaccacctcacagaaggctcaggaaacctcagaaggggattcaatctatcaaaaagcccacatgagaaacccccctggagccactcttactcaaaccagacagctgcaaatgcaccaagagaacgcgtctgtgaatctggaaaatttggggaaaatgttactttaaagcacaaattaggctcaaagtgaatgtactgtacagaaatgacacctttctgcatagttctgcctaattaaaataaaaaatgagagtgagcgtttaaatgacgtgttgaaatgactgccaaaaataggtttaacaaaaaaaaaaaaaacccacatgtcagtcgccaccatccatgtagaacaaaaaccctccagaacaagataggtcaaaatcagattagcttaaagagaccatgtacaattcccccccaacccctgaggcgaacggcagtaataaaacaccgccacccagaaaggagaagagaagaggctcctcgttttcacaaagcgaaaggcaacaccagctgcagactttatttcccgggcttttcctgcaacatcagcaaaaccttccggaagggtcggccgggccgctcgggaggaggggcggccgcggccccataggccccaagtgccgctccgagggcccgggcccgctcgctccctgggcccgccctcccccagccttcccggacacagttaacccggggcgccgcgtccccgccccgccgcccgcacagcggcccgcacctgcaccatgatggccatccggagcgagtccttggggatgctctcgctgcatttcttgcaagaggcgcgcccgctcttggcgtactcgactcgatagagcttatccgaagactccgccatcctcccctagctgccgccaaagctccggaagcccgacgccacgacctagaaacacgctgccgcctcgccgcctcgcgtgcgctcacccagccgcaggcgcctgagcggccagagccgccaccgaacacgccgcaccggccaccgccgttccctgatagattgctgatgcctggccgcgggaacgcccacggaacccgcgtccacggggcggggccggcggcgcgcgcgccccctgccggccggggggcggagtttcccgggcgcctgccgggtggagctctgcgggccgctgccctgggggccgaggcggggcttgggctgagctagtagctctttggaggacccggcgccacccctttgattgttctgtcccaggaagtcttacttgatttcacaactaattttacccccaacccctcccccttttatttttgagactgagtctcaccgcgctggagtgcagtgccgccatcatggctcactgcagtctggaactcctgagcccagcgatcctcccacctcagcctcccgagtagctgggactacaggcgctcaccacaactggctaattaaaaaaaaattttttttagggacagggtctcgccaagttggctagactggtctcaaactcctgctacaagtgatcttcacgcctcagcctcccgaagtgctgggatcaggggcatgagctaccacgccggccccaaactcttaagtgtgtcctctctcccctgagggcagctgggtccgggaagcgcaggcccccgcctcgggaatatagttgattggcccgaggtggaccctgcagtgctaggtccaccctcctggcttggacgggcgttctaacctgccgtccacagaccgtcgggacaaaataccaactgaaacctagcatttcctttattatgaatttgactacaaataccaggagtattagcagtacctgtgactttgtgggcaatagtcatcacagacgttttcatgttactttacagttgttggtgataactcgaaatattattaagctcatcactactcgaaattgtggtaatgactgcacctgttgctatcagatattttgtgtgtgtgtgtgtgtgtgtgtgtaaagaaagagatggggaatctctccatgttgcccaggctggtcttgaacccctggcctcaagcaatcctcccacctcgacttcccaaattgctgggattacaggcatgagccactgcacctggcctagatcttgttgtttaatatagaactatacttcaaaatatagtttattaaaattggtttcttttctaatcctatgcatttttttttttcatttcaaagattgtaacatgagtgtgctttatttgaaaatattcaattctggtatagaggataagaaaaataagcagatgaataaaactcataaaaagtgttaaccatagagaagaagctagtggcttaagagacaaggatgttgagtaagcaagaaggttgtgagacataggccgaatcctaaaagttagtaaccagttagatacgttgaaggtaggctgggcacagtggctcatgcctataatcctagcactttgggaggctgaggtggccggatcccttgagcccaggagttcaagaccagcctggacaacatggcaaaaccttgtctctacaaaaattagctgggggtggtggcaggtgcctgtagtcccatctactcgggaggctgaagtgggaggatcacctgagccctgaaggttgaggctgtggtgagccatgatagtgccactggactctagcctgggtgacagtgtgaccctgtctcaaaaaaaaaaaaaaaagatattttgaaggtaaacagaataagtggaaaatatgatggaacaaataaaagttttacttagagaatgaccaagtcaaaaggcatgatcatgccatctctgggttgacaactatatcatccctaaatggccactcattggtgataagattatggtcccatcctggcacccatatgctctgccccaaaaatgcagctaaagttcaggtctgttcagcaggctgattggtgagctgcagctgtggctgagtgtgcttgcacttgtgtctctctgatagtgcagtgtgagttgctccaggtaccctctgttgagccgccttgagcatcctcaactctgtcagtgggacaggct

SEQ ID NO: 1548 - DNA, 4001 bp, Homo sapiens
tgctggtccagggaccccactgggagaaccactgcaggggtctagctgtgtaccaccaatgactaatgtcttaaactccatgaagacgacagctatgtctattttattccaagttttatctgcagcattcagcacagtgcctggacacagtggacactcaataacatgttcctttttttctttcttaaaaaatagagatggagtcttgctatgttgcccaggctggtcttgaactcctggcctcatgcgatccacctgcctcagcttcccaaattgctgggattataggtgtgagccactgtgcccaggctcaatacatgttctatcaatgaatgaatggagtaattcttgaaccctgtcagtccagtctccgtattagtctccagctaaaaagatagctgacccaatcactcccctgtttacaatccattaacggctggctctcataattttctcagaatggcaccaaagctcttcacattttgatcccaacacacctcttccagcttcttatcctagcattccccaagttgctcattattcttgaaacagactgacctccccccaacccccagcaattccaactggaattcaaggttcacttactccaagaaactttctccaacccctctaaacagagaaagtcacctcctctgtgctccactgcacacacctctttttagtatactgtattagaatcatctccaaaaatatttttgaggaactattgtgtgccaggcattggaagcgaatggtgtttcacatacaattttttttctttctgggggtgtgtacgggggccaggaggggaggtcagtgtcgatgtttaacattctattccttgatgaaattacaagtttatgaagttttatacatctttaaatttcagagtctcgcataatgcctactatttaggctattattatctgttgatcaaatatgttaataaattaagagcaaagcaaacaggtgcaatgatataattatctggataatttaaacgagagctttaaactcttctcctccacgtttagcatgtctgtcctcagacccctcagcttatacaaacaggagaataagtagaattatctcagtttttcaggagcaatacagtaactaacgtatgcaacacttcaggctctggcaaacagcctctgagacattcagtcgatttttttgagtacctactctgtcgggacactgtcagcccttccagcccaggcctttttaaagattctttgactcaccattgccccccaatctaatcagaaaagttgtacctaaagcgtttacaaccgtacctgatacataatattaagtctcacaaagtgctattattattattattatgcccaactcagaaaagggaggctctgaaatataaagtcacttgtgtcaagccacacagcaaataagcgcagggtcgggcctggaaggcaaggtccccgcctccaaatcctacagtttccatcacgaactgtgctacattaaacagcaatggaaccctaggcctagttctaagaacaagctcggccttcactcgctcggtgaccctggaccactcacttcgccccggacctccgttttctccaacataaaacgggaaggctggctcaggcagcaggtggtcccagggcctttccagagctggcacttcgagaactgtgtgactctcacgacgaccgagggagagaccaggaagtgctgccctcattttacaacggaggacacggagaccaggagtatcgaaaagtttatgggattctcgcccgccccaactcaaggacgggatgcaagtgggaaaacggacaccagggtcctaggtctccgcgcccacaccgcgtgctcgcttcatttcgctgcccgcgcccgtccctcaggtctgggagtcacccacgttcacctaccgcaatcccagcccacgcctcccgcaagaccaccgccgtgccgggccagcgcgcttgcgcctcgagcaagcccgctcctaagccccgcctcctgcccttttcgccaattgcaaagccgcgctcacggaggcggggccgagggcaggggcgctctggccccgccccacgctaggcgcgcgtgagaggttttccggaagtgtagccaaagagcgagtacccggctttccccaagatcgttgattggccagggcagccttgagtaaatcaccgttccggaagtactttctaggaacttgggaggtataactctatgatgacttgagggtgctcttcctgcccctgccaggccccgcccactcccccaataggagaaccactggcgacagtgtaaccatgacgacacactgggcagtgtagtttctaatctatcctatgatttttacgggctttccatttaaatagtataaaattgtgaaacagtttgagaaagacgcctttattacagtgcccaagacagtctttaagacacagattcaaacttccattcacaaaatattttttgagctgctaccacgtagaagccactgctgtagacactggggacagtgaagtgaaccaaacagacaaaattaactgcgttcagtgtagcttgtgttctagagaggacacagtcaataaaccaatagagcgaaatttaagcagggcagggaatgggagcaaagaactcagtaaccaagataaacagtattttaatacaattgtttttttaaaaaaacaaaatgcaaaaaatccatggcaaacaaaatatcaaaatttaaaagaatctgtcagtcagatggtgataagggctataaagaaaaaattagagaaggagaatggagtgggggagttaagtgtttgcaatttttttctttgtttttttgagacggagttttgctcttgtcgcccaggctggagtacaatggcgcgttctcggctcactgcaacctccttctcccgggtttaagcaattcttctgcctcaacctcccgagtagctgggattacaggtgcccaccacgtccgactactttttgtatttttagtagagatggggtttcaccatattggctaggctagtcttgaactcctgacctcaggtggtgatacacccacctcggcctcccaaactgttgggattataggtgtgagccaccgcgcccagccaagtgtttgcaatttaaaataggaggatcaggaaaaacctcatcaagtaggtggcgtttttagcaaagaccagaagggggtgagagacagagccttgcaggggaagaaatttccagacacaggaaacaagaaatgcaaatgtcctgaagtgggaactgcatgttatataactcaacctgataacaactacagttattgaatgcctaaaacataccagacccaatgcaagacactggtgattccgatactggccccaagaagctctcagtacgacaggatcttccaggaacaactccgtgtgatcagtggtgtgataggggctgagcaaacccctgcgggagcgtgggaaaagaaggcttcactgaggaggttacctttgagctggacctgaaggatgaatggggtctacccagacaagaatggcagtgggagtggagtgccaatgttcaggcagagggaccaggacattcaaaggcacagctcaggaaatgatgagccagtgtgagggaagcatggggtgtggtgtggtttacatctttatttctcccagctcctcacacagagcttggcacacaggccagagcagtgattctcaaccttgactgcattagagtcattatatgcacccactgccaccctctgtcccaagatgctggttgtgcagacattattattttatagttccccaggaaattctaatgtgcaccggggttagatctgcagccctagaggaaaggcactggacaacctagtggtggaggcggcaggggtagatgccatgttattatcctggtcttacagttgaagaaaacacagcttgggtggagcacacgactgcatttgcctaccagctaggaggccaggcagggctggggtggacctgagctct

SEQ ID NO: 1549 - DNA, 4001 bp, Homo sapiens
gagcctctttagcgaccggcactcggctctcctcagtattctgcgtcatgttgggcaaatattgttctaatccgccgcgcgtcctcagccgcctgttttacttgcattcgctacaggagagtgccactgcaaatccccgggtttgcgcgctctcccgcctgcgtggctgccggcgcgcacttgatcacggagccgctctcttcgcctctgtctaattcagggacccggcgccgtctcgctgcccaagggagctcctcccggatcgcaggctgccagcccacccaccccctccctgcctcctctccccttcctcacgcgccagggactcaaacgatcacaggaagagtaatttaaaaaaaaaaagtcgcacatatttctaatgacttctctgtgacaccctaggctacctaccctcagaagccaaatgatccctcagtgacaggttgaggccttccattagtttaaaaagaaaacagaacaaaaacacaggagcgggtctctccgctgtgcgctcccagccttttctccagccaggacccggttcgccgccgcccgtcctatcgggtctccccgggcgggcgctggatgtttaggaaggacgctttacaaaatcagctctttcttctcgtttggacattgccgtgcccctctcgccgtttagaggttctctaaacctcgccgtttagaggttctctcccgggagatttccagagtgcggaagcccgagtaaaaagttttagggggaaaatcattactaattattatttccaattagtttgtttccaggcggaaaagcaggagtgtttgactgtggcttcggaagaaatggatagccgtggtagttgaggcatataaagtatcacccatggtaggtggttcgaaataaaggactggaagaccaatcccgggggtggaaaaaataattcaaaacaagagtagaaagctggcagccagcgagccaggagagccgagaaactgtcagggaagaagtgtctggaaatagtggaaagagctgaaattcaccaggacctgatatttactaggagtccaaatctaccagaatttcagccctgcgggtaaagaccggcagctagcgacctgcgaaacgaaggccgccgggcagtgaaacccacgcagaagcggacaagtatgggtcccagaaactccctgggttccgcgcccggactgggacccagaagagaacgggatccctctgctatcgccggcgccgccaccgtcccctggagaccgcagcctctccaaggaccccgagttccgggcggcggagtcgcggcgaggccagcctgggcgttcttaccttccaaagggaatcccgtgcgggggtagttctgccccggagccggccgcatcattctcggtaccgtgccgggaagggccgccattcttgcgcacgccggggacgaatccaaagtcggcaaaaatcgcttcccgtccgctcccttcacccctgctgcgatctctttctttccgtcttcttcgtcttcttttttttaacctcttctccctcccctccacacacactccctacccccaccccccacccctggctgcagtcaaacgcgtccagaagctggggaggggggtgaggtggggtggaggttggggggagggaaggtggcgacgacgaggaagttcaaacaaacaaacactccaaccccaagtccgcctctgccggctggcctcggccagaagttgtgcgggctgatgcgcctggcagaacccggagaccaggccccgcggcggaggggggccgggggaacgcggccggaatcgaggccgccagcctcagagtggcgagcgccgcgctctcgcgctctggcgctctggcgctcggggccaaagtttccgagcccggagactgcggagtggatttcgttctcgtatttatttatatatttattctctcgctctcgctccctccctcttctccacgccttctttctccggaccacactcgcttctccctccacaccagctttcacagccccgtcccctaggagacccggggacagacggaagaaggagcctcctcgggtttcagggctggacggaggagacagggggtgacggggttggggaaagagaaatggaaaagcgagggggcgcgagtgatcagctgggtaagttgtgcaaaagtgttcaccgaagtacgaggaggaggaggaggaggaggaggaggaggcagtgagcgcgatctgataggttcggacttttcttttattcatgaggagggaagggggccagggcgcaagggagcggaggaccaataacgaaaagaaatcgccaacgaatatttttttccctcttttctaatccccggctcgacctcgttttgggggagaatttgaaccgccgtgaaaagagagggagccgatcccggcgagttgggggctgggggagaaggggagggggccaactttgtcccagtgccttcctttgatgaatgggccggatccgccgagtccccggcccccaggtcgcccacggctgctctcggagtcccggctgtatgggaatgtctgcctcgggtccggcgcctctctggagtctcgccttttctctggcctccgagggccagagtccgccctatttctcatcttctccctcgtcttacaccctctgaaattcctccagtgaggctccccgggaaccggcctagggtgacttgaagggaggaattctgaccttttctgtgtaatgtcagagccccggtgtccggttcttactctaccttcctgccgctctgagaagcccccagtaaccgtatctggttccgaggcttggcaaagtgggtctgccaagtgctaggcacaggtttcttcctccccttccagttccgccccgtgcagacgtctccagccgccgccgtcctcctcaggcccccaggccgggcctataactcctttccagcaggtagttgggtttacagggagttggtgctggtgtgaggatctgggggcccaaagaggtgggaaatgggagggagggagcccgtcaagacttgatacagctctgaactcaccaactctgagctccttgctggtgggtttgaggggacgccccaactgaatgatcaggagtcagggtggggtgatcagaggttcctgaattcttcgctttctgaagccagggtgaccagtagcctcaacctcgggacaccgagtcctgggggcgaaacgccctcccagcggggcaggacgccacaactgcaggccttttgtctcccgggggaaagagcgtctctggccccacgctggaggcaaaatacaataaaatgaacccagccctcaatctcaccccctgcccgccctctctcggcagtggggtcagccttgtcttagcctggggcgctcaccgctggctggccccagggtgtccccatccctccccttcgcctcacctgtgacctttgccccttgcagcatgtgacagatctccctcctctccccactctcctagcacaaggggctcatcagattttgggggggccttctgggaatgggggccctgatgaaaaacttgttgagctcatactctctctaactgagaagacagatgccaagtagctttcgaattggaagggggacaccggggtactttgcctggcccaagttatggggccctcccccgggagagattgggagatcaagctttaagccatagcatgtgtgcccagggaagacagcaacccccttacatcaccagccttgctggggacctggcctgctttgacctccataggtggatatatattctctgtgtgtatatatacatgtatttgtatcatatacacttatgcatacacacgtataacacacacacatatatattaggtatattgcatattcatccattcattcgtcactagctgtcctctgcctggaaggtttcaaggcacttcttccctgtatttgtggaatgggccagtgtgcttgcgtgtgaatataggcctgtgcccgggtctgtgtgtcaaggtgcag

SEQ ID NO: 1550 - DNA, 4001 bp, Homo sapiens
ttgagtttacatgttgcatgtgcttgcagctaaaattgagtataattcataacatctatgtttttaactgcttcctctcattttctcaactcagattcttatttcacgtagacagaaatacacataatgatgtcttctccatataaccaagtcatctgaagtataggagttgcgtatatttgtttacagggttttcaaagagaaaaacgctacttcggagatataacaaagctgggtaattgtacagacatatgtggtcattagatttttaaaattcttccttttgagttcggccttgggcaagctgttagcgggttgtcacttagtctatgttttactttaaaagagaatttactgtaaaatcctgaagtagagaaccatatacctggcagtggattaacttgagaggctacacagtttattatgtttccttaatgaagaccttcatgtcctatagtactgaaatatataaaattcataaatgctttcatttctaagtggtcctgaaagaagcatgggggaaaagagcatgcttgatttttgtccccccacccctttttaaaggaccctacatagctgtctgtgtcacggaaggttagtaaaccggctgaaattaggagacaataaagttaaactaaaaatctgagtctcttaaaactaacaaatatgcctaaaaacaaaatcaccttttcatcaactttttaaaaaaacaaaattaagtgaatgcaaaatattttctggatagctgacaagtactgacaaagaaataccctgcttttttgttgttttgtattttgggtagggggggaagaaaggagaaaagataaaaattaattttggacgggagagtcaagaaagaaaatcaaactcgctgaattaggtaaggagtcaactaaatttgcaaataaagtgttcttgggacattttatttcgtaatgttacagagtcccctcaacaagaaggcatggaatgctgttcaaaacttgacaattctgctttctctgatacttttttaaagcagtaaaaagtgccgagggccgcttttggatcagttggcagtattttcggcatgcctgtgtgtttgtgtggatataaatgaatacccctatattcacacacacacacacaaatatgtacacagccacatctcggcatgggcgattacactttcgataacaacgctccttcaaattttactcctccgccatgtagttgcttgtcaaaatgagaaaagaaataacatttttcaaaaaaagcgctgtggtgattcggttcccattgtttccccctgcaagaggaagaaaaacaaaaaaccccaagaaaggaaaagaaaagcctccatctcacctggcctgcgcctcatccaaactctggtctgtgatggtcataatttgctgtaaaatgtctccaatgtcctgcttcctcccgccctccccctcggtccctccggccccatcctgcaagtgctgggacaggccggggtgtccggccatcccgaccccagcatgggaatgcatcagcctgggctgctcgtccatctccaaaggctacggcagcccccggctcttcctcttctgctcctcggctcggctcctgggaagcaccaaggctttttatccttcaagcttgtcttcaaatccttttcaggataaacagggaagggggaaaaaagaagaccaaaagaaaaaaaaaatccctttgcctctttagaggatggtgggaggatgaggagggggagggggagggggcgtgaaggggttgcggggtgagggtggggataagggctggtggggaagggtgttgactccaaaaagcaagaaaaataaaccaccttcccacttggcgaaaagaaatcagagctggctttaggtttttcagtccggtctcctttgcaaggcagaaatgggctcccggcgcttaaatctgtggcttaatccttttgcaaatatgcattgatcgggagaaaggagaggaaggcagggggattgcaatgcaaactttccccccccaccccccgctgccccccacccccactccgggccagagtgatctcaaagggggtgggctgttgcaaaagccagatctcccccagccgcggcggcaggcaaagcacaggctctctcctcctccgtgtctctgcaaactccagcagccccgtcagcctcctgcttttgtttagctcaggctcaggactccagaaacatatacagaaaaaccacagcctgagaggaggaggaggaggaggagaagaaggaggaggaggacgagaaggaggagaggggagggggcaaagggaaggggagggggcggggaagccgggaggctggggagaggaggagggaggagggcgcctggagctcctccccgcttccctgattggccaccagataaaggaccggccccctcctcccctactttcctcacggcgcctcctctccagcctccttcagctcctcctcgcccggcgccctgtcaatcagagttcagaggtgggccgggaaggaggccgagctaatagcaagtctccagtccttaaaggtgcaatggtactgtagttccagctcacttagtttccactttccctgctcgccttacttaggttgcgtccttgaggaaaatgtggctccacttaaatgcaaacatataaaattaacacgaaagaacacagacggtgtgcgtcttcccgcccacccctgcttttcttttgctgtggcattgtcatttaaaacttgattcttttaaatgcttagacctcagggaaactgctgagagcacaagtttgtcagcacgacgtagttatgaaacacaatcgagctgttaatataattaataaagatctctaataagtggcagatgtaataatagatacatttaaaaaaacaattctagcacagtaaaggtgaaaagaataccaaactgtgtcatttttgctgcatgaaaactaaattatggactatgaaactgaaaaatgctcaagaaaaagaaagattaataaataagttcaccaaatgaaactaattcaacatttctctctcttcccccgggggaaattagttatttggcttaaatacctaataaagaaatgcattatcacagtctagttctagtttttaatatagtctaataagcattattaactgggaagagaagtgaactgacatttattgaatgcctactatgcaccaagtaatttgcatgagttattttatttaatccccaagacatctttgtgagttatggattattatttccattttacagagagggaactcagaaaggttaaataatttgtccaaggtccacagttattaagtgtcaaagctggaatttaaacccaagtgtgactccctccaaaggcctagtatttccactgcacaatctgcttcagtctaacagaaatgtgtgaatagtgttaaaaattagttatgtgtctattgcctgtccagtttgaaaggaaacttgaggtgcttaaaagggtacatattccaacaagacaactccaattgaaaatgggtaggaaaaaataaaaaataaatacaatgggatcaagaaaaaagccaacaaaagtcataactaaggtccagtatcatagctccagacagacacaaatttgcttccaatcttttcattgggcaaagtgagagggaaaaatctgactgtgtacacagtcacaatgaatataagataaaatagcaggccaattacttaggaaatgtccagaatattttgtaatataaaatattctattgtgtagccagccctcttcctggatggcagtatagcaaaggaaatgcaaagcgcagtgtaaccaatctgcaagcgcagtgtaaccaatctgcaaaatggaaagcagccttgccaggtgcttcgagatcctcaaataaaatgttattcttctcaccaatcattacgcaaaacaagtttggcaagataaggagcactgatgcaagcatttcaaagcagtttttagcaagctacttggcacttattggtatgagggc

SEQ ID NO: 1551 - DNA, 4001 bp, Homo sapiens
aagcccagcaaggttgacagactcaacttgccaataagaagacttgttaataagaagagcagggaaacaacacagccctcccttcacaacaccaggtacctacacaatcactaccttctcccccaggacctggaagggaagactcaatggcctccttcagccctaagtgtcccaccacttgcccagcataagtccttggtatggtctagttcagtggttctcaatcttggctgcacattggaatcacctaagattttgattcaattgagttggggggtaggcccggctgtgggtcttttaaaaaaccactcaaatgattctcatgcgcagccagggttaagagccactggcatagcttagatccacctggatgcaccttttataagtctcctcatcactctcagtcttcatcctaaattctgtttaccttcttagtaatcgccagagtttggtcttagggaacttgaaggtgactgggaaaatggatttatggcaactatcatgtatatatacatcactttatagcttgcaaaaaatagacaaaaatcagggctatggtcctgcacccggttaatctgctctgacttgacagggataggggagggaatcactccagtttccaaagcctgactgacacaaagcagggtaagaagagagggatccgccccttcatccaaggctaaaacagttccctcaggcagctcctgttgggaccaggcataaaggtggaaggatagatgagctgacctctcaagagtactggattgtgatccctcagaacaggataaatgactgcttcccgagcactttataagaaaactcaggaaaagggaagtgaggctgggagagtatggcagttctacctttgaaaccaaccacattatccccttctgtttgagctgttttcaagtcctgcgtggtgccctaagtaacctcctgtggctcctgccagtcaagatccaagtcctggataggtctttcccaatgcccatcctcccagacacatgcacccattccacacggagacaggagaatggctgcaatgacctccctgtaccaaatccaacaggacaccctggcatgcatctgtaagtatccatagagccatggctgttcagccttccgcttgtggctccacccccgcccttgttatcatctccccatccccagttgctgactgttaacaggtggtggcaggaaggaagtggcagcagcttgggctgaagtccctgtttatccctagctgtgtgtgcagcctgctcaggtcctctagaaccaggcaccatggcaaccacagtgatgtcagacccactgtctccatggaaaccagcaaaggtatttgggtcaacaaaacaaatacttatgagacccaaataggagacactctgaaactcctatactctgggttccaaaccctgatacctctttcttggttaggttaacccagggttcaaaaaaacacctcttctcccaagccagcatctcactgccttattaggaagttccttctgctgtctaatctccacccttccctgctgtgtttccagatctttttcttttcatcgaccttctggaagaaaacccacctccactccctccctccacccccttcttttcattcaggcaggattcaacaaacacctcctgtaaggattatgacagagacttctgctatttctaaaaaacagctaaagggggagctctcccactcagcataaagctaggaagtctcgcctctagttaatttaaactcctctaacagttgctcctccaaaccgctaaagcaaaggatctagggccacttgcctggggtacccagagcaagttcctgttgtgttagcgtcggcacctggccttcctcccccagcccagaaatgaaaagcagctcattccttctagattagttccgccttcccttttccttattccacccccttcaaagcgaatctgtggaccccttcccagctaaggcattacctgaaccagctcttgcttcggtcttcagcttaacttgttgcaggcttccctttgtttgcagcccgagaagaaaatcatgtgaccagaaactgaccaatgaaaagtcaacttccccaagggggcggaaacttttggccaataagagcaggaattgagagccaggggaggggaagggaggtctagcgacacggccctaaacctgggcttacctcctggtgggcgaccggggtcccagctaaccgaatcctgagtttcctgcccttctttcccagtgtctaaacagtttctagagggaacccccacaaactgagagaaaagcagacggtgccgtcttctgagatgacgaagacaaggggccaggttggccccaggatagacagagacagctgtgagatgggggaagggagagggacaggtcgcaaatccagggtgtggaaatagccctcctgccattctccccaatctgctccaaaacagactgcttaaaagatgccattgctactttaaaaaacggttgggggacgggaacgatctgaaaaacatcccaaaatgaaatttgctaggacagaagcagcccctcccctcacccttagagcgacacttgctccctaacccaaacaactgggaggtgggtggggtgctaaacccagaagagctcaagcacttgtcttccagaggctgtggtgccaaatccgcctggctccaggcctggcccaggaatatgctcaaaaaggaaactcagtttctcacagtggagacacagggggatgggcggggaaacacaggcctcccttggctcagcagcttataccagggtcagctcaggggccaaatctgccattcccactcccagggaccctggggagcatacatatcctcaacccctaagcaccctacccagcagtgacagcggctcattccagccttttcacacagcaacagcaaggagtccttgtctgggattttaaaatcattttattaatccaacagtacaaaagacccccaccaccaccgcattctgccatcactttgttccaaaaagtagtggagtgagagagcgagagggagcagatccagcaaaaacactcccccaggggccattttacaaaatgcggagcaggggaagacaacacaaaaacagcaacagataaatggggcaaacagaacaacaaacacaagagttgagcagcggggtgggggtggggggttgccatctacgccgttttagtgtgagggacactgggaacgatgcccagaggctgctctcctcccagcctcaaaggttgtcagctccaccagagcagggtcttctctcctcatgccaggaactgagagaagtgggggtaggggaccactaggtctttgccactgtatcttgagctgggggactcctaacttctccgagggccacaccccatgcctgccttccccaccccatggaggaatgtgtgcatgaacagaaaaggagaacgagcagcgctaaggtcctcatcaggccccaggcccatctctggcaggcagtgcttaaaaaataaaaaaagacaaataaagcccagtgcaggcctttggctgagaggaatgagaattgctaattaatcaccaggcccaagaggatatgaaagaatagcaaagagaagcaacaaactccaggctcttctacctttgagtaccatggcaatgaggatcccgccgcatcccctacccacaggctgtgacagggcctcacttggatccttttatcatggaggaaatgaggtatagggctctgcgccttttcaagctttccttcaatcaagccaggaaggcaggggaataagggcgccgaaagttgaagaacacacggagtataatgtgcaacagatgggctgggggaggagggtaccaccaaagtccagactttcaggacagcccaaacttcaaatattctggtctgtcagataacatatcccaatttttggcaaaaatatggtcattaggagaaaagcacgagagaggctgagaaaggaccagtgactttggtatga

SEQ ID NO: 1552 - DNA, 4001 bp, Homo sapiens
gaagtactttcatctattaattcactcagttctcatattcaccctataagggaggtactgtaattatccctgctttacaaacaaggaaggtgaagcttgctcaagctcatattaggtctagtgagcagcagaaccaggatttcaccctggtgagggctgtgctcctcatgactttgctatgctgtccctctaggaaaagagaaaccactggggcccataggctaaggaaaaatgggttaagaaaaatggtgcggagaatcagaaagaagaaataaacttgcatttattgcagggtttccaagcagtttctgtatttaatgctttttatatataattttggttaatttttctgtgaagtggtgattgtgatgatcacatccgttttaatgatatgaatgctaagttttagaaaagttcagtatcagaccaaacagctaataagtagcagaacagaattgtaaacccaaggcctgagtccaatctcaggtcaagacagacctgtggctttatatgtactatctcatttaatccctaaaacaatctgtaaatctggtactattactttttctcattttacagataagaaaatgaaaaatgagatatggtaaataacctccccaaggtcacagaactggtaaccagtagacccaaaatttaacctaggcatcatgacttcacacccagagttctgaccctttggatacactgccggaaaaagagtaaagagaaacccaatcacaaatgtcaaactcggaatccatcagtcatgcaaactcattgacgatttttgctgtaaaaaaaatgatcaaataatgtgttaggaataaagtcctccaaccgacataccaaaattagattcttggcacgtaaagtttaataagacatggaacaccttacctgtacagcttttcaaagcaggtaaaccattgttttaattacgtataatttacctaagaaggccatctatgtagttcttcagcaagcactcacttaccataaccccactaaaatgtcaagccccatctaaatgttgtaatactttgtttagcataaagtacattagatttatccattattatatcttcctacagatttctatacatagtggtgtagaaattacaatgtgagtaactgataactgaactgccttctcaaagcaaaacaagaaagaaggtgaggggggaaaaaggggacaataactgaaatgagtctgctttttacatttcgtttttcctcttggctacaatctacagcatttcacaccaaacattatcccaagctacccagctctaaggcctagagttacccacctacaaaacaggctgcacgctccctgccacaagcagagtgactcatcctaacatccggcatcaattcttaatgagtccccgagcccccgcagtcctgtctacttcttttcttttccagtgaatcctcacagtcccctttccctgcatgttctctgtcccaaatttctgaagcccctccctttccgtctcttaagaatctctacgaacccgaaagcccgtgaggctgatggcacgtctgtggttcctttctccttcttccctccatacccacagctccccgggaccggaccctccccactcaccaggtgcagggccaggggcagcagcaggaggaacagccacaggtagaggtggcagctgttggtgaacttgctctgctccgggtcgtggtaccagcccccggtgagcgcggcccacacgccctgccggagcagctgcagcacctgggacaccatgccggctgcgccccggggctggtgagcgccccgctgcaccctgcgcgccccggccggatctccaggctccctcaggtctaacacccgggcccgcgggccgcgcccccgccgtcgccgccgccgtcgcccccgccgcctccttccaccccacgtttgaagctggagctgctcttccgcccggacccgcgaaccgcggcgccggagccggctgctgcggccgggcaggtgagcgccatgtccgagggaggaaggattttcccatcgtgctcagaggcggctgctcagaggttgcttccgaggctcctcccaacgcccgcccagtccctccttagccttcgctgggggccagaaggatttctgtgagtgcctccagccttttctttctctctttctctttttctctctttctttctctctctctttttccttcctcctccctccctctctctctctttcttccttccttccttcctttctctctctctctctctttctttctcgctctttttttctttctttctttcttttttttttttgcctctcccctcttcccttccccttctctctgatcctcctgttaggggacgtgcaagggtgttctcatgcagaaggcacagacccaggacacgttccttgtccttgtccttttttgcacccaagtatttacctcatacaaggtcctgtcacacagcactcaaagtaatttcttctcctgagcacttcctgcacgacttcattctccttaattaagggctgaccccagacgttctattaatctaagctctacctggtcctctgccactgatcttctgtcctccctgactgtttctcctccactccctgttgtccaacttggtggagaaagaagataaccaccttcctgataaaattttaggagcttcagttagccttagttttttatctctttcctagaacataatcccaggtatttaactggctatatagaacattagtctaaatctctctatgctgtttagacaggaagacccactggacaaaaaattaataatctttaagctattatatattttatcatttacagtggatacagtttagattctcttttgagagtgggttttggaaagggaagagataaaaaggagcttgtcttcctttgggatgaggagcagaagccctgtgtgagctagagccttagggagagacaaagattagagggctccatgattcccaacacgccttccctgcatcatccttacctggtctgtcccaacacatcacactcctctgacttgtgtgcctgcctgtgtcctggccatgttctggtctgcagcagcacttacttatggctgccctagtcaggcccagtaaaggcacaccagccttcccaggctgaaacgaagataaggacaggcccatcatgaggagagggcccaggacatgaaaggccactgagttacagcaaaagcctcactatggtgtgtctgccatcagctataaccactcttccttctactttacattcatcagtaggaatgaatcatcaaaatggaatatggctgctttctgtactggaagagtaattttcttaaagacacagcttgtaaacaaatgggcttttttgtatatctgctcaaaatgcttgtaacctaccaggtgctgtataagtgtttaatgggttaatcaaccaatcaactccacattaaaggagcgccgtcacgtgcatgggtataggaggaaaggtcatgcaacagtctgttcccacatggaggttgtgtccttgttcacttgtcctgattcatcaaatatttactcaacaccttctgggtgtcaagcattttgcagaagactaagaaagcaaatgtaagtcaaatatagtccctaccatgaaggagttaataaaccacaagaggaggcaggaaaatcaaagacttgcaataaaatgtgctgcctgttatcatattgtagaaatggacacatatccagatatatggaagcactggggcactgtggagtgcagaagacatgtgtaagtctgtgagggaggggtggtgtcaataagcaccagggaactgggtcttaaagctaaatattagctctcaaggcatgtaagtgggaatagttctccaggcacatgtatatgtggaaagaggagcatggcaatttggggaaaatgtcaggatagtctaacatgtctggaaggtagggctgggaatgggagaaacggaacagtaggaaacttaatgagataagcaaa

SEQ ID NO: 1553 - DNA, 4001 bp, Homo sapiens
tcaggagggagcggacttggctttctcctcaaacaccgaattgtttcctttgctacaaaacaggcttctcattccaccaaataccactctaaatgccagcccctgtagtgtgtcctacaaaggggctgtgcacttaccccagaaaacacaggctaactgcaaatcctcacgttggcatagccttcagatcacaaactcccaggggatggcttggattacaactttcagatttagaaatgctcggggtgggaggagtagtatgaaccctagacctcagtgaaaaggggcaaagaaaacctctcttcccacattagaggtgaaagaggaggttgatgcgtttttttcttttctttctgaaagattgccatcatcagagtcacaaccagctgagggactggaaaccactttggttcatctgcagcccccagactagccgaattttccaggataaaattagtgaacacggcaaccaagacaacacagcagttggcactaattagctccctgggtgacaacttttggtaggagtcatagagatcttcatttttagtatctaaactggaacccaggctccagggtcctattccttcagtaatctaatgtctttgggaattcttctgttaaatttctgtaatactctaatgggagaggaagaaaaaagaaacagaaagataatagctaatatagattgagtgccaggtcctgtttcaagtatttggcatatattatctcatttaattattacaacaaccagtattatccccattttacagacaaaaaatgaaacaaaggttttgtactttgcctaaggctacatcacaggtaagtagctggcctacatacatatctgacatatagcagaggagttggatttaacacaacgatgtgggtactaggaaagaggttgcagagggcaagcttgtgatgccactaaccagactgacttcacttggaaaggctgatccttgtttctggagatgagactgtgcctacaaatagacaataggagacgtctttccaaagtctctgctttgaccccccactcccccaccccatgaacagtgttctttgaaaacagtaaatcagttaatggcctgggtctggccacggtgaacaccacagagcctgccggaagacctagtttgtaacaagcactgcagagggaggtctattcttgaaggggaaatctccccagcaactggcaggggcttctaaataccggaacacgtccctccaacgttcctgactgaatgagtggagggcaggatgccacctttctaaaaggggcacagtggccctccccgggggccagggatggagttcttgttagatgctacagaaggaatgtgagtgccttacatccctaggagagagaggacagaagcgaagtgaggggggtaaggggagccagaataatctcgggcagtaagacagatgcagggggcagtatccagaggggatgacctaccacctgagagctcagcatccccgcttccggactctacagccgattccaattacccccaaaagcgccgtccacagtagggagactgaaagcaccccgtcttccaatcgtttcccagcgccccgaggtgggagctttcctaggagggcagtggggcgcccctggagggttcttcgcggctccggtctgcctcgctctccctcgcctccctgggatcccgagccgcagcaccctccccgccgcagccctgccgacagcgccgggggccgcaccgctcacctcgctcatctccgcagccggacagggcgcgcgaggcgctgcacgcacaggtgaggcgagtggccctcggggctccgcgggcgacagctgaaagttgccgggctctgcggcaggggttacagctgaccaggagaggagagttagtgcggagagccgctgctctggtgctggcacccgggattctcggagcccagctccggccaggcgaccccctgcgacccgtcctgtcagagccgctcagctcgccgcctccggccccaccttttatactcagctcggtacccgcctccagcccgaccaatagaagctcctcctaccgtagaatgacagcctcttgcatccaatgctggcaggtttagaggtctgctgcatttccaaactagggtaagacagagagcgggaaggagggggagaccatcgggggatgcggggacggaaaatgaagtagggggagcaaagaaagagagggagaaaggagatgtacacgaagaaggcaaggtggggagtggaatggaaggagtgtgtgagtctgagaaagagaaggcctggaaagaaatcaagagggtacacggaaaacaggaaacagtgaatgaaaggggtaaagccaagagatgttgcagattaagatttcctagtagaatagcaccctggaggtcgggcgcggtggctcaagcctgtaattccagcactttgggaggccgaggcgggcagatcacaaggtcaggagatcgagaccatcctggctaacacggtgaaacccagtctctactaaaaatacaaaaaattagccaagcgtggtggcaggcgactgtaatcccagctactcgggagattgaggcaggagaatggcgtgaacccgggaggtggagcttgcagtgagccgagatcgcgccactgcactccagcctgggtgacagagaaagactccgtctcaaaaaaaaaaaaaaaaaaaagaacagaaccctggaccagagaatagcacaagagagggaggaaggctgggggaagagagagagagacagaatgagagagagactggagcaaatggacagctttctttggcaaagaacagggaaattgtgaagtgcctgtttgatgtggaagatcatagatctcaggagttggaagacattttaggattcatcaaatcctactgtgtctggagttggttccttctggtgggttcttggtctcgctgacttccagaatgaagctgggaatttttgcagtgagtgttacagctcttaaaggtggcacggacacaaagagtgagtcagtgagcgagtgagcagcagcaagatgtattgtgaagagcgaaagaacaaagcttccacagcatggaaggggacccgagcacgttgctgctgctggctggggtggccagcttttatttcctggggtcaccgcccatgtcctgctgtttggtccattttacagagtgctgattggttcattttacaaacctctagctagctacagagtgctgattggtgcgttttacaatcctagctacagagtgctaattggcacattttacaatcctcttgtaagacagaaaagttctccaagtccccacctgacccagaagtccagctggcttcacctctcaatctcccctctaaacaggacaccccagctgctgttggaaattgggcgatgaccactctagctacttcctgctggatgggggcgaaggggccctgcagtggtagtatcctccagagggaaactctctaggccagccaaagggtcagtgggttggtccaggggtcctcggtagaagttgttagttgagctcgtttggggttccatttgtaagaccatctgtagcttgatggcattgatcctggaggaaacaaatttgacaaagaggttaaaaatacaaggcccaaaggcgagtaatagcaagatggctgtcacaggacctagaaaggggagaagccatgtcgcctaactctgaaggttggtctaagggtttgaaaggctttgtctgatttcagaagcctcttcccataaacaccgggcggagtctcgtactatccctgactggttagtgtaaaagcaacattcttcccctaagaaggtgaaagtcctcctttctcagcagtgaggaggtctaggcctcagcggttttggagagtcactgctgccaaagagtctatttgggattgtagagtaaggatagattttgttacttcttgtaaactgtctgagaaatccttcaagtgtgtgtggtagcaggataatgaagtagata

SEQ ID NO: 1554 - DNA, 4001 bp, Homo sapiens
ctcaggatggggtactcactatttccagaacagttgttttggagcagtggtaacttgaaatgccctttcttatcctggccacaaccccacaacatccctcgagaaagtcaaaggctcagggaacaaggaagagggctatactgagctgagtaaggacttgccatcctgccacccagcacactcagacagaagcgtgggcaggcagctgtgagtggcagaattttcccctctgccccaggagctgtggtttggagcaaagacaatgtcaccaacaggtcacactgcagacagggacaaaactgcaagtgatccccccggggcttgcattgtaagttcactcatggtcaacagaactttcccttcatctccccatctgctgccactgagccgtagggacgattgtcacctcccttttaaagattaggcaatggaggctcaaggataagtgacttgtcaagcaccacagctagtgagaggaagccaagattcaaccccacatctgactccaagctgggggacacagaacctcagccaagtcctgggctggtaatacttagaaaaagctagtggtctcgccccgggaagaagcttcccacagcctgagggccagaagctggcagagttgttgagcaaactcgccccgcacacggtcggcagacagccaggtgggctgaggcgccgggctcagctccggggtcccagtaccaggcgcaccacctccggctccagagcaccaagggcccttccctgcctgagtcctaaaggacgccaatgggcctcgagaatacctccgccccttctcccctgccccttcagctggttcttttcttcggctgaaacagatggaatactagagcatgagttctgtgtcataaagaaattgcctcgtgctcccagcatctgccgtccttcccaccccgcccctgtctcgggtagggccttctctccaggccctccaccctccgctgcccatgttttccaaaccaaatcggaacccactataatggcaagcccgctttctctgtgcctggtgcagttcccagtacgttccaggcattcactccttcacccacctgtgccgcggcgaggcagaaactgggaaatctgggcaggatatcctggcagtgctctgctcgcccttcctcggcctccgggtctcccaaccccgcgaaccttcccactgaatagcgcagccgcacgccccagcaagtccccaaagagccggccgtccccgctctccaccgtgctccccactacccgtcctcccccgccgccttgcctgcagtccccaagatcgtgccaagcgaagagccctcggcgacctgcactccacttcctctcttacatggggggaaactgaggcccgagaggaaacagcaccgcaccgtcccggctgcgggttcgccccggcctcccatccctacacccgcaccttggcgcagcggtggaaggtggctgtggttccgtgctcgggtgcttcggccaggccgtcctcctcggaacgcaaggctagcaccagctcctcgtagtcgccgtcctcgtcctcctgcgcacgggcgcccgcgggacccaggagcagcagcagcagcagcagcagtggcagcggccaccaggaccgcctggagctgacggtgcccatgagggccaggggagaggttgctgtcctggcgaggagacctagaggccgtgcgcggtccacgccggcggcgccttgagccttgcggtggggaggactgtgcaggagctgaagttcaggagcagggcgcgtgaaggggcgcgcggaatcctggctgggagctgggagccgctgctgcaacgacgcgtcccggcccgcccgagccagtctcactgcctggctcactcctccaggctcagaccctgaactgaacggcggcgcccgcctgcaaccatgagcgcctcgacgtcgctgcggaaaccttctagggtgtgggtgcttgacgcctggggcgcgcagatcacgccaccagagccccatcggacgatcctatctgattaaacattaacggaacccccggactggaggatcaggtttcggcctcgccctccccaaacagcgtcagattacgcgcagagggaagaaaaaactcccaaatcctaactgggctggaaggcaggccggcgccctaggggctcctcctctcccgcctctcaccctgcgtgggatgccagactccaagttctgccgggcccaccttttcagtgtttcctgggtccaccttgtctcctgctgaccagtgagacttctgaatcaatcctactgtggactcctcgctgcccaccgaattctttccactggccttaacctggcagccttctaaacttagcctggaccccctccggcctctgccctttatgcaccctgcacactgaccttaccaactagctgctccttgaagagattgcttgcttttgatgtccagcctacatgcatttcaagggatttatactacaaagattcaggttttaagtttgcaaagacgtcatataggtacattcagaattctatggtaggcacaagctcagctttccagaagattcaatttgcaaagattccttttacacaccatgttcaagaaatcaactggacaagcatccagtaaacacctattgtgtaccaggcaggaggatgaaaaggggaaagagagctcctggcctcagattgtacatgtggcatgacatgaggcttgctctttctggaagggctgtcgatactgggaagaaacaaaggcgaatttatgatcctcccttgcagatgcacagcagattccgagtgaaatggcctgctctgaatctaggtgctggagtccaaagttgatgctctttccactttgtttgcaaagacctcactccagagagccagtgcacaaagacagtgcaaccagtgggttgacagtgactccatgaggtaaggtcagagttatccccatcgagcccgccatcgcagcacagagtaggagctcatggtttgctgacagaggtggcagaggtggttctccttcctgttgcctgtaattggaattgtatttgcaatgtgcttttggcagcttcctcatcaaaggcctcccctggagcaagaatagatgggagctaactttccctgctgctcccctttgggaccttggcctctcacctaccggggtcgttaccgtgcacccagagaatgatgaagcctgtgcacagagggacatggatgtccccaggcccaggaagggggctgctgtccagcatgcagtgggtgtgttctgagggaggtgggggaggaaggaagcaccctgggctctgcgacagatggaaccagaggggcagtcacttctcatcccatatcctccactgcactcttatgaggggcagccccagctgggcctcctgccacttggcagggctttcatccctcaccaattacccctcccataagttgcccaaaggaattgtgtcaccttctccctcttctcaaatgggttcccccacaccctggccagcaaataagcagccagctcccctgagaggtaccagcaatcagggtaagtcagaagcctcttctggggcctcccctccaccacaagtgctttctgggtcaacacccatccttttcccctcctgccttcctccttcagggcagaggggaccatcctcttatactcagctgacactcccctgccccaatctggcctccgcagggatcacctacctccactatctcctctcctcctcttatccctaaatgcctcttcctgagttattctttcccttcaccccacaagcatcctcaaggcttcctccctctaaaaatgccacttttactgtccctcaaaatgcttttctagccattgccttcccctcatagactgaatgagtagatagaactcacttttatgctccctggctaccttctccaacctcagaaacttggagtctgcagccaccattgctgtgagtgtacatttcaacattttgaacgggcatactcttttttgcaaggg

SEQ ID NO: 1555 - DNA, 4001 bp, Homo sapiens
actgccctgctcataaaaatatgctcccacattaatcttgttaaatgggttttggtaaaggatatttcggaaacatttgtactaatgaaaatataaattatgcactttgaactactggcaaaaggttggggttaatatatttaaaaattagagtcctgataggatactagaattttggaaaaaatagcacttttattacctaagaaaaaaacttcagcaacaaactaaaattggcattacagtattaataaaggaaactgggaatgttggggaaacaaaataacaatagtatataaaaaacaactggtgagcagggggcctgacctcaacaaaactaaaatggctttaggaaaattattacgagaacatcccattcttctaagattctaggcatattttgcaaacatagaaagaataggattggcagattatttttttttttgagatggagccttgctctgttgcccaggctgaagtgtaggggcgtgattttggctcaccgcaacctccacttcctgggttcaagtgattctcctgcctcagtctcccgagtagctgggactacaggcgcataccaccacgcctggctgatttttgtatttttagtagagatgggatttcactatgttggccaggctggtcttgaactgctgacctcaagtaatctgcccacctcagcctcccagagtgctgggattacaagtgtgagccactgtgcccggccagattggcagatttaagtaaaactaattaaatgaaggatgattcaactggaattctgatattcagttgacctgatgactaacaacgttattcatttaagaaagtcttaaattctttaaaacaaggaatattaaactgactatccttcactaaagcttagctatatctacacctttaatgtccatattctatatcatattctatatgtggatgtattccttctttctcctctatattgcctaataatttttgttttatatatgatatatatttaatataaatttgttatgaatgtgtttatattatatgcaggcaatcaaagctttttgttttcacatacagtgttcatatcaatattttagatatgttttatgcatatgcaaaatatacatgtgtgtatgtttgtttaaaaaagagaatccattttgttcgtgttttctacagatggtggtgtattatctgcatttttccttaccttgttttttctgtttcatactatatcttggagattttttcagtatacacacatgaaaaggttcttccttatttagaaaattgaggcatggtgttccattgtgtagatatacataattgacttaaactgtttaatcgtgatctacattgttgtttccagttttttctatgacatatgatgctgagtgaagaatcttgtgcatacatttttaacactctgtgcaggtatagttatggttatataagtaaaattccctggtcaaagggcatatacattactaattttgatattgctaggttgcctgtacagagattgtaccaatttacactgctatcagcaatgtatgagggtgccaaaaatgtgttattaaacttacttgctttcactatagttttctgtgttacttttttctgtttctttttttccccatgaatagtctgtcctatcttttgctcattgttctatttggtaattagtttcttttcttatcgatttgtagaagctcttaatatatattaggaaactgacactgtcaactgagttgcaaatgtttttccccaatttgttaaatgctttttgacttttgttcctggtgacctttaccagacagcagatatttccttcctttttttccctgtctcctactttccctccatcccttcatccatccatccttccttcctttttataaatgaatttaccaaccttttcttcaatggtctttttgttgttgtttttgtttttgtcataattaggaaggtattcctcacattgctattataaaataaatctccacacattttggctggtactcttgtgaattctttcaaacttctggctaaatttaatggctcaatccaaattaaaagagagaggaaattaccattcaaataagatttagtagagttaaatgtgaatttttaaatttaagttttaagctcttaggagtggcatatagatagccaaacataatttaacagattaagaaaacagactctggatgaaatgaagtgttaagttttctggaggaatactgaaatttatttattcaaaaaaataaagggaatatcttatcattccctttattagatgaaaaaaatgaaattaaaggccatttattaaccttttggtctaatcttgtttacaatgaaagttcatactgagggtggggtacaatcaggagagaggaaagtggcttaattatagtgtagataagaggtcttgtgatagctgggcagcaagaaattaccagtaattggtgtttttgtttttttactctttgacatctaaataaaactgttaggaattatttgatttcaaaaattaatttgcccgctcaaatattttttagattagcataacaatttatataaagatattacttaaagtacatactgaatagtgtcaataagaacattagatattgccatatttaattttaatttaataattattttttcttctagctttgcttgcctgtatgtgtggcctgtccttcaaagtcttcctccaaactttggcttttggcttcttccattttagggactggatttgatataatctataggaggaacaaagaaataataatgacacaagaattccaggatgtacatacatatatatagagataaatatataggtacatgcatatttatagtctcctgctgccagattccataagtaggctaaggataatcactcagtggtaaagtaagtggtaaagtatttagaatgtttctgtccgcaatgtaaaaggacattaatttaacatgtgttattaaagatgtctggacttaaggattttatataattcatcatttgtcttttcttaactcaagccttccagttaagtctatgtggttagtgaacattatttattactgattttcctaatttcctaatattatgtgaaatttgaatatatgacgtaatatatgttacttatttcatataataaaaattaaattaataattatatacttgctatgaacactatgtgtcaggcattgtttaaattattttatgtgtcaaaactcatttaattctcacatagctatatgtggtaggaacaattgttaatgacatgttgtaaccgaggaagctgaagggcagagagtttaagttacttgcccaagatcatacaataagtggtggagcaaagatttgaacctacattttctgactttggagccaactcttaatcattacactattatggaaattaacattctataatagagtcatttttctcagtatgatttggcaaatcaaatctttgaattggcattaaaaaatgatggtctaaggaacactattcaatagcatctctccataccatgggacaagttttcatgacaacagtagccaccaagcaaatggaaatagccagtaggtaagcctatagtatttttttttttaagttttttgagagagggtctaactctgtctcccaggcttcattaagtgcgatggtgctgttttatttagctcactgcagcctcaaacttctgggctcaagtgaccttaccacgtcagtctcctgagcggcggggactacaggtgtgtgtttgcgccaccacgccctgctaatgtttttttttattttttggtatgttgcccaggctagtgttgaacttctggcctcaagtgatcctcccatcttggcctctcaaaatgctgggattataggattcagccaccacaccctgccggtttatagtatttttgacaggctaaaatagaaaatcactaaaagcacttggatttttattcatacgaaactccttggtgcccgcatgtagaa

SEQ ID NO: 1556 - DNA, 4001 bp, Homo sapiens
ccgacatctcgccactgcactccagcctgggggacagaatgagactccaactcaaaaaaagaaaaaaagaaaaagaaagcctggggatatttaccaggacccttcctccttttcaggccctagattctaagatcctgctttgcagatctgaagtgggacccaggaatctttaacaagctctaagcctgccgagtgcctgcgattgcaggcacgcgccgccacgcctgactggttttggtggagacggggtttcgctgtgttggccgggtctccagcccctaaccgcgagtgatccgccagccttggcctcccgaggtgccgggattgcagacatacagatattcttttacttgttctggagaaaatagaattttagaaattcataacagccatcttttttaaagtatctgtttatcttgtaaatatacatattcctgtacatattgtttgaattccattacagacattattatgaatggttcatatatattttgataatgacttatataatatcaaatccacttataaacatagtatttgggcagaaattgtcatgatgaattagatgatctctaaagttttttctagctttaatatgaggtgattctaagtagcaggtacaatggacaatatgtgtgtgtgtgtatatatatatatatatatatatatatatttaaaatggactctatagttagaagctatttttgcagttaataaaaatactccattgcaaatcaattactgcactcattttcatgatgcaaactgtaaggtttattagtaataataataacctccatggaaacaaaatagaaaaaaaaaaaccaattgaaagaaaattttcactgaatttaagaaatatcaacaaactctgtgttcttttcttttaaaaacattatttctgtttcattaaatttctaaagtaacctttcaaaacaaacattatttctactttaaaaattaaaaaccaccaacaaaccaccgccacaacaacatactactaaggaaaagcctcaaaacatgccttagcgccggatgaatacagcagtcctcacttatctgaggtttttctttctgtgattacagttacccttggtcaaccttggtccaaaaatattagatgaaaaattccagagataaacaatttgcaagttttagatttgcagtgtactgagtagcttgatgaaatctcacactatcctgctctctctggcctggaacatgaaacatctctttgtataccatatccacaccatatgcattactgtcttggttatcagattgactattgcagtgcttgtgttcaagtaacccttatttacttaataaggtcccaaagcgcaagtgttgtgatggtagcatattgttataaaggttctattttattattagtgattatggttaacctctgactgtgtctaatttataaattaaactttatcacaggtatgtatgttcaggaaaacaacatagtatacacacaaggttcagttttatctatggttttaggcatccagtgggggtcctggaacatatcccccttggataaggggcaactaccgcactccttttccaacttgggagccagatcttcaaacataaagtgcaaggactcatcatttattctctttagttctcccttcactcaaaggaaatttaaaattgcaaaatgagttctccattcatggtcttattttaacagtctagaatatcaggctcaaaattgcgtgtttactctgaatctgtattagtgaagatgactggtggaaatcactgaaagagagaaggatacgctgtatttaattgtctttatagtagataattcaaaaccttatgtactttgaactattttacattaacacaataatacataaacagtgaatcaccattctttcccctaaggtaaaatttttaaaattatattatcaaaaggactacttgtggactcacagtttggatctctgtgcctggtgtccttgttgagtgggtgagaatccctgtctactgaactcgtcttgaacttcaataggtttaagctcagatttaaaatctccagatattgatgacccttgcagaaatagctctgaacaagtaataggattgacagaattagcaaggccagttcattaataataaggcaaaaccaaacaaagagtagtcagtttatattttacagaacacattgaatagatgagagacagaggtcattattagtactatttatcgcaataacatgagttgtattcattagtcccataatcatctactgagcacctactttgtgtgaaacaagcagtagctaggcactagggtacaaagacaaataaaccctatttcctatatcgtgaggcttgcagtctagtgggggagacaggtaagtaaaaagataatcacaatgaagtgctatgattactacaacattgggaggaataagagagatactatgattttcatcttctcttactacaggcttttaatacaattttttcagatgggctgtctttacagatctacttgctttctggattctagttttattggcattttctccttttcacttctccttattgtttctggtttttaccattaaaaattcctttcctgctgttttttaatggagttttgagatgtaggggaagtagatgcatgtgtttaatcttccatcttttcctaacatctttcatcctcacagccaaattctcatctaactttgccaaagtaggagatttaatttactctaagcttaaaactggaaatttttaattagcaagaggacaaaatttttaatattaatggcaattaaaatgaacacatttagatttttaaattataaggtttagtcatatgtagcttcacccagaaactttaagtggatcttaatgcaatttaaacagtgatagtgtctaaataaattttaatagttatgttttattatactaaattaatttgtcatttatttactctttgttagtaagagggaaacctgtcacatttcagaactttgtttgcttatatattttttattgtagaatttgatttcaagaatagagaagagtacataaaatttacaatatttaagagagtcacaaccataaatattttcaaagagattcttccagaaatcaaagtattttctaaattaactttcattttcatccttaaatcaaatttttacctcccatttagcaggtttcatgttccagtttgtgtgctatacatatgcttttcaacagagtttctcagggcaattcactttcagtttttatgaactgagtgttttctctctagctaaagaatctagaatgtagtcaggtgcaatacaaatgtaacttaaaagatgccttctgatggcaaatgtgaagaaatttaatatttcagtttgatgataaaaaatgtcatagtggttttaacattcaaaaaatatgttttaagttactgtcaaatatagcttggtactcatatgttcaaatatgtaatataggcacaagcatagagacttaacggtaaaaaaaaaattactatagcaattcctatcctacccccaccttcccaacacagatatttccataatttgctttttattttgtgctatctctggcacctgttcactggagggatttggggtcattacggacatcacacacttgcctacaatttggacaagcatatctgatctaattgcttcaattatgaattgagtaatttttgtagatcatgaaaacttgtcaagagtcaaagcccaaaaggtcattatttcacacatatgattcttgattgatgtaaaaacatttaaaagtattagaattatatgttgatatagtgtttagatttttatatatgattttacatccaattttaagaatactaaatactttacaaggcacaaacattataaaccagctgaaaataatcttagaaaacagaaataaaaatattaataattaggacactttctgagtgctcatcatgccaggtcaggtactaattgtttacttcgcata

SEQ ID NO: 1557 - DNA, 4001 bp, Homo sapiens
aaagtgcctttaagactgaattcaaaaatcccaaataatcaaataacacgcatgacaatagttgaggaccattcatgcaatctttttggtcagcaaatcatgtgttaaataccagtaatgtaacaacagagaataatagataaagcatcagattgggaagagaacgaggctgcttgcagaagatgaaatccttcagataatattaaaattctcccccttaccatccatttttctttaataaataacttagcaaagcaatagtcaaattatttccaaagcttattctcaaggaccaaatcactatagaattattcctcaaccatatcccctacaaaacatcatagaggaaaccttttgctcaaagctcagttattggaggaagtgaaaggctaccatgtcagagaagctaatggagctgcctctagggcttgggtgattggatttccctcattacttcagaggtcttagcaaagatggaagtaggcaggcagacaaggtggggctgagggccgtttaaatacaattagcccataataaccctctgtcttggatgggtattttaattcttttttttcaaaaacatgatcttcctgcttatttttttttcttttgaagactggccttagttattattttaaatggatttttctatgactcaactccatcccaaattcacatgaggatgtccttgataggttgtagaaattaattctgaaaaccccagttataaaacaggtttttcccagttaatatcttacctaagaaagtatttgaaatgtattcagacacctggttccctgatcggctcatctctgagaggtgtgtcagctcccggttcagcattcttttgaactgtttataaagaacaaaaatgcattaaccactttaaaaagagcaaatgttcattttaaatgtttccaactttactgtccaggaatcaagaggttggatgagcagataccattagataaataatactgtttctacaaaatatatctcttcaatttgaaattattccaacgtcacttttggaaaagaggttttcttaagatttcttagaattaacatctgattacttttgaagatgcaaacataggaaaaggaattttaatagaggtcaagataattccacttgaaactgtacctacttttaaaaatacatttgtctgaaattacctctaaaatataatttaataacctatttggtgagaggagattatatgtgaaaagttcaagggaaaaagaaaaaaaaagaagcatcttttaaaaaacagaattcagtaaaaagaacaggattaaaacacagcatagtacacttaaataaaatgtaatataacatgctcttatttcaaaataagaggtcccagtgggttaaatgaacacacaaatcaaattattacagatgtcctgtacttcacaaaaaaacacacagaggtacgtttcacattttatcaaagacacagaacacaatcaaattaacccaccttgatgtaaccccaagatacagataacaaataatttgcctcaggcattttggaatgctctccttgccacaatccacaaatccctttgaaagaattcacagttctgagagagcaatcccgaaaggatcaggaaagccctgcagattcagtgataaaataatcaaaacttagaaaagacaaaaacctccaaaatgtatggcatttcctaagccaaacaaagcccatcttcgcactccattcttgcaagaagcctatgctccctgcttatttcctggcagaagagagtaatgaaatcaggaattgcacgaaggagcaagagcctgtccaaatgtattcagctggctggtttgaagcacttatgaattatgaatagccctggtggccgaaggggtttccactcttctacattagtcctactcagctgaactctgcaaggaagaagaaattcttctttcctgaggagttgccagactaggaaacacagccatcttttaaaaaggagaagattaaaatggaggaagccccatgaatatttaagtaaatctgaagtcagtaccctcccccatttcaactaggtgttccttaaccctctctctccactgcagaccagaattctgcagatgcagcctctgcacaaaaatccagccgctctaattgatcaaagtgatgatgcatttgattaatcgattttctgaacatttaagcaaacatttaaaaaaggttaggaccatggctgtttttagactaggctgccagtacacaagaatttttgtgaactagctttttggaggattatttgtcgcacacaccaagcgtgtgccagtgcatttagcctcttttcatagtaaaatgaatgggaatggaattaatttattttatttgaaaagtacttcctatgcagcatgtaagtttctgccctccatcagctcattaatatgcatattagattgcattcgacaaatgtattaaactcttttaacctttccatctaggatccagagtgtgttaggaaatatgaacattcatttactgaaagaatggtgaattgtttgagatttagtgttacatcttctaactcacattagaaatctgaggatttaaattaatttttattttattttagcaatccagggcatgttgagaaagtcattccttccctgcaggtttctctctcccttcttcccagcccctcccttctccttgtcagcgttaaagcacaggcaaggggaaacactagagctttactgcagtgggattccccgccccaggttcaccccatttccctcctcatctttcccctctgttaccctacccctgtactcccaggatttatttcatctatagcaagttgaaggaatagcaaagcaccatggcaacagccccaacttgcaattggctctttttcctgtgaggcattcccctttcaaatgagcatccgcatccaacaatagctttatttcaagcatccaagcccggagtcatgccatcgcctgtgcctaggagacctggcttttggaggtgaagccaatgcaagccagtatttctgcctgctggctcactgcaccaggcattgttctcaaagatgtccaatcatcctccttctgggtaaccctgcttgcgtatgtgtgtgtgtttcccatgatacaatatgtttgtaaccaggcatctctgaatcaatcatctcagctagcatattttacttattgaacctctgtgcaattttgaatcccaggtgaatcacatgaattccaaattatttcgttttaaagacacaactgctcagtcacaatggcctctcattttaaatcctcaaaagacaggcacctaggctgaagactcagaagctgaagaaaacaagtttatatgctctgaccgataagctgaattttggcaaagaagtgaactttaattggatcattgtaaaaatatgttgtaaaaagcttagagacagatgatttcttccataattttctctgcactagacttaggcaaatataacattcaaacaattgtctcattttggctcctttagtctctctgaaatacttaggaatgttttagagtcaatcaggtttgtagtagttcaataatgcccttttttcacgtatttgccaaccatttattgaatacctaaaatgaccagggaaaagagtgatgatatagcagtgaaaaaaaaacaaaggaacaaacaaaaactcttttcatgcttttaatcagctttcattctagtaggaatagatatattagggcatgttgtttaaccacaacagcaaacagtctagagagggtaggaccagttctttactagctatatcggcaactctgctcagaagataggagcaggtagaaactgaatcataaaaggctataagaggaaagatttctctgtttattttctttctatagtcttccattgccacaggaccctgttgggatacattgtcaatcactttcaatatggaatcagggaggtggctctcagctgcagggctgaaaataaaccaaactcctcacctt

SEQ ID NO: 1558 - DNA, 4001 bp, Homo sapiens
cagagtgtctgctaatgctccaaagtaggctcaagccttgtgaaagtccttctacatggagtcccagtgtgatttggagaagttacacagcaaagccctcctcatggggaagcagttggttgagttttaccccagcctggaaaatccctgagtttaaccttcaattgagaacttcagagaaaagtcaataaatagttaatcctcaaatgtgttcttttctttttttttcccttccaacttaaactctaaactaaaattttagaaagggacttatttttgccctttcattaaccaataaacaaagagttccaagtaggaagagtcccccctcccctccttcaggatctcctgaggacacactgcttcctctgcgcagatcctctgagccgcagccagcaagccttgatccaaaggtggtacttttaccccaggaaagctggagaagggacacacactcactggtgcacctcagggctggaaagggcatgctggcaggtgtggagcaaaatatcttctcagccccagaaacgtagacaacaagatgatacttcaggctagaatgactgggactctgaaatgtgcacctatgagggtatggtgtaaggctttttaacaaagtgtatgtgtgtgtgtgtgtgtgtacacacacatatataactttgtataactttatagcaatatgtatttaatataatattctccaaggtaaaaatacaaacaaaaagcaacaactctcactacataaattagcattctaagtccaggtgttaattaaacaaatgatataatgatagataattaaggctcttcaacattaagctttgtctggggattgtaaataaaaccattttgggggcagtatgcatgaagcaatttcaaatgatttcactatgaaaatcagcaaacttaaagaaaacctctggttttggagacaaagcatattgtttcttttttatcttaggtcatgccagcatcgcaaaagaaatcttagaaaatcccaggatatccttctttttagagggaatttatcaaacttcaacacagaccattctttcccattgatatatgaaggttaaactactttcttgtttaaaaataaatatgtgacacctgattgcaatgcaacaagactaactcagattttagcttcctgataattgtaaaaaaattttaaagcactttcaatgttatattgatttggaagctttacagacagacatctctcaccttaaacctattccaaactgcatcagtaagagagaagttttgtttctggaaattgaagcgtactgaggattttaaacttttgctgtagcatcaagacacaagtagagtgtgacactttggaagagaatcttctagacaaagcaacaaacatattcttagagttggtagcattccctggtgcactctgctgcagacaggggtgaggggagctggagctccctgcatgatcacactttaatgaataaaaagatcatctcttaccttgttagaagccatctcactgacagaccggtaggtctgtatggtctctagctggtctaaacaccagtctaattcctccagcgtttccattgctaatttttgataagattcttctgcaaacaaacacacaggcatgtagttaggctggagcggctgcaggctgtccatagcagagtcaccgctaccaccgctgattccggtgctactgaaggtgcccccgtgctccttcattatttgcacgctggctccttccttccagctctctccaccaggagaacaaatcacagtggtgctctgcctgggatggctggtgccaagtttccccccaaccccccgcctggatgaggtgtcggtgatctaccaagaaacttcctctgaggaagaaggcggagggaacggtctcttataagctcatctgcataaatgtgtcctaaaactaaaggcagaagcaccaaagagttttctcagactctctctgccttagtcatcccagggttctttagggtatgtgatgtcatttctgagtgctttgccatctcaaggagaaatgaggaaagctttttctcattttgcttttcttctaaatgaaacagtcaaaattcgggtgaaaactggttgaccattacgttcaaagtctaggcagtcattcatcctgaggattgtgttcatgttggaataacttctaattcagcgaacactgacccgcacaagtaagaggcataggctattcctttctctcccttaaatctttcctttaattagagggaaaatgaggtctccctgataagactccagtctaaaagaagctgtctggagttttacgtgaacacgtttattggcctgggagtcctgcagctcttgttatactaaacaaagctaaaacttcccttctgcaagtgccaggatcacagggaaattctgaaccggactttcaggtggagccagatgtgaacactctgcagatttttattttgattaaagctgggggctccaatttgttgccctaagactctagactttctggaaatattgttggtatttcacacaaaaaatattgttgtgaaaatcacatttttttgctagataattaaaattctttttacatatccttaacatgtcattttatatccaaaagtttgtgaatctaaacaaatacttcaggttactggcttaagaaatctatcttaataagcactgaaataactttataaatgctagatgaattaatgaagctacagagagttgtaaaaagcacttggactctcctatatacacgactgtttttgagagaaatagcatttataaactctaccaagatttctgaaatacaaacacacaataggcactaataaaatgtaaaatctcacatggagttctaatataacattcctgccatatttaaaagacatttttatacatttatacagaaattctagcaagaccacatggtttttaaaaattattatatgaataatcttatgtctgtggtgtgcaaatacttgaagcagaaaagagaatcaacagaactgtgattccaagtaactggaatcacttggccacagacgcatatttcaaagaatagttgctttgtttatccccgaaatattcatacacttcaagataaacaggggttaaattcaatatcctgtatgtcatgcttaaaaagccacaaaaccactggaggtaacttcctccatttttttttcacactcttcaaaaatgtgcagacaagaattgaggtgtttttaataaaactcatttcaagccagacttacacataccttccttcctttcttcatcttcaattttgcaatgctgcctcaacacgaagattctctgacttactctctagtgtgtccgaaacaaccccttgcctcctctgtttgcttccagaagagcacttcttccaaggaagccttttctgaagagacagaaccctcccattctcattccctgcctctaataaaggaaaaagtccaaccacttcccagctgctggggatttactaccttcatgtcttccacatcacaacctgtggttctctgtaactaatattggacattcaccaggacggtggggagaaagtagcttgctcctagccttttgaatccactgatatgcaaaatgactgcaagatgatacatcacatttctccttcatgcagaggaaaaaagggatctgatttctattcaagcttgaccaaggaaatacatacagtaattatacccgcagaagtacaaaaaagagaaggactcttcaaagatacaccagtgagctcattcattgtctactgcatggaacaagcactcaggtacttctagagttggtacaacgtgagatgtgggtgaacaggtaatggatatgaagagaccttgctccattgtcctctcttcttcagatcagccatcaaaatgtttaagcaaaaattaatacattttgaagcaatgttagttaggctagagtatcactttccaaattcttaattcacagtcaagactttgtgtccactttat

SEQ ID NO: 1559 - DNA, 4001 bp, Homo sapiens
cttgtgaattcatgtacagataaattctagacccctacctacacttcaggttgtaggtaaaaacactgaaatctccaaatttgtttcgtttttatgaatataattggtataataacagcttttggcaaaaggaaacggagggggagtatgatctactaataaaaatagtatctggacatttattactttttttatgcttaatgtgcctttcattcttataacttagccaagagttttccagcagctggaaatctttgaaattaaacgatgcatgtgattcaaagaacagttatatctcagatctaagatgcagaatgcatagagttaccatttctgttcagtggcatcatataattatgatgtaaacctaatgtaagtacaatgtaattttaggtgaccgtctcaaagtcttgctaaaaattatcccaggcacgtgtgtgacacacacagacacacacacacacatatataactactgtaattaagagcgattcttctgtgcgctcctccttatacacgctttaaagctgttggccatagtgggttccgatttgtgtttgaagtaccgcacaaggaaggtggcctgtgaaaaacgggaaggaaggaggcaaaacaggaagatggaagaagagagtaggcatgaaggaaagtgacaggagaaaggaggagagcctcttccttccccaacacactcttgtagctagaaaggtccaagccccctcaccaaacaccagacaaatcttcccaaaagttcctggcagagccttggtgatgccgaggcttgagtgcgcccctccttggtgccccagccaccagggcacgcaggagcatcctggagcctcagcccagcaaactcttgggtagttcaggttcccttccgcgcccgctgcctgcagtcaatcactgggcaccgcgcgcccatccgtcacctactccagggcttccaagccctgaatccttctgcctctctccattctcccttagcctctctccatcctctcctccccagtgacttgtcaagaggtccaagggcggaagccgaagcagagaagatgagggcgaaaggctaggggccggttggcggatttcctacaaggggcgacaatgacgccgtcaagacgaccatccaggcccggcggccccattccctctttgccccacatcagccccacagcaccctacactctccattgaggcttcagtgtgtgatgaagtaagagaatgaggaaaaataaacccgcagcctcctaggcagcccttacctcaggctgccctcgcagaagccgccctcctcctgcccgaggcgcctctgctgcaccgccgcggccgcagcgctctggacgccggggctccgcccggcgcgggtagaccatgcgctgcgagtgagccttccgcgctcccgggggtgggggacgaaagtctgcccggagggcgctcgcgtgcagcccggcccgcgacgaagagcctgcagccgctgaggcgaggccaggagccccgggaaggggcgcgcgggccgggggcgcgcgcgcggacgggccagcgggctagcctggggaacccgcgccagggagacacaggcgctggcgacgcgcccctcagctcttctctcgtcctctggccctttaaaccccctctccctactgtccacccccgccccccggaagagagacagctcgccggtgccacttggtctgccgcgctgcgctcctcagccgggtgcggggaataacaatgtgaccgtatcgcacggacgagatgctgtgtagtaggttgtaactgctgaggccaccacctgtcaattctagggtgcaaagcacgccgtccccagtcgtctggcctctccctgattgccctcccaggttattttttcccccacctacctcacagacctcctgcaatattccgcgggcacggtaccaggggagttttgcaaaataaccctctctcccagccgggagctcactgcatctcccttaccaccagagctgaaggattacgcacagccctgcgtgcctatccaaagccagagaccgaaaatcctggtttgaaccccacactcgccggccccccagcccccattcataatcccagcggccgtctgccactacacaccctcccccggccgcccgcgctctttcccattcgccgtccctggaacgtgtcagtcactcgctgtgcatctgccatgaatacaagacgaagagctctgcagctactggctgcacaaagagggactggggcgcaggggacgcagacccccgggttgggggaggcgagagagccagcggggcacattacgtggaaggagccagtgggaccgtgggagtcctctggtctcctgttgcacaaaggagcgccagagtgaatacgcgcagtgctcctgaaccaacaggtcagatcacctcccaagaggtgctccaccaagacacccctgaaggtgagtcccacaacttgggaattcgtgtgatggagcaacaggcactcagtaacctgactgagcctgctttaaaaatgcaacaggatggagagagagcgagagcgagagcgagagagagagagagagagagagagagagagtgtgtgtgtgtgtgtgtgtagagtgggagaggtatgctggaaagcacaagtttccttttccccggttgtccagccctttcagtcagagaaaaaaagaaggaagctggcaaggaaaagaggaggaagataggcatgaagtaactttgcctatccaactactacagtagctagagaccaaaatgactttaatagacaacattcgcctgtttctcgatttattccaataaacatcatgcacacctactgtgcactgagcactttgcagaagctaaggatgcagagtcgattaggacatagtctctgcacccaaggagctcactgcctaataggagaaccaactatgaaagcccgagacaaacaacacaagtatttcacaacagaagcacatgccaattgcataagtggaagcaattttttctatgtaagagaaggaacaggtcagggaatttaaatcccatctgaactgtgtattaaaggacaaatagggacctcccaaagaagggcaataacctaataacctactattcacccattcacccaaaatagctttacatgcctgtacattgaaaggcatgtctaagagcttatcagtgtaggaacttaatgaactttccccttcatggttttggaggaaacatattcaaacactagcgtttggagtataaaacacctatttccccacatctgagatgctaccaagtgttcgctggttattctgcctttttggacctgttgcttacactataccatctacctcatccataaccttgaaattgagcccaaagccaaaattaataatagtgaggcaataagcacctgaaaggaagccaacaaaatccgcaatgtagtcattgttctcacagttttcatctgtaaaatgatgataatggaatctctttttctgaactacagttaggattagttagatgtattaaatataaggcaaccattgcctaaagagagtgtaaggaatctaaattgtagttcaatctaggggaaaaaaagaaccaatttgagcatcatgctgcccctttttgaatatgagaaatttgaaaggtattaataattactaagcctcccaaggttattacatcatcttcagaaaaatgtgtccaaagagttcttactgcaaaaagaattatatacggattccagtagaaaatgatgtcagctttttaagcatctttctcatctctttctaaaaattacataaactaacaaagagaatggaaaaaaactgtcaaacaccattttcaacaaatttatatagattttacctacaaaccccaaagcgcttctaaaggttaccaaaagcagctgagtttgggcagaagtcatatggaaaaggcccagggagaggcaatgggaaccagcactagaagtatcagaaagtgccagcaaaagtatgttttctgggaaatgag

SEQ ID NO: 1560 - DNA, 4001 bp, Homo sapiens
tatttctgtgtccagtatctttatcaaacaagcctttatttgtacatacacagtaactattactgttaaatacttaaatacctgtctctagacaggcaaaggactccaagatcagaaaaccatgtatgattgatttcttattcctcaaatcaaaaaacagtcctattttgaaagcaaacagtatgtctaacaggttactctctagagaaatttaagacaattcatttttgcaaaatatgtcaagccataaagaaactgaaaagcaaatcagctgataaaaatacaagtagacacactgcaacattgtttagctcccaactgtaacaagaaaaatagaaagatgatagatatatagataaacagcctcaatgcatcgatcatgccatctcataaattccagtccatttaacaatcttacttattttttgtaaattaacaaaattggcacgttgttgtttagaaaatgaaaaagaatagaaacagccagcaaacatattacagtcaagtcctacaagtattgatttgaagagctgaagagaccaatgctatatttattgacattaaggggatttctctcttgggataccaagaaatgaggtatcctgagagagaagaagctcaacttcctttacctgcagtgaaatcattggccttatctatcttcttgtgaattcatgtacagataaattctagacccctacctacacttcaggttgtaggtaaaaacactgaaatctccaaatttgtttcgtttttatgaatataattggtataataacagcttttggcaaaaggaaacggagggggagtatgatctactaataaaaatagtatctggacatttattactttttttatgcttaatgtgcctttcattcttataacttagccaagagttttccagcagctggaaatctttgaaattaaacgatgcatgtgattcaaagaacagttatatctcagatctaagatgcagaatgcatagagttaccatttctgttcagtggcatcatataattatgatgtaaacctaatgtaagtacaatgtaattttaggtgaccgtctcaaagtcttgctaaaaattatcccaggcacgtgtgtgacacacacagacacacacacacacatatataactactgtaattaagagcgattcttctgtgcgctcctccttatacacgctttaaagctgttggccatagtgggttccgatttgtgtttgaagtaccgcacaaggaaggtggcctgtgaaaaacgggaaggaaggaggcaaaacaggaagatggaagaagagagtaggcatgaaggaaagtgacaggagaaaggaggagagcctcttccttccccaacacactcttgtagctagaaaggtccaagccccctcaccaaacaccagacaaatcttcccaaaagttcctggcagagccttggtgatgccgaggcttgagtgcgcccctccttggtgccccagccaccagggcacgcaggagcatcctggagcctcagcccagcaaactcttgggtagttcaggttcccttccgcgcccgctgcctgcagtcaatcactgggcaccgcgcgcccatccgtcacctactccagggcttccaagccctgaatccttctgcctctctccattctcccttagcctctctccatcctctcctccccagtgacttgtcaagaggtccaagggcggaagccgaagcagagaagatgagggcgaaaggctaggggccggttggcggatttcctacaaggggcgacaatgacgccgtcaagacgaccatccaggcccggcggccccattccctctttgccccacatcagccccacagcaccctacactctccattgaggcttcagtgtgtgatgaagtaagagaatgaggaaaaataaacccgcagcctcctaggcagcccttacctcaggctgccctcgcagaagccgccctcctcctgcccgaggcgcctctgctgcaccgccgcggccgcagcgctctggacgccggggctccgcccggcgcgggtagaccatgcgctgcgagtgagccttccgcgctcccgggggtgggggacgaaagtctgcccggagggcgctcgcgtgcagcccggcccgcgacgaagagcctgcagccgctgaggcgaggccaggagccccgggaaggggcgcgcgggccgggggcgcgcgcgcggacgggccagcgggctagcctggggaacccgcgccagggagacacaggcgctggcgacgcgcccctcagctcttctctcgtcctctggccctttaaaccccctctccctactgtccacccccgccccccggaagagagacagctcgccggtgccacttggtctgccgcgctgcgctcctcagccgggtgcggggaataacaatgtgaccgtatcgcacggacgagatgctgtgtagtaggttgtaactgctgaggccaccacctgtcaattctagggtgcaaagcacgccgtccccagtcgtctggcctctccctgattgccctcccaggttattttttcccccacctacctcacagacctcctgcaatattccgcgggcacggtaccaggggagttttgcaaaataaccctctctcccagccgggagctcactgcatctcccttaccaccagagctgaaggattacgcacagccctgcgtgcctatccaaagccagagaccgaaaatcctggtttgaaccccacactcgccggccccccagcccccattcataatcccagcggccgtctgccactacacaccctcccccggccgcccgcgctctttcccattcgccgtccctggaacgtgtcagtcactcgctgtgcatctgccatgaatacaagacgaagagctctgcagctactggctgcacaaagagggactggggcgcaggggacgcagacccccgggttgggggaggcgagagagccagcggggcacattacgtggaaggagccagtgggaccgtgggagtcctctggtctcctgttgcacaaaggagcgccagagtgaatacgcgcagtgctcctgaaccaacaggtcagatcacctcccaagaggtgctccaccaagacacccctgaaggtgagtcccacaacttgggaattcgtgtgatggagcaacaggcactcagtaacctgactgagcctgctttaaaaatgcaacaggatggagagagagcgagagcgagagcgagagagagagagagagagagagagagagagtgtgtgtgtgtgtgtgtgtagagtgggagaggtatgctggaaagcacaagtttccttttccccggttgtccagccctttcagtcagagaaaaaaagaaggaagctggcaaggaaaagaggaggaagataggcatgaagtaactttgcctatccaactactacagtagctagagaccaaaatgactttaatagacaacattcgcctgtttctcgatttattccaataaacatcatgcacacctactgtgcactgagcactttgcagaagctaaggatgcagagtcgattaggacatagtctctgcacccaaggagctcactgcctaataggagaaccaactatgaaagcccgagacaaacaacacaagtatttcacaacagaagcacatgccaattgcataagtggaagcaattttttctatgtaagagaaggaacaggtcagggaatttaaatcccatctgaactgtgtattaaaggacaaatagggacctcccaaagaagggcaataacctaataacctactattcacccattcacccaaaatagctttacatgcctgtacattgaaaggcatgtctaagagcttatcagtgtaggaacttaatgaactttccccttcatggttttggaggaaacatattcaaacactagcgtttggagtataaaacacctatttccccacatctgagatgctaccaagtgttcgctggttattctgcctttttggacctgttgcttacactataccatctacctcatcc

SEQ ID NO: 1561 - DNA, 4001 bp, Homo sapiens
tcagcaaactataagaaaatacatacatgttaggggtgggataaagcacaaaagagaggacttcttcaagtcagtacatccttatacataaaccttccctttatacaatgttaccatcattagtaggctttgaaagactaaccacgtgtattctgcaaataagagattacaattaaacaacatgatgtaatacatcaagaagatgaccaaagaaaatctgcaataaagccattatatgaacagtccattgtcagaaagcaagaataagcacatcatatatgccaggcaaagtatgtgttggctaagcatgtggtatctatcaaaggcaagctatatatttctaggcgtaactttaatttgccaatgcactatacagtagattaagcagacaaacattttagataagtagaaaataattcaagtgaatattaatttttaaaaatcagatctcctcaatttataatgttgattggcaacccagcatgtagtcacaaaatcactgtgttagaattgcctttaaaatgtacatgctccctatattgctatggtccctgctagaaaaaactaaggtacagctactcaatttttaaaggtaccttaatctgaaagaaaatatagcctccaaaaaaatctgaagtggcctggctttcacagtaaaagtgatttaatttcatcgtgttttttccttacatttcatcattatactgtttaaggacgttaccctactatatttacataccttgtaaacatgtatattaaaggtggcaggctcagtgcaagttttacagagggttcttgaatttatttgctgggtatttaaaaaatagctataaattttaaagtccatttttttaaaaaaagaagctcttaaagataacagcattttggaatcaaaaattaaagtaactgaccatgcaatttcagaagtgggaacttagttttccctttccttaagtattgtaaagataagtcaataaatcaaaaactcactggtttatatgctataaacatgatggtacaatacattaagttagactttatacattatcttaaaaataagttagaactaagattaaaacacttattcatgtcccaaaattatttttttaaaatcactaacaatcacaaaacaaaaaagtcacctaccacctcaacagatatgaaacaaaaaactgactttaaaaattcatttattactcgacttacctagaattagctatgtattctgataagcagtaattttaaagactctacagttaaaagcatattttatctggaaaaagctagtagcacaatgacaatttagcacacagtgcatttatgtactcttcatctgacctggtctccattcatttcacacttgcagtatgttttaggaacaaaactcaaatgttccattttctacactgctagatcactggtgctaatgcgagaatctgaaaagcactgtagatacctccaagtcttatcttaccatgtatgagccacagtgaagcgacgacgctgccgaatgcttttattcaccagcaactttctgaaaaagcatggtgagttccttggtgaactgcgtggagaaattttaggagatgtaggtctgtttcctggtaatctcggaagctcaagttctaaatgcatttgctccttgaaagtctttatgcaaacctcaggttcagaagcagtaagttcctttgaagaatcttttgctgtcatgtcttgtaaggagtgctagctttcaccatccaaaacaaaaatctcaaacatagcagagacactgctgcaggtcagaagactgataagtctgcaaactatttccagtttaatttacgaagctgtgactccaatgtatgagcgtcttagagcaagagcagcatactcgaagaatagcaagtcaggctgtcacaaggagctttatcaggctggctttgcctctgaaaatgcgccaaagtgcttccaatgtcagtagcctccttgtggatgaggtttgtctgcaagctacacactgacactcactgaattcattcagctgaatatatcaactcatgaaatattcataaaggcttttgataaatcctttacatgcatttttttaaaaaaaatcttattaaacaagctgcattcactaatggatagtaagcaaaacctagtcacttgttttgtttgcacaaagagcagacccagaatccgtccagcatgtgtaatgtttaaagtcttcattcagaattatcttgctctgtaatgcacacaacagtaactccacctaccaaatgctattggcccaggattatttaaacaattgcactctgtttcccccttaacaacacccttcatcgctttagatttccacaaaatttgtgaggctaactgtcttcatcacagtaaaaactgattaaatccaggattgtcaaaaaaagctagctaaaatagccttctgaattccatttttgaatgaaagagctgatttgctgaagtttttttttcctcccttctccagaagatccaaaacagcatcaatataaaaaatgtcagcgaacaggaaaacattggatttggttcattcccccaaggaatttaatgcccaatctttattacaataaacattaccctcattcttctgtttaagctcattgttcatgggttgccaacagcagccactctatgctagatgcacagccactttgacagcaaagctcacaaaactggaatgaaggtaacaaccaggaaaaatgaatactctcagttaaagcacagagtccaaagtcaagcactatgcatgtgtttgtgtgtgtgcagataggtgtacaagatactgtatgcttgtgtgtgggcatatacatttgagagtgggtgtattctttgttcacaaagaatgcaagtgagacttacggacaggcgagtccaaaaaatgcctcaagtccaaaagcagatcactgtaacctaacatgtagatatatattggaatacagcttctatactttaaaaggcatatgaggaagtagaaacaatatagtggtgcttgaagtttctggatgttatgaaaagtctataccggcaatgattgtcacaagggccagcctgatctcaaataagtttgacaaagcagaactagggctcatcagcaagatcagcaagagtgacagaaaagaaatgattctcggtaagacttcagtgaaaaagagagacatttaattctcccactaagatgtgagagatgtcttctacgcttataaaatcatttgggctgagcgtggtggctcatgcctgtaatcccaacactttgggaggccgaggcaggcggatcagttgaggccaggagtttgagaccagtctggccaacatggggaaacctcgtctctccttaaaaaaatacaaaaattacccaggcttgacggcacacacctgtaatcccagctactcaggaggatgaggcacgagaatcacttgaaccaagcaggtggaggttgcagtgagccaagatcacgccactgcactccagccttggtgacagtgtgcctttgtctcaaaaaaaaaaaaaaatcattcatctgtgtcagatattcaggctaaaatgtgctaaatatctaaaggactaaataagagcagactaactcctacatgtaggagcaagtaagacccataccagcccttgggaaagtggttgaaacatagtaggaagggtttaaattactggtttacggtactactctggaaagcagaacatttcaataattaactaaaatatattatgaacaaaagcacagttatagaattttagatttgcactgaatcctagtaatcaccttgttcagcttctcattccaaagacaaggtaacagagctagagaatttaagcaacttacctaaaatcatattagctgctgatgttagagctaaaactaaaacccaggttttttgattcccaatggaatgatctttaattcaattacaaaattgtaattttgttcaagtaggctctaatgcatgttttaatatctaaagatatt

SEQ ID NO: 1562 - DNA, 4001 bp, Homo sapiens
tgttggaataatttttatcgctcttactattttcccttctttgaaacaatctcctaatatatttgcacatataatttctgtgattagaaatgcaaatgagaaccaaaagtgtaatgttaaattttctagtagatacatttaaaaagtaaaaagaaacaggtaaaatttagtttaataacatattttacttaggcttgcatatgcaaaatataaccattgcaacatgtaatattatcaaaaattattaatgaaatgctttgtattgcactgtatattcaaaatccaagatgtatttcatgcttacagcacatttccatttagactaatacttaatagtcacatgtggctggtggctaccacagtggacagagtaaatctaggtaatatttattcaatatggtggggttaatgttcatatccattgcatgcttcttgcaggcaaccttcctcttcttttgactatgcccaccattccctcagggaggatcaggattattattctaaggatgcaatgagaaagaactaatggtttgtccgtatggaaggcattgctcagttttattcttccaaaaaacaaaatattggcgcacacagtatacaaatagtattaagggacaatcacaagcctttttttttttttttaagaaaaaaagttttctaaattccagaagttttcttttaggtatcctgagcaacgctggtactgagaacttagactataacttaaggaaatgcccttctggtccaggagagaggaagaaagaaaaaaaaaaaagaagaagaagaagaagtaaatgctgccacaagtgacagaacagaacacattaactagattctttgacacaaaaaatagaaatggcaatggaaaaggagtgtatttgggaaggaaaaatctaaatagcacacctaactctccctctgcactgtgggtcctacaggaacacagaaggaagctgagaattagttctagcattcttgccaaaggctttgctacggtatgaggcaaagggaccacagggcccatagggtgagcatctgtgaaacaggagcttaacaagatggattattacagaaaacaaggaaaattgttttttcttcttccctcccttctttcctttcacatatctgatcagcggcacataatttttagttcaattacaaacagtaattgggtaaagatgagacaattaaagacacactaatgaaggattggtcaattgaaagcaaagagataattaaggaccaagatccaaagctatagaagatagtttacagatttcttcagatgatttagatcggggctttcaaacaaagtacatacctatttactctgctatcccattaaaatatagtctgatttgtaggtctgaggtgtggcctgagattctgcattctcaataaacacccaggtaatgctaatactgctagtccaaggactacacttcagtagcaaaggcctaggggatgtgtgtatcacaagcttcttaggagtagttgtcaaaaaccccaccacaggaagtgactttcaagggttagctgtacatgggtaaaagtgtggaagaaagttatcagagaactgatgataatgcaagcagtgtggaaagaggaattatctgagagtgaggatctgggcatagactagagattggtggttctgtgattgaaaaccataaaagtgaaactcagcccatttccaagatgcaaagagggcattgttcctgctgtccaactcacagaacgtcaggtccaggtgctggctgtgcccatgtcatagaaacacctagtcacagagtggtgtgttaaatgcccccagctgccctttgaatagaattatccagtgacttctttattgaacagaccaaacatgattgggaccttttgaaacttacatcatcagccatcaccgtcatcacactcctgcttttcttcattatagaggtggaaaatatcccctcttaggatgtctgttattcaatgcagtttgctgacactttttaatacctacaggagaaaaaaacacacaaaaaagaacagctctgtatccttaaagaaaaatatgtggcatactctctaaattaacatttgaaatatgtacaatgtacatgtaaaagcaaacatcataatttcccaagccaattaagtttgatatgctgagaaaagagcttcacaaaatattaatacaaaaatccaagaaattggtacaaagctatttgggaaaagatagtaagaataatgagtaacaattaggctcccaaataatgatcatgaagaatctaaaaataacatgcattttacacaaatgttttatagtttacaaagtatattcccataaaatattttatttgatgcttgcaacagtttgttagattattttcatcactttttctacaaaggaacagagagaacaaattatttggccaaggtaacacagctaaaatatgacgagttcagaatttaaagaatatgactgctttatactgtcaaaaaaaaagtgaagaaaagtaaaccaatacagaatatatatacatgaaagaaaaaaaccttaatcttaatttttaccaccagtttaaatctctcatatgtctattgcataaactagtaggcaattacttatcacagaaaattctagcaaccggtagttagagcttgaatttcctggtttaagtcacacaaatctagctattttgagatagagatgctgtagttcatgacattggctttgtgtagatcactggaagtcattgcagaaacaaagaacctctataacactaccagaatttaagggtgcactctgattgtggaaaccaaaggcaaagcagttactggtttatgaagactcaaagggaagagagtgggaggggggtaaaaggtgaaatagtatctattgggcactgtcttcactatttgggttgatgggttcactggaagcccaaatctcagcgttactcaatatatccatgtaacaaacctgcacatgtacccactaagtctaaaataaaatttttaaaatataaagttgtcatacaacagactacaagacaatacaaagaattcggtgtttgcagaatttaactgaaaaaagatgtactataaaaaatacaaaatccaagaagtattagtccatataatggtttcacaaggtcttagtaccaaaaatatcctgtattgttgctgagctcaaggactcctacatatttttttcactgtgtccatttaacccttaatgcatgccttatttaaaaaaaagtctgcttctctagcatgaagatatatatagattaacagcatgatgaaattgtagctatgtgactaggaatactaagcagtggcattgtaccatcacccaggaaaccagggttgaatttctaacacataatttgactacattatgcaggagttggcagtgaaactgacaaagtagataagagaatgggggaagggagaaactttgcctttataagtgctctagggagagaaccccatgggcttttcaggtatttgattcaatatgcaaaggacaagaatttcctcggcatacaccaaagaatgattagaactacgatgcccctctaatgctgaccaaacagcagcaggcagaattttaatacttttactcaaaggctgcttgaaacccagcaaaagtagacaagcaacaagagatattttatcagggttatagtcaatattgagggcctctatagttagggttaaacctgaaaaaaaaaaagttcagactcctaaatttaagaaaagcaagatttaaatgtgttttaaacgcaggatataaaactatacatactcaatgattataactgtaaagttgtgagcatataaaaaatattaaagatgctatgtgaaatgatgataatggaagaatgataataatggaataagggttatagaaggttttctaagtgagttgaatttctttagtggagaaaatgtagaacaatatgatgttcaaaaatataaaaaggaatgccaagagtgcaatacatgta

SEQ ID NO: 1563 - DNA, 4001 bp, Homo sapiens
aaagtcaacagattttacaaaaaggattgtgaaaatcaaattatctgagtgcaaatcacgtttactaaatgagacagagcaaaaggtgcagcaaaaatggggtcatgactaattttctcaagtccagaatatttctaacctccacctagaccgaaatcacgtgaagccagaggccagctagctataatcagaaaggcactatgtagccgttttgtatacctggacccggagcggcaaataatcttcacagagatcatcccacagctcctgcaggtctgaaagctccaagggataactcacaggtgtcttgtaaaggggtttcaaagacctgttaaggaaaccggaactaactccatctgtcatgctagggccaggcttggctccaggtaggctggatttcactggaatcggaagcctgctccctcgggggctctggatgggcttataatcaagacctttaatcatgctaagagctaattccagcttgtgattacacccatgctgcggagcctgatcatctgaacaacagtcacactttccaagttcctttgcacttctctcagtctcctcatctttctgttgtggagggctagcctggacgcttgcatccaaagattccacagaggaaccaggcgtctcttcctccatgctttctccatctgggggtacctttgtgcttgctaagtcgggtggcccaacctcagacaacgctggttcttcagtgcaaatgctggtcgaccacctgctagaagggccgcaggagatacttctggccacctttcgaggtaccttacaaatggcttcatagtcagaatcagcaacccgcaaagcggcacaaccacggcatctcctgggtcggtttccagggccttctgaaccatggcagctgtgtggctcctggatctgatcctcattctccacccagcactcaaaccctgaataggcgaagtcctcctggagcagtgcagagtatctcgcatcgggtaagacggacatgtcaaccgtcccattccccgccttgatctccgcgccagagtcatcgttattcttccgatacatactggcaatgcagaacttgaggcgatccttctccagtagcagcttttgcaagcgctcaatagaaagcgcttcaatccgggcaataactgtgtcgaatcgatagattcgatcaagcatgaaagcacacttgctgcaagcgaactcggctttgccatcgcgggggacatccttgcccaagacgtgcgaaagcagaacctggagattgagcttggacgccgtgtggaagatccagcgccgctggtttccacacagctctcgggcacagatcctgcaaatctccttcatcttccctcctagcgggtggcaagcttcccgaggcggcggcggcggcggctactgggtgaccactcaatggctcttcgccgcgctctgtctcccgcctcggtggtctccggtcagcatggcacagcccagtggggtccccactctgcaggggcgcgcccctgccccgcgcgccgactccgggtaccagagccgtcagccccgcccctcgggcagggggcgggcgtggaaacgcctaagaggatgctgagtgacagaggcgcaggccgcgctccgaccctgccatgtctctccccagctgtctctcccgccagccgccgcgtcctcaacgtcctccccttttagcagactgggctcccggagcagcagcggccggccgcgcagacgcaaagcctcggggatggaggatcagatttcaagatggcgccagcggcttcgcgtctgcggcctccacaaggctcttctgggagctgtagtccggtcagcgggcttccggctctgcgcatgcgaggtagccagcgcgaccctcgccccaaatccggttgcacacctggctcacggcgagtgcggagcagaaagcactactggcgcgggccacagccagccgctttcatctgctaagacctcacctgaaagtcgcaccagtgccctcaaggatcctcccgcctctgcaggatgtcgaggctcctcctcgcggggaggagaaagacgaatcccctccctgcattctcggacagtgccacgtcctccggctgccagcggggcagcgccgctaggtaccgctgcgcgccgcccccgcttcccgccagcagcctcacctttcccggccccgccccgcctgggttctaagggcctgaggctgcgaggcaggcgagggaaggcttggtaacggaggggcggggccgtgcaacccttacctcgactctgaacaggaatgtccagaaaagagtagaggagtgtttctcccttgatgtgggtgggggagggttagtacccgtgggtgacttgcccttctttagataaaaaagcacagagcagtcacctgagaaagagtccggcacatacaatgtgaatctggttaaccaagatcttgaagatagtagaagagaaatgggcttttttaaggatgcagccagccgcgagtagattaccaccattgaagtccctttccctcaggtagagggcagtcattattttaggacaggggacggtagacaaacactagcgcaaaagacagtgcttctttccgtaagagctggagtgtctgggaatgcagctcgcgccagaaaggactgggaacttcactgacttcggtgaaaaccatgtcttactcagcattgtacagtgataggtcctccacccttgggtccaaaacttagattgcacacaaagaggagggaagctggagccctgactaggtagaatgctggtacctccggccatttttaataaggaattatcttcctggcttgagaggcattcagacacgtaacaagaggaacaacctcagcaatcacttgcagtcccctagagcaggacatttcccagttctaatcatgctaaatttttactaacttgaccttgtaagctaaggccagcaacatctaagtttttctgaacctcatccccaggacagagtccatactcctaagcctgaagacatccaaatgccatctctgagagttcataataagcccccaaacttcttattgaagactaaatgagatgattttgaggaaatgctttaaccgtgtttcgctcattaaataatagctaatattattattttactatgaattggaatattttcagtaactttaaaacattatggggccctgcctacataagattgtattgttctcttaatcaccaaagcaaaatcttgtagctccattgtaagagaaaaggacagttcttagagctttgggcttagtaggtgatatgatttgaatatatggccccaccaaatctcatgttgaattgtaatccccagtgttggaggtggggcctggtgggaggtgtttggggcggtggggggggcagatccctcatgggtttgtgctacctttgcaatagagagtgagtttttctgagatctggtcatttaaaagtgtgtggtgcctccaccgctccatcttgctcctgctctggccatgtgacttgtttgctcccccttcgccttcctgaagcctccccagaagccaagcagataccagcaccatgcttcctataaagcctgcagaactgtgagccaattaaacctcttttctttatacattacctggtctcaagtatgtatagcaatgcaagaatggcctaatatcataggctatagaattttgcatatgtaatttcatctactatgtatattctgactcaaaaaccaagaatagaaaagcagttcaagtaaaaccacagctgcatttttgcctgcctctaggtatgtgagcttcaaagttggaagaaattaagcaacatgctttggaatctatggtgatctatagaaaggcaaagtttctggactcaccctgactgatggaaagacagactgcctgccaggacactaccctgctgtacccagtcttaagtataataaagatctcattttttactgtcaatgcaagccacattttcctattaggaaaatgtgaatgaaacaa

SEQ ID NO: 1564 - DNA, 4001 bp, Homo sapiens
acagagagggctgaggaaaccaatattgtggtgaccagctacgaggcttaatcctcataacccatagcccaatgtcctcttatcaaggtgctgtcctatctcacccacagctcagccaatccagtaggtcttccttccccaccctgatcactgacccatcaatcaagatagccctcccatccaaggaagaggccatttcccctcccactccacccaggccaactgctatcccacaggttactctcttcttcattttaaggcaagctattccaaagactaaaaatgcctaagattctgtcttaaaagcttatctgcatagtcatcttcaaaagcaaacatgaatttctcaaggaacggaaacacccttagcccctgcccttttctccatagcatcattctctgccccaccaagccggagctaggagggcactttctctaggagaggtatgacctggagatgatctgcttcagagccacctcagggatcttgcttaaaaatgcatattttcccaggcaaagtggctcatgcctataataccaacaacagtggaggctgaggtgggaggatctaaaggccaggagtttgagaccagcctggacaacatagtgccacccctttggtacgaattttttttttttttttttttttgagacagactcttgctctgtcacctaggctggagtgtagcggcgcaatcccgtctcaccgcaacctccgcctcctgggttcaagcaattctcctgcctcagcctcccaagtagcttggactacaggcatatgccaccacacccgctaatttttgtactttttaagtagagatggagtttcaccatgttggccaggctggtctcgaactcctgacctcaagccttctgtcttccttggcttcccaaagtgctgggattacaggcatgagccactgtgccctgccaatttttttttttttaattatctgggcctggtgtcctgtgcctgtggtcccagctgctcaggaggctgagccagaaggcatcacttgagcccaagagttggtggctgcagtgctatgatggtgacactgcactccagcctgagcaacagggcaagacctgtttctaaaataaataaattttaaaaatgcaaatatccaccccagccccaccctctccccccaccttcccccacattactacatcggaatccctagggtgaggcatggaatctacattttaaaccagctcccaaggtgattgttccgcacagttccacgtcagtgtttgagagaggctctgatttattccagtcctctttctttacagagaaggaaagcagaaagcaggcaccagagaggtgaaatgagcttgtccaaggtcacaggttgttaaggtgaccagagctggacgaaaccccacctctctcgctgactagcacagcgccagctaggaagagcctagaatagcgaccaactggcaggccaaaccgtcccctgcccctgcccctgcctcggagaagcgggcccctgcactcacccgcttgtagatgtcctcccggctggcctcatacttctgttgcatgcgctcctccaggaagtagatgcgcagcttgaggctgaagttctccttcttcaggtcattgaggtgctgggacagagtgcgatatccattagacatgatgggcaacccatggggaggagcgtgcccgattgccccctcaacccaggaacatggtgcagctgcaccgcagcatgaagccagccggctgggacgctgctgaggctgcggaccgagaggctggggctacggcgacatggcccctattgctggagctctctccgggactcgggactgggctcactgctctgggtgctggagcgcagcacactttccttttttacctcagggagatatttgcggaatccctgacagaggaacatgctgcgtgaactcagacacaagtggtgtaacccgactccaagccaggactctgctgtcaccctcctggagcctcccaggcccaactgtaggcagttaacagcttctcggaaaagagagactgacccccaagagcttccaggaaagggggaggggagatattcaaggtgacagtgggtttgcaaagaagagaaggaaatagagggtggggagggggtatttaaatgacttgtggctgatttggactataagaccaaaaggagtgtggccagaagcaagaaataaggttgctatagaaaagaccatgtacataaaacggcccacaaaggtaaccgcatgtcaaatatcccctttctgtccagtgcaaatcttaaagagcttctaaccagaggagtctcaatttcctttgataatccagagctcacttctaatgagttcctttgcagttttcagccccaagctttttgagctctgaggcagttcaactaatagcctttattgccatgagccttcccccgaaacacaccatagctacccgcaaagaaagagcaaatcttctagctcagcggaatctttgcagactctatttaccagttacaaagctcagaaagaggcagggtcaagggatcctccctccatggaagaagggatgggcagaagagagtgtgggaggatgacagagagggagccgtcatcctggagcccaaagatttcaggcagtcactggttcttaactctggcacctgccaagtggagccgggcactcatcaccagatcttgctcctaaagtaatttaagatccttgagtgacagctgcaacattagcaggaagtattatttataccacattacattgaaggtgatgggagacaaccccagagcacagataacaaacacgggttctttgtggcaataatattaggttgaaaaaatatatattaacattcaagataaaggaaactacaaaatttacacttaattcaagccctcatttcctccccaacctacctgcttttcattcttccaattccttctcaaaccttcataatcattccagtcaacaactcctgagtactcaccaggtaggacattgggcatgagggatatatagatcaagaatgtcccaaccctcaaagagctacgtggccatacagctggccatgatatgttaagatatgtgttttacattatgatcctccaaacctgtgtttttcaacttttgtatgttacattgccatctagtacatatgcatacactcttaactgaagtaaatgtttcaaaaagtaattgtcaccatcactatgtgtgatgtcctctgatatttcctatttctttttctgccagtgacccacccgacggatttcatgacccactaataagtttcagcctgagtttaaaaaacgttgactctgggggagcccgtaagaaagagtagtcagttcttactggggtgatcagagaaagcttcattaggagttgaatttgcactttgccttgaaaaataaaaaatgtttgagtggataaagtggccccaggagggcataattagagtgaagcattctcccaaatagatttagattataaataggcaaaataggcaagcccaaatatttaccatttgaaaaaaaaaaactacacatttaaaatccatttaactattttcactaaatctgaattcttagaatttgagaatgccaactaggcttagttagagacagtgaagaaaaaagtctaagttaaaacaactcaaaatatccttttccattcccagttctcttactaaatagctatgttatagaccatttctctagaagcctaactgtcctcacttaaaaaatgaaatggctttaaaaattggtgatttttttttttttttgagacagagtcttgctctgttgcctaggctggagtgcagtggtgcaatctcaactcactgcaacctctgcctcctgggttcaagccattctcctgcttcagcctcctgagtagctgggactacaggtgcccgccaccgcgcccggctaatttttcattgttttagtagagacagggtttcacagcgttagccaggatggtctcgatctcctga

SEQ ID NO: 1565 - DNA, 4001 bp, Homo sapiens
agtcataattcattttaaattctgcaggattaatgctgctttccagataagaagaattcaccccgtgtgcgtaaggtgattaaggagccttggaattataaatacacattcagattaatttttttgttctaagctttaaataaaatttcaaagtattttataaaataattaacatcccatagatatgcttttttaaaaaagtaattatgtctataaaagtaatttgtataaggcaataaaaattttactttataaaaaaatcaaacaatgaatactttttgcttaattctttcttaggagcagtaatttattatgggttccttagaagacatgtgatttatttaagctctattaactgaatgtgagtctgttttctgacataaacagtggatagtgttatgaaaaaataaaattgtcagtgaataggctaaatttcatagttcacaaatatagctatcctgaacatagaatacagatccaatgaacatttagttttataattagcactgttttaatccaaattccaattttatgcatgggaaactgaggcctagagaaatgaagtaactttttacagacccgttagctcagaggctggaatcactaggcctggtagtttgatttatgagtactaccttccatgagataaaaagctaaaaatgctgtgatgcggacatgtttatttctaaaaagcctgcagcacaatctatctcttctcccaaaaatcgtatgtatgacagatttttatgttactgctgctacacgaagaaaattgagcctaatatgttcggtcttccaggccaaagcaaaggattgattttagaaggaacttgtcctgcatggcctccatccagccatcaggcagggctccagctctgcaggggaaaaagagatagcccaggaagagggaatcaccacccaccccaccctgcgatctgtatctaagagaaataaccctgaaaagaagagctataagagatggcagtgtgtgctttcgtccgggtgcacttcccgatccttcaactttcatgcccatctctgatgtttccatcctggtatagccttctgagtcatgtgttcatctctcctttggctcaacccaacagacacagcctgcaatctcacctccgtcaacacagcaaatgtctgtgtctcaaagacctcgagatagagcttcctatgctttaacccttccaggggcacacctttatttctgggcaactcaacactgtccctcctcctgcctccaccacgggccccattacctccctacccttctccaagcagtagtcactcagcgccaacccctctcaggcgtcgggatcttcagtccggggccccagccctccgcgcggttctcctgcccagcgcaccgtgcgttgccacccccatcgcgttcctcagcctcccgggctccagaggcaggagctggccatgctctcacctcatccagggtgtggccgccgcagctgcttcttcctcctcggccgctgctgcccagctcccggctggctccgggcgccgtctttcccggctcggggtctgccgtggggactgaggggttcgcgtcgcgtccccggaccggtaaggcgtgtagtgagcccggcgggacgcgcgacagcagcagccaaagtcgcatcggcggcggcagcaggacccgctgtctgtgcccttcatggatttcctgggcctggccaccccagtcctagctacggttcctgcttgttttcctggtgttttccgggactgccagggcgcatcctctgggcctggctgagcatccccgtcagttccctgggcctcctccgcggctgcctctgccacctgctccgcccagattgctttggtccttctcccgcagacacactcagctgcccttcatcctctgtcgtctccccattctctctccacccactgcctcattcccagatcccacgccgtttcttcctttctatccgctccaatgtcaccttctctttatttccaacctcagataagtttctccttttctttctgtctctctcaatattttccccggtttcatcctcctccccgtgcccccgtatcagtcatccttttataatttatccagtttttcgtctcctattagttcctcagaatcactactgcaggttgttggctagcctcttttcttcctctccctgtttctttctctttcctaaaatcttttcctttcaattttcccttgagtttttcaattgtaaaaactttctcccaaacaacctacattttcctttcagttgagactgattgcagttttccatgaactcataataaagcatatatagcttggtatccaccataaaccaagaaagtgttttaacctttttttaaagttggtcagttaaataaattatcccataaatattcattctgaaaatccagttcttatatcctacatatgtccttgaaaacagagactagtttgcttttgtatccagcaaagcaaaatgtttctgcaacactattgcatatagcataagttcagcaggggagggggagcaaggtttgtctttgtagttgggcactgtggatctcaaggttcataggcaacagctattattgttgactgactgaatgcagacaaagctgaattcatctcagctcatccttccaaatctgttgctcagttctgtgttttaaccccagccctatctacccagctgctcaatccccaaacctagaatttgtcagggacctatttctcttttacccatctcatccagtcattaattctacttttttactctctccctctctctctctctctatagatagatagatagatagatagatagatagatagatagatagatttttttttttgagacggattctcactctatcacccagcaggctggagtgcagtggcacgatcttggcctactgcaagctctgcctcctgggttcaagcgattctcctgcctcaatctcctgagcagctcggattacaggcacctgccaccacgcctggctaatttttgtatttttagtagagatggggtttcgccatgttggccaggctggtctcgaactgctgacctcaagtgatcctcccgtctcagcctcccaaattgctaggattacaggcgtgagccactcacctggcccattctttcttttaagcctcctaacttaagcttcatctttacctctccttatctttgtccaatctgtcttatctgggctctttgtctaacaacctctaccagaaaattcttaattatctcttattgttttgtatcttcttcctctccttttccattagcttcatccccagcccacaaacatgcttaactctcctcactcttaaaacaaagtccttccctctctacctatcaccatatctctcacttcccttcacatccaatttgtttaatatattgtgttcatttgatgtccacactttctgacttcccaatcattctttacctcctaattttctgcaatcaggcttctaatcctattgcttaactagaggtattctcccagaggtcctggcgaatttcatgtcaggcataggtaggcaatgccagatcagttgcccctagtttttctccccgcaacaaacgaattcagatctaagaaaaaaaaaaaaaaaaaacctgtggtatcaaggccaccacattgcagagcactcaaccgccatttaacctacataaatagcaccttacccactgaagcctgcacaactaaaaacaatggccttgagtggtagggctaaactcttgggttcatgcggtttatccaaatgcaggctgaagaggaatccccattatatgactctagattgataaattacctagttttgattatggccttagattttagagattcagactttggttttgcccatagacacgtggtagattttatctaacacacaaattaaaaggaatagggctccataacttaaagagaataagccatcttttgtagttgtggcagataaacagttcagtgaagttactgcaaaccca

SEQ ID NO: 1566 - DNA, 4001 bp, Homo sapiens
caaccagtccccggtcacttgggccacttcaggtcctgcttgtccagacacagagagggctgaggaaaccaatattgtggtgaccagctacgaggcttaatcctcataacccatagcccaatgtcctcttatcaaggtgctgtcctatctcacccacagctcagccaatccagtaggtcttccttccccaccctgatcactgacccatcaatcaagatagccctcccatccaaggaagaggccatttcccctcccactccacccaggccaactgctatcccacaggttactctcttcttcattttaaggcaagctattccaaagactaaaaatgcctaagattctgtcttaaaagcttatctgcatagtcatcttcaaaagcaaacatgaatttctcaaggaacggaaacacccttagcccctgcccttttctccatagcatcattctctgccccaccaagccggagctaggagggcactttctctaggagaggtatgacctggagatgatctgcttcagagccacctcagggatcttgcttaaaaatgcatattttcccaggcaaagtggctcatgcctataataccaacaacagtggaggctgaggtgggaggatctaaaggccaggagtttgagaccagcctggacaacatagtgccacccctttggtacgaattttttttttttttttttttttgagacagactcttgctctgtcacctaggctggagtgtagcggcgcaatcccgtctcaccgcaacctccgcctcctgggttcaagcaattctcctgcctcagcctcccaagtagcttggactacaggcatatgccaccacacccgctaatttttgtactttttaagtagagatggagtttcaccatgttggccaggctggtctcgaactcctgacctcaagccttctgtcttccttggcttcccaaagtgctgggattacaggcatgagccactgtgccctgccaatttttttttttttaattatctgggcctggtgtcctgtgcctgtggtcccagctgctcaggaggctgagccagaaggcatcacttgagcccaagagttggtggctgcagtgctatgatggtgacactgcactccagcctgagcaacagggcaagacctgtttctaaaataaataaattttaaaaatgcaaatatccaccccagccccaccctctccccccaccttcccccacattactacatcggaatccctagggtgaggcatggaatctacattttaaaccagctcccaaggtgattgttccgcacagttccacgtcagtgtttgagagaggctctgatttattccagtcctctttctttacagagaaggaaagcagaaagcaggcaccagagaggtgaaatgagcttgtccaaggtcacaggttgttaaggtgaccagagctggacgaaaccccacctctctcgctgactagcacagcgccagctaggaagagcctagaatagcgaccaactggcaggccaaaccgtcccctgcccctgcccctgcctcggagaagcgggcccctgcactcacccgcttgtagatgtcctcccggctggcctcatacttctgttgcatgcgctcctccaggaagtagatgcgcagcttgaggctgaagttctccttcttcaggtcattgaggtgctgggacagagtgcgatatccattagacatgatgggcaacccatggggaggagcgtgcccgattgccccctcaacccaggaacatggtgcagctgcaccgcagcatgaagccagccggctgggacgctgctgaggctgcggaccgagaggctggggctacggcgacatggcccctattgctggagctctctccgggactcgggactgggctcactgctctgggtgctggagcgcagcacactttccttttttacctcagggagatatttgcggaatccctgacagaggaacatgctgcgtgaactcagacacaagtggtgtaacccgactccaagccaggactctgctgtcaccctcctggagcctcccaggcccaactgtaggcagttaacagcttctcggaaaagagagactgacccccaagagcttccaggaaagggggaggggagatattcaaggtgacagtgggtttgcaaagaagagaaggaaatagagggtggggagggggtatttaaatgacttgtggctgatttggactataagaccaaaaggagtgtggccagaagcaagaaataaggttgctatagaaaagaccatgtacataaaacggcccacaaaggtaaccgcatgtcaaatatcccctttctgtccagtgcaaatcttaaagagcttctaaccagaggagtctcaatttcctttgataatccagagctcacttctaatgagttcctttgcagttttcagccccaagctttttgagctctgaggcagttcaactaatagcctttattgccatgagccttcccccgaaacacaccatagctacccgcaaagaaagagcaaatcttctagctcagcggaatctttgcagactctatttaccagttacaaagctcagaaagaggcagggtcaagggatcctccctccatggaagaagggatgggcagaagagagtgtgggaggatgacagagagggagccgtcatcctggagcccaaagatttcaggcagtcactggttcttaactctggcacctgccaagtggagccgggcactcatcaccagatcttgctcctaaagtaatttaagatccttgagtgacagctgcaacattagcaggaagtattatttataccacattacattgaaggtgatgggagacaaccccagagcacagataacaaacacgggttctttgtggcaataatattaggttgaaaaaatatatattaacattcaagataaaggaaactacaaaatttacacttaattcaagccctcatttcctccccaacctacctgcttttcattcttccaattccttctcaaaccttcataatcattccagtcaacaactcctgagtactcaccaggtaggacattgggcatgagggatatatagatcaagaatgtcccaaccctcaaagagctacgtggccatacagctggccatgatatgttaagatatgtgttttacattatgatcctccaaacctgtgtttttcaacttttgtatgttacattgccatctagtacatatgcatacactcttaactgaagtaaatgtttcaaaaagtaattgtcaccatcactatgtgtgatgtcctctgatatttcctatttctttttctgccagtgacccacccgacggatttcatgacccactaataagtttcagcctgagtttaaaaaacgttgactctgggggagcccgtaagaaagagtagtcagttcttactggggtgatcagagaaagcttcattaggagttgaatttgcactttgccttgaaaaataaaaaatgtttgagtggataaagtggccccaggagggcataattagagtgaagcattctcccaaatagatttagattataaataggcaaaataggcaagcccaaatatttaccatttgaaaaaaaaaaactacacatttaaaatccatttaactattttcactaaatctgaattcttagaatttgagaatgccaactaggcttagttagagacagtgaagaaaaaagtctaagttaaaacaactcaaaatatccttttccattcccagttctcttactaaatagctatgttatagaccatttctctagaagcctaactgtcctcacttaaaaaatgaaatggctttaaaaattggtgatttttttttttttttgagacagagtcttgctctgttgcctaggctggagtgcagtggtgcaatctcaactcactgcaacctctgcctcctgggttcaagccattctcctgcttcagcctcctgagtagctgggactacaggtgcccgccaccgcgcccggctaatttttcattgtttta

SEQ ID NO: 1567 - DNA, 4001 bp, Homo sapiens
gactgacccccaagagcttccaggaaagggggaggggagatattcaaggtgacagtgggtttgcaaagaagagaaggaaatagagggtggggagggggtatttaaatgacttgtggctgatttggactataagaccaaaaggagtgtggccagaagcaagaaataaggttgctatagaaaagaccatgtacataaaacggcccacaaaggtaaccgcatgtcaaatatcccctttctgtccagtgcaaatcttaaagagcttctaaccagaggagtctcaatttcctttgataatccagagctcacttctaatgagttcctttgcagttttcagccccaagctttttgagctctgaggcagttcaactaatagcctttattgccatgagccttcccccgaaacacaccatagctacccgcaaagaaagagcaaatcttctagctcagcggaatctttgcagactctatttaccagttacaaagctcagaaagaggcagggtcaagggatcctccctccatggaagaagggatgggcagaagagagtgtgggaggatgacagagagggagccgtcatcctggagcccaaagatttcaggcagtcactggttcttaactctggcacctgccaagtggagccgggcactcatcaccagatcttgctcctaaagtaatttaagatccttgagtgacagctgcaacattagcaggaagtattatttataccacattacattgaaggtgatgggagacaaccccagagcacagataacaaacacgggttctttgtggcaataatattaggttgaaaaaatatatattaacattcaagataaaggaaactacaaaatttacacttaattcaagccctcatttcctccccaacctacctgcttttcattcttccaattccttctcaaaccttcataatcattccagtcaacaactcctgagtactcaccaggtaggacattgggcatgagggatatatagatcaagaatgtcccaaccctcaaagagctacgtggccatacagctggccatgatatgttaagatatgtgttttacattatgatcctccaaacctgtgtttttcaacttttgtatgttacattgccatctagtacatatgcatacactcttaactgaagtaaatgtttcaaaaagtaattgtcaccatcactatgtgtgatgtcctctgatatttcctatttctttttctgccagtgacccacccgacggatttcatgacccactaataagtttcagcctgagtttaaaaaacgttgactctgggggagcccgtaagaaagagtagtcagttcttactggggtgatcagagaaagcttcattaggagttgaatttgcactttgccttgaaaaataaaaaatgtttgagtggataaagtggccccaggagggcataattagagtgaagcattctcccaaatagatttagattataaataggcaaaataggcaagcccaaatatttaccatttgaaaaaaaaaaactacacatttaaaatccatttaactattttcactaaatctgaattcttagaatttgagaatgccaactaggcttagttagagacagtgaagaaaaaagtctaagttaaaacaactcaaaatatccttttccattcccagttctcttactaaatagctatgttatagaccatttctctagaagcctaactgtcctcacttaaaaaatgaaatggctttaaaaattggtgatttttttttttttttgagacagagtcttgctctgttgcctaggctggagtgcagtggtgcaatctcaactcactgcaacctctgcctcctgggttcaagccattctcctgcttcagcctcctgagtagctgggactacaggtgcccgccaccgcgcccggctaatttttcattgttttagtagagacagggtttcacagcgttagccaggatggtctcgatctcctgaccttgagatccgcccgccttggcctcccaaagtgctgggattacaggcatgagccaccgcgtctggccaaaattagtgatttttaaggccctttcctggtctaagctcttcaaggtgataacccagttaatatcacctccattttgctcaaggggagccaggctgccagagtttagataagtgtttaatcatgctttggctgtctacttagattcctttatcaggtaaaataatttcataaaagttttacaggaagtaaaactgtgtatgaatccagggtattcttatgcatcctagatttctgttggacatttatgcttatttcctccatgatatcttgttcttctatctctctggatccttttctgtgttttttgccagctcctgaaagtgggtatttaaatgatggtaagtcctcagccttctacttttttttctcttcacatttttatccatggaggttttatccacttttagggctatactttcaccttcgaaacaattcccaaatctccaaccgagtcttctcacccaagatctagccgtacatattcaactcttggcttagatcattcaacttgagtgttcccaaattccacccaagcaaagcctttcctcttaccctagcctggaaagacttcttcctcttttgaactctaaggcagatattaacattcaacaagtgttcatatgctgccttatgatgtggcttttgttatcttgaagggttatttacatcttttagagttacgcgactttttgtgtgtttgatctttccaactagtctgaagctgcccaaggaaaaagtcaatgactaactaatacatcttcataaactcctacagcttccataacaacctgagacctctccaacagcattcatcccattgtgctgtcacagtctgtttacgatgacctcaacctggctagagtgttttgagagctgacaaggcatattttgtgtccttgtattcttgttgcatagtactcaggaagcactccctaaatatttgtggaatcaatgaacaggaaaatattccataaacattgtacgttttgctttgttatatatgggctggctcacctgtattattctcatagatttccaataatatgaaaaaagtttgttttaatagtcctaaataaactatatttggtagaacacttattctagaagacgtagaaaaatgacgttttgttcacttacatttctaagtttacatgcccaccctgatcttttccctgaactccaattgatatctgactgtctagtagaaatctctgcttgaatttagacatcacatacttgtgatatctaaaactgaactcctgatctttcccagtaaacatgctcctccctcactacaccttttttcaacttgtaacaactcaatattttcagatttttgagcccaaacctttgagtcatttcttgattcattctctctcctacatatcatctgtctgtaaatcttactatgtatattctacattatagtatatatattaataacatatatggtagtataatatatatgttgtagctgttgtattatgtatgtaatatataatactatattatatatactattatactactatatatatattttatatatatgttatactaccactactgccactggtatttctaccaccctgacccacagtactgccatcttttccttacatgatctgaatagccccttaactggtgttcctgctcccactcttgttcccttgtagtctattctcagcacagcagccacagtgaccctttcaaaatacgtcagattactcctctgctggagagccccctggcttcccatctaacttagagtgaaaggtgatgtcccttcaccagactgcaaggcctgaggccctacaccctcttcttgcctctcctattacctcctctacttcttcctaccactctccctctgttctctgctgtagccacactgtttctctttgttatttctcaaaaacaggaagcaagagaagctttcttttccgaggcctttgaactt

SEQ ID NO: 1568 - DNA, 4001 bp, Homo sapiens
tcaccacaaacttctcctcccgggttcaagcgattctcctgcctcagcctccggagtagctgggattacaggcacgtgcgaccacgcccggctaattttgtattttagtagagatggggtttctccatgttggtcaggctggtctcgaactcccgacctcaggtgatccgcctgcctcagcctcccaaagtgctgggattacaggcatgagccactgcacctggccagaaagctttttctttacactgagccataactcgcctcccaacaactcgcttgcatcggttgttctgtcctcctaagagattctaatgtgattcaatccctctaccaccaatagctcttcggaaatttgaaggaagctaccacatcctccccactcccagtcgtcatttctccggactcaggagtcccaggtccttcctttggccatccctcaaggcatggctttgagttccctcctgtctcttgattgtacttattttatctaatgatgcccagaactaagcacagccctctcggagaggcccaagaggagcagaaaggagccaaaagtaaaatcatcacttttgatctagacagaatctagacagcctacttcttctgtcaacaaaccctaagcttcaatttgctccttctttaatattcacattataccattcactcctgttgagcttagcaatcaactaaaagcacccaagtcttttgcataagccccaaatttaccttctgtgtttgtaccgtcttcactctctcaggagtcagagcgctcatttggccccaccccaattctccaaagctaaatcccacagatggaagcgtatctgttatagagacaccgctggaatagtctccctaccctcccacccactaaaaaacagaaacgaagtctttgtctcaatacatggtctcttatccttaccctttccttgaatggggcttcattttaaagtgtgtctgggggaaggactggaagaaaacgcagtttcacaggccatctccaaaatctgacctaaaagccaactgttgcctggcctcaataaagcctgagcagtgtggtgccctgatctctttccttctccattcctcccccaagtgggctccaactggaggttgtggagatgagtgctgctgggctctgctcactcagtccctttgcctttgtgtgagtagtgacagatgaggctgagaaggaaaacgtggcagggtgagaataaacctgatattgttcaaagcatctgacatcaaacatatctctcaagaagacctactggaatccctctagccacacgaacaaggaaacgacagagaaccatttctacagaaagttccaggcggcctccctgggtatttttaacatcaggactcggtggaggggagagtcattaagcaagggaaaccccgtaaaacagaacatgtgaaaatgaccaagagaggtgggctgggaaccaggcagggcgaggctacagaaaagggaagctgtcacgggaccctggtggtgaggggcgacctctctctccctaagggcgctgggggaggggagggaggaggaccaccaagtctggagcgcggcgagaaggaaacagcccacctacctcgtccaggtctgctccattttccaggctctttccttagtctcaggacgctcctcacccgggaggggaagcagcctgggaaaatgagaagccttgcccacgaatctccagcgcaaaaggcagcagctttttcctccccagctcctttctgcgtcggcggcgaagagagagctctgctccctgcttttttagaaaatggatttgacgtggccgaacctgcggctagccgtgcgacccgcacaagggagggactgttctcagtaggaggctggactcagagcggcgcggcgcccggggctgtttcgtgagctggagccagcggctgcccgggccgcggtgcgcgcactctccaggctgagacacgactggctggcacgagttgctcggcaccagctgagctgtcaaccgcgagcggaggcggggctcccgacaaccagtgtgctggggcagaatcggcccaggttacacgccccctgaaccaccctcgcgtctccccgacccctctctcgctggctcagatgaatgatgacggcagagggcagagagcttagaggacgcggtaccaagccccgtccctcgcccatcccaacgaaggtcttagaatacaatcaaccaactacaggaagaatttgtagaggaggttttcttgtgtgtctgcatcgccccacccacaggtaaccccagagccagagatggagtctaggaaggtttaggagcaatcccggctgaatgcagatgtataccctacgtggtcatggaacacgatgttgtcttcctagagatgtgacatgccagtttcaccattaatccagggacaggacccttcatcaggaagggaagcatcccaacaaaaccttacagccctattagctgcctgtatcccagacatctcctgttttagggtattctacctcctcgtttttcagtttcgccagcaactgggctctaccaatagcttcaaggagggagaagcttcctgactcccagaacactagaaaagcctcaagacagtagccatcaggacctcgacactcccttgtgactgttttaagatcatggaaaaggcctctttggagatggcattgcctcaggccctgtaccatgtacttatgtatcaagatttaaacaaggcagacatactataattagagtgcttgccaccctgaagctcctttttagctttcaaataagaccgttttattaaatgacataatcactgttattattagcactatcactgacctttttttttatctgaaaaaggctttatagtgcccacatgtggcaatgttaatttcgttgtacttgtttcagagatgataaatttgagaccccaaaaggcccaaagtctctgctaaggttctgatacaggctgtgttctccattgggtggccccagagatatgttccctgaatttctaaagctacgacccacaagacttctccaggatgaatttattctttcaggcctcctaggcatttaactcaggaagaacctggcatgcctgggtattggtgagactgtggggagtctgtgttcttgggggaacctgtcatctgtctgttatctcttggattggttcccctacatactagtacaaagtaggggtggggaggggaggataacaaaacatttgaaggtttagcagaactgtctaaaaagcccctagtctagactcctccaacacttgatttattggtaggaccacactgctccagagctcaaaatgttaccaggaaaaatttcaaggtccagtttgatcttagacaaggctcacaggccacctgtcttgaaaagaatatcctgttgcctctgatgggggggaagaaaaggcagggagagtcagattcccatccttcataccaaagttggggctatatttagctttgtctcaaatcaaattatgggctaccgagttgtggagaggaactctgtctacaggcagctcactggattcaagaaatgatagcactaactaggtgagctgtggggtctcagaagtgacgctagaaaatacgttcatgtatttttaaaataacttttttcaaaagtttatagcacattcattgtaaaaacatttgaaaaatacagaaagttatatagattactcagaatacccagggatcttcaatattaaaaatgtgttgcatttttttcccactctttaaaaaatgcatcttttaatccaaacaccaactctttcttacacacatgggtatattcttgagaagagaaatttccttgttgttttaaaaattatacttattgtcaaaagaacaatttttttgcgttagatttcagaagaaaaatattcacccatataaccactgctacagcacaaatgtttaaatttctccaaattccctttagtcattatctatatatattaaatatctatttacataa

SEQ ID NO: 1569 - DNA, 4001 bp, Homo sapiens
agaatacagttacctttttgtagtcatttaacaatagctattttaaaatttttatgtttcctttttcctagtcataagacagctggagtaaacaatatctatttagttctaggtcatttttgccaacaaagatcctgcatatcaaggggctctctgacagagttcttgggaattcaacttactgaacggtttaaaggcgagggcaaaggccctgcacagaaatgctcatgtgttgaatggagaaagtctaaagtgggcttcctcagcgcccaaagaatttctagattataaccaacttcatgaacgaattctcatttgtagattgtgaccacgggctagaaaagtaacctgagattgtacaatatttattctgtacagctggggaagcaaaaggctactgaccctagagcctgagaagttgggatccactgctttaagtctacaggatagatttaataaaaagaaatgacttctgagattgtgttcagtcccacttcctctaactggacacccacccttcaaatcgctactgaatttcctagtgtctaatttcctgccacagaatcctctgcgccggctgcacagcagacgagctttcctgctctacggggatcgccaatcacatccactcaaggtggttcgtgtctctgaagcagtgccatgtcctctccagcctggtacagtccccatggggaagagcaccttcctgaatagggaggagagaggtgtttatgaaacccgtgggatcccggatccaatgatgcatccgatgcgaacctaagtgactttcgaccgaaagtggcgggccctcgctcccgctgctctaaccaggcgctgggacgcgagccggccaggccagacacctgccggcgcccgggaagggccagtcgcggccagaggtgttgcccgacgcggcggctcaggccgcgctcattggccaagtgtcaggccctccccctcctcggccgtgctcagatgaagcccggaggggagcctcctgagccccttcgctctgaggagccagccctgcagttgcctcaactcctcggggctgggggctgagggccggggggaggtggccccggtatgagaggaggccgcgactggggtcggtggcctgaggagcgcagggccttccccaggatgactccgctgacacgtctgtgacaagcctcccagggagggaggcacatgcagggccatcggctctgcagcaagacctctccgccacgccgaaaggccagatttacctcagggtagacgctgccgcttctccctctcatgggctctgcaggccgccattatcgggcagctcgcgcctccgctgccgccgcctccagtcagcagccggcgcgcgcccccgtggtgcgcgcggacacacccccttacgccgacggccccgcccccctccggctttccgtagcgcgagccgggacgttccgcgccaccgacgaggcgcgcggccggcgctccgctcgcctcctccctctctcgaggatttgcagagccgggagtcgtcggaggtgtgcgcgctccggagcgcaccactggtgctgctccccgcaggggtggccgggctcgggaaccgcgaggccacgccacgccggggctcggccaccctccagccgcagcgggcgctcagggcccgcggccccggggaccgtctgcagcggcaggtccgggcctggggctgcgcgcgcccggccgcggcctcccctccctctacccgcccccttccgacctaccgagctgcgggctggggtgcggggctcgctggggtggaacgcccggtgcatcttccgcgcgggtctcgggtgcctgcggggcgcggtgctctttggcgggcctgcggggaggtgcggcccgaccaaggaggcctggcgtccgccccgccgggagggagactgcagcttttctccgagtcactgagccatgtttgcgggcggtgcagttgcggagacggcggcggcggcggcggcgcggggctgggtgcgatcatctgggaggatgccgtcccctgccccgccggcgcggtggtatctcccttaaagaggccggcgcctcattgttccccggctgcggccgcagggagccagggccacctcctcggcgtggggagtgagggcgcggaggcgcctgcacctggctgcggtgcccacggcgcccccccgcgaggctcctggtggagggttggtctgcagtcggcgcaggggagaggccttggtccgagccaggatccaccgcgctcctgccgctctcggggctggacagtcaatggggtccccgccgctgctgcagtcgctcggctgccacacgctgttagtcagatcccgcacgctgttggccccacagccagcccggggtcacttaggaccgcattcctcagtcatccagttgttagatcagtaagcatccgccagaaaagtccattccttcttactcgatttattctgcacccattacttctcagcagggtgatgattcctcctcccagcgctcgctctgtaaggcacgatgtacaaaaaatccctgtcgctgtgctcaaagatcaactcattttattttctgtcctttatgccccttctcccgagagtctggcactgggttaggtctttatataaatgatcttgcttaatcctaaccaaaccccacaagagtaggttttattatcctgtttttacaggtgaggaaacacctctgcctcttctcactgaagtgtctgttttgggatgtgtctaccttgaatacccattcctggtgtaacacaccctccccttaaaaaaaaaaaacaacaacggttctgtaatctgttcagatttttgtcctgagtgccatccaagtgtcaagtcttcagctgtttgctggaaacactggtgtcagccaagacttatttcccgccctcaaaagtagagggaaaatatagaaggctctgcgtagacagctaactacctgtgtgggttattgatcccaatcaggggagggacctctctctcgatcaaagtagcgttttcattttgtctcagtcattaaatatcataggaacccttgctcttaagtcagctgcagatgagatttgaaatccactctcgcccccagtttaggctcactgttaagtctgtgaggggggtttagatcttgtgggacctgaaacttaaataatttggggtgtcctcctgaggaaaaatgttataaaatggccctgtgaacacatatctggaacactggaaagggtccctataagtaaaggactctgaagcttaagattcattagtttcagggtaaatctgcctcctgcttattatgtcattttttttagcctttaggcctcctggaggactgagaattcctaggggcaggaaccttgtctgtgattcatctctgcagcctcctcaatctgatatggtatcaaaatacacctaaggctagcattctcatacatagctggtgggaagacaaagtgatataacagttaacaaggaaatttggcaatatatagcaatattatttgatccagtaaccctagatcaaatactagatttcgaggaatctatcctagtaatatactggcaaacacacacacacaaaacaacaaacctgtatgtacagggctgttcattatggcattaatgaatagcaaaagattggaaactgctcacatgtctaatgataaagaactggttgaataaattatagtacatacacaggataaagtactatgcagccatgaaaagctatgtggaagaggcctggcatggtggctcacacctgtaatcctagcactttgggaggccgaggtgggcagatcacttgaggtcaggagtttgagaccagcctggccaacatggtgaaaccctgtctctactaaaaatacaaaaattaggcgggtgtggtggcacttgcctgtagtcccaggtacttgggaggctgaggcaggagaatctcttgaacctgggaggcggaggttgcagtgagccgaggtcaagccactgcactccagcttg

SEQ ID NO: 1570 - DNA, 4001 bp, Homo sapiens
ctccttcaggctgacacacacataatggtcataaaacagcaaaaacaaaaccccctcacagttagaaatacaaacacctggcttatgcttaaggcctgaaagtgaaccaaatcatttatagaactgaaaatgtttgttttcattatgtaaaagtaagtggccaaactctatctattcatattttaattttgtctcttatgtcatctccttatttcttacacaataatgaaaataaagtttgtggaaaagaaacgtttctttttttttttttttttttttagacggagtctcgctctctcgctctgtctcccaggctggagtgcaatgacttgatctcggctcactgcaagctccgcctcccaggttcacgccattctcctgcctcagcctcccgagtagctgggactataggcgcctgccaccacacccggctatttttttttgtattttttagtagagacggggtttcactgtgttagccaggatggtctcgatcacctgacctcgtgatccgcccgcctcggcctcccaaagtgctgggattacgggcgtgagccaccgcgcccggccagaaacatttacttaaaaataaagtaagctacttggatacttagaatacagttacctttttgtagtcatttaacaatagctattttaaaatttttatgtttcctttttcctagtcataagacagctggagtaaacaatatctatttagttctaggtcatttttgccaacaaagatcctgcatatcaaggggctctctgacagagttcttgggaattcaacttactgaacggtttaaaggcgagggcaaaggccctgcacagaaatgctcatgtgttgaatggagaaagtctaaagtgggcttcctcagcgcccaaagaatttctagattataaccaacttcatgaacgaattctcatttgtagattgtgaccacgggctagaaaagtaacctgagattgtacaatatttattctgtacagctggggaagcaaaaggctactgaccctagagcctgagaagttgggatccactgctttaagtctacaggatagatttaataaaaagaaatgacttctgagattgtgttcagtcccacttcctctaactggacacccacccttcaaatcgctactgaatttcctagtgtctaatttcctgccacagaatcctctgcgccggctgcacagcagacgagctttcctgctctacggggatcgccaatcacatccactcaaggtggttcgtgtctctgaagcagtgccatgtcctctccagcctggtacagtccccatggggaagagcaccttcctgaatagggaggagagaggtgtttatgaaacccgtgggatcccggatccaatgatgcatccgatgcgaacctaagtgactttcgaccgaaagtggcgggccctcgctcccgctgctctaaccaggcgctgggacgcgagccggccaggccagacacctgccggcgcccgggaagggccagtcgcggccagaggtgttgcccgacgcggcggctcaggccgcgctcattggccaagtgtcaggccctccccctcctcggccgtgctcagatgaagcccggaggggagcctcctgagccccttcgctctgaggagccagccctgcagttgcctcaactcctcggggctgggggctgagggccggggggaggtggccccggtatgagaggaggccgcgactggggtcggtggcctgaggagcgcagggccttccccaggatgactccgctgacacgtctgtgacaagcctcccagggagggaggcacatgcagggccatcggctctgcagcaagacctctccgccacgccgaaaggccagatttacctcagggtagacgctgccgcttctccctctcatgggctctgcaggccgccattatcgggcagctcgcgcctccgctgccgccgcctccagtcagcagccggcgcgcgcccccgtggtgcgcgcggacacacccccttacgccgacggccccgcccccctccggctttccgtagcgcgagccgggacgttccgcgccaccgacgaggcgcgcggccggcgctccgctcgcctcctccctctctcgaggatttgcagagccgggagtcgtcggaggtgtgcgcgctccggagcgcaccactggtgctgctccccgcaggggtggccgggctcgggaaccgcgaggccacgccacgccggggctcggccaccctccagccgcagcgggcgctcagggcccgcggccccggggaccgtctgcagcggcaggtccgggcctggggctgcgcgcgcccggccgcggcctcccctccctctacccgcccccttccgacctaccgagctgcgggctggggtgcggggctcgctggggtggaacgcccggtgcatcttccgcgcgggtctcgggtgcctgcggggcgcggtgctctttggcgggcctgcggggaggtgcggcccgaccaaggaggcctggcgtccgccccgccgggagggagactgcagcttttctccgagtcactgagccatgtttgcgggcggtgcagttgcggagacggcggcggcggcggcggcgcggggctgggtgcgatcatctgggaggatgccgtcccctgccccgccggcgcggtggtatctcccttaaagaggccggcgcctcattgttccccggctgcggccgcagggagccagggccacctcctcggcgtggggagtgagggcgcggaggcgcctgcacctggctgcggtgcccacggcgcccccccgcgaggctcctggtggagggttggtctgcagtcggcgcaggggagaggccttggtccgagccaggatccaccgcgctcctgccgctctcggggctggacagtcaatggggtccccgccgctgctgcagtcgctcggctgccacacgctgttagtcagatcccgcacgctgttggccccacagccagcccggggtcacttaggaccgcattcctcagtcatccagttgttagatcagtaagcatccgccagaaaagtccattccttcttactcgatttattctgcacccattacttctcagcagggtgatgattcctcctcccagcgctcgctctgtaaggcacgatgtacaaaaaatccctgtcgctgtgctcaaagatcaactcattttattttctgtcctttatgccccttctcccgagagtctggcactgggttaggtctttatataaatgatcttgcttaatcctaaccaaaccccacaagagtaggttttattatcctgtttttacaggtgaggaaacacctctgcctcttctcactgaagtgtctgttttgggatgtgtctaccttgaatacccattcctggtgtaacacaccctccccttaaaaaaaaaaaacaacaacggttctgtaatctgttcagatttttgtcctgagtgccatccaagtgtcaagtcttcagctgtttgctggaaacactggtgtcagccaagacttatttcccgccctcaaaagtagagggaaaatatagaaggctctgcgtagacagctaactacctgtgtgggttattgatcccaatcaggggagggacctctctctcgatcaaagtagcgttttcattttgtctcagtcattaaatatcataggaacccttgctcttaagtcagctgcagatgagatttgaaatccactctcgcccccagtttaggctcactgttaagtctgtgaggggggtttagatcttgtgggacctgaaacttaaataatttggggtgtcctcctgaggaaaaatgttataaaatggccctgtgaacacatatctggaacactggaaagggtccctataagtaaaggactctgaagcttaagattcattagtttcagggtaaatctgcctcctgcttattatgtcattttttttagcctttaggcctcctggaggactgagaattcctaggggcaggaaccttgtctgtgattcatctctgcagcctcc

SEQ ID NO: 1571 - DNA, 4001 bp, Homo sapiens
caggcaactcagcacccaccctcactcagccagccccgcataccacttctttctttagtagtggagtttccagcaccaacgatggtttttcggttttaacgccatcttttaggagtacctttgacattcaggagccggctgaagggaatcacagctaaagcttccctgggcaaaaacaaaggatgttacccagcagctttttctttagcagggctgagatgctgaagtgagggcgctcccttgctttgccctggtgagcacaaaacggtgtcatttgcacattgtctcgccaaaaaggaaatgtaactgaaaatacagaactgtatatattccagtggaaagagaagttccaaagataggactgctacgaataacccacggcccctataaaaagagttgctcagtccctttgaagcagacagcacagcatagagcagaactctgtcatttccctgagattgggtatttttgtctgtgtggaccattgtaggaggccaggttaggcgcacccctcctgcaaaccgctccctctccaagaagtattcctcagggcctaggcctaccttgatcctcaatttttggaaaatgtttacttttcacagcataactcagcaacctccagccccaaagatcacgagttaggttacaattccttcaaccaacatttagtgagcaactactatgtgccaggcattgttttggccgtggggaatcatggctggatgtagctgcgtcctgcagaacatatgttctattgaggaaatataaaaataaaaacccaagaaaagaaaacaaaatgttgacagatgtcaatggagaccaccaacacagcaacccagcgggaagaggtaaggctccaggagaggacaaagggtaatggaagctgtggacgcccccaccccaacatgggatacaaaatatttaaagcctaaggagtcaccaacagacattcagccactgatgttgttgcccaagatgaacacgtggctcaaacccacttaaacctcaatgttcgtaacgcgtaacaatcctcatgcactcacactcctcggaagcctccacttggatcctttccacacacactatcctctctaaagaggataaaggaggcctcttccagtccagtgacggggtgctgagtgtgtccaacaggcagggcgccagactaggtagtcccaagggggaccagggccaccgcagggcggggaaccctccccttggcccaagccctcctgaacgtccctcctgattctacgaggccagcttctcccgaggcgtgcgtattcctccaacacaccgctctatgggaaggaaaccccagccactgctgccagcaagcggggctgcctactgtgaaccttccacccgatctctctggtgctgccgactcggagggaggccccctgtgctgcccacctcgcagcctgtggattccggggctcctcccggcacacccgcgcagctgcgtctttgggacctggcaccgactaagccgctgcctctcctcctccggcgctcagccgcctgacacgcacacaccctcagctcccccgcgctcccctggacaacctcgaataccaggcccgggcattccagcaagtctctgctcgctcgtccccatcagcgacggcaggaagccacttgcgctgggtcttacctccttctgccaggacccagagcgacgcgcttcccaaaacgaagagcagagctgacaccttccacatcgttcccgttgagttgttgctctcctgggggccgagcagcaagattctgagctgggggaaaattaaaaagcaccgcggccacaggcccagcctggaggagcgcgacggtgggggggccggaggggtgggagcaggagccccggagagggagggtgcccgagcttcccagaccctaggcagccggacagcaaactttgcagttgagaactttccgagcggagtcagcatttatctctcccgaggaggcgggggagcggggtcggccgcaaggtggtctccgtccgggcgcgctaggcccgccctcgggctctgtttggccggcgccaaaacgatgatctcaggccaggtttaaagttacagggccgcagctgcgggggccgccaggactgcgggccctggcaaaatgggcttttattctgctcaacaacaggagggaaagggaccacatgcaacaaacggggttttaaaaattatatataaattttaaaaaacctatatttattattattatttttttaagagtaaggcacaagtctatgtttttcttgttatgggcagaagtgagaagtaaactgtttcttgagtggccagtagttttagaaccaagcatggggtttttcctgtaaatattgaatttgatggcttaaaaacaaaaaaagttggccgtcatctgggtgggccagaggcggcccgcgctggtcaattgcgcccttgtcccggggaccggagcgggcgggctccggggggctgccccagagctggctggtgggggagtttggcagaccgggtggctttggcagttttgaaaaagaggctgaactccatccgcctctgccgacccggggatccagcgctgcgatgctgtggcccaccgacgtgcgcagttggattaggccgggccaagcggtgacccgtctggtcgccaaacctgtgtccccttccaggcctggttcaccctctttattcctgagtttgctcccataatcctcactttactggtttaagcgatcttgccttgatctcaggtaccagatatcagcaaccagagaacttacgtcttttactttaattccttctgaattgctggaatttaaaaaaataagaacaggagtttgggaagtggtctctgctccactcccagatgccacaaattccattcaacaaaagaacctgaagactaacgctgtctcaaagctccacattgcgtgaaaattgttttcagatgcttatctttgacccctccccattataaatttactttctaagaatcacaggagagattgttttaaataaatgcccagtttcctgggttccaccccaaactcattaatcagaccttttcggaattcctattttaaaccagtgtcgctggagaacttgtccccatgaacatttggcaaaccttgcccttcatcatagcttctcagccagatctacctggggcactggttatgcaggtgcaattctgttgtgggatagggagagattctgcatttctaaagatctcccaggtaacgtcttgtcctggggctacaaacaggagctgagcacctgaacctagaagatgaggggtagcggcaacacccctagagccaaggagttggaaatgtaaagagaaaactcgtgatacagatactctttcttgaactgacttccccatcttggagatgcattttatgactctagtgtcaataatgtctgttgacaggaggaatagtgcattgtctgttgagcctgttagatggagaatagatgcacatctattctgcttatgtgtaactccaaggtcacacacagaaagaaagatggcccgctttattcaaaaagattgaaacacagtgaagcctaggtgggggagattgggttacatgcaactaatttagagggatgctgaggctaggtcatgattcaaggacacctgccttctatcccacacccccggatgtgtctagaatctagaaggttggtcacatgaccttttgatcaggatggaggagtgggaggtaataaggaattgcattcagctgggggtcctggggtggggagaggggccaggatgaaggagttagtggatcggctctgggtgctgttggtctgaaaacctagagagaaaagctgggtcttgggagggggaacctgaagaccagagggaagaaagaactcaccctcctggaccagatagagccagcagctcatgagagaaggaatatgggccttgggcagcgagactcggttagctaaaggagctgaagtgaaacacaggggatctggaagcat

SEQ ID NO: 1572 - DNA, 4001 bp, Homo sapiens
cgtcgtatttccacaagttataacctggcctgcctcctttccaaagccagaaatatgacaaatattcagataagccgatggaatttgaaagtgcatgttcattgctttgctggtgaggactgcagggcacactttagcatgtgaggtgtgcctctctcaaaagtgcatacagttcaaattctgcatctagtaacacaccaagaactcaggaaatgcttaataactatttgcagaatgaattaataaatcctattttaatgtattatgacaatttcattcttaaaagaacattatggggagcatttaatgtaaaggaattctcgtatctttagaaaattttgtttctacgtttaagaggcttaaagtgaggttaacctttaatttcaagttcaacctctttactttgtttttatatatatttttgagacggagtctcgctctgttgccaggctggagtgctgtggtgtgatcttggttcactgcaactgccgcctcacgagttcaagcgattcttccgcctcagcctccaagtaactaggactacaggcgcgcaccaccatgcccaactaatttttgtatttttagtagagacggggtttcaccatattggccaggctggtctcgaactcctgacttcatgatccgcccgcctcggcccctcacaggcgtgagccaccatgcccagcctcttttttttttttttttttttaatggcagagtagtgtagtaaaaagatcttcaggtttgaagttagacatatttttcaaacccagttctggtatattccgagataagagtatgtaatttacaggtattatgatgattgaaagaagtagctagcaatattcctagcacatggcaggcgatgggaatgagaggatggttgtgtcctttggcctgaccctccactgtcttgccaaggcttgaggtccttataattctacagtgtagagtcactcgcgtgctgctcattttacagaagccaaagaaaggaaggagtttagtccctttggccacgtccagacttagccttctcatgcccggacacattttttaaattgtgcttttctatattcaatgctattttggatcttatacaccagtgcaatgcagaggcctccctcacaaagcctctaacagacctgatctttattaagtgccttcagtgcaacaaaaactcttaacaactcatgaggatttcagggcctccaaactggcaagcgtttcggggaaatcacagggaaatttgttggccgcatgattaatcctgggtggattggtcccggaaaagcacatgtgggttagcagcgagcagcagcttgcagaatctcacaaaataaactctctaatgaagtggcccccaaaacgtgccttcctgatgaaagttcagcatgagggtggcgcctgacaatggaaaaaaatgccagatgtgtggacaacagacctcctttgaatccactaacacccaaagggatgacacatgggaccagattataaaactgaaccagattataaccctggaggagggaaacccagtagggcgtaggatcttatgaaaaggatcataaaattcatcaccataattaccccccagcccagctccccaacaaaagcccacaatagcttcgctcaatgatgttattcatccatattcaagtcgcctcgctcattattctcagacaaaaaccctgctgggcctctgctcctctggcagccaggcaactcagcacccaccctcactcagccagccccgcataccacttctttctttagtagtggagtttccagcaccaacgatggtttttcggttttaacgccatcttttaggagtacctttgacattcaggagccggctgaagggaatcacagctaaagcttccctgggcaaaaacaaaggatgttacccagcagctttttctttagcagggctgagatgctgaagtgagggcgctcccttgctttgccctggtgagcacaaaacggtgtcatttgcacattgtctcgccaaaaaggaaatgtaactgaaaatacagaactgtatatattccagtggaaagagaagttccaaagataggactgctacgaataacccacggcccctataaaaagagttgctcagtccctttgaagcagacagcacagcatagagcagaactctgtcatttccctgagattgggtatttttgtctgtgtggaccattgtaggaggccaggttaggcgcacccctcctgcaaaccgctccctctccaagaagtattcctcagggcctaggcctaccttgatcctcaatttttggaaaatgtttacttttcacagcataactcagcaacctccagccccaaagatcacgagttaggttacaattccttcaaccaacatttagtgagcaactactatgtgccaggcattgttttggccgtggggaatcatggctggatgtagctgcgtcctgcagaacatatgttctattgaggaaatataaaaataaaaacccaagaaaagaaaacaaaatgttgacagatgtcaatggagaccaccaacacagcaacccagcgggaagaggtaaggctccaggagaggacaaagggtaatggaagctgtggacgcccccaccccaacatgggatacaaaatatttaaagcctaaggagtcaccaacagacattcagccactgatgttgttgcccaagatgaacacgtggctcaaacccacttaaacctcaatgttcgtaacgcgtaacaatcctcatgcactcacactcctcggaagcctccacttggatcctttccacacacactatcctctctaaagaggataaaggaggcctcttccagtccagtgacggggtgctgagtgtgtccaacaggcagggcgccagactaggtagtcccaagggggaccagggccaccgcagggcggggaaccctccccttggcccaagccctcctgaacgtccctcctgattctacgaggccagcttctcccgaggcgtgcgtattcctccaacacaccgctctatgggaaggaaaccccagccactgctgccagcaagcggggctgcctactgtgaaccttccacccgatctctctggtgctgccgactcggagggaggccccctgtgctgcccacctcgcagcctgtggattccggggctcctcccggcacacccgcgcagctgcgtctttgggacctggcaccgactaagccgctgcctctcctcctccggcgctcagccgcctgacacgcacacaccctcagctcccccgcgctcccctggacaacctcgaataccaggcccgggcattccagcaagtctctgctcgctcgtccccatcagcgacggcaggaagccacttgcgctgggtcttacctccttctgccaggacccagagcgacgcgcttcccaaaacgaagagcagagctgacaccttccacatcgttcccgttgagttgttgctctcctgggggccgagcagcaagattctgagctgggggaaaattaaaaagcaccgcggccacaggcccagcctggaggagcgcgacggtgggggggccggaggggtgggagcaggagccccggagagggagggtgcccgagcttcccagaccctaggcagccggacagcaaactttgcagttgagaactttccgagcggagtcagcatttatctctcccgaggaggcgggggagcggggtcggccgcaaggtggtctccgtccgggcgcgctaggcccgccctcgggctctgtttggccggcgccaaaacgatgatctcaggccaggtttaaagttacagggccgcagctgcgggggccgccaggactgcgggccctggcaaaatgggcttttattctgctcaacaacaggagggaaagggaccacatgcaacaaacggggttttaaaaattatatataaattttaaaaaacctatatttattattattatttttttaagagtaaggcacaagtctatgtttttcttgttatgggcagaagt

SEQ ID NO: 1573 - DNA, 4001 bp, Homo sapiens
gatttctgatggtacacgctgtgaatgatagagatactggtggcatggaggtgggaggctgatttagaaagtccttcctgggaggtgacattttaattcataccccaatgacaaggagctacccttcaaggctccaggatctaccttatacttggccaactgaaaaagacattaatgatgatctggtctcaacttcttatttgtaagtgagcaaacagaggctcaatgagattaaaagactaggacaaggtttcccaagtgactgcaatttgtttcttcttactattctacagagactttcgatatacacatttgaaatctaggcatcttacatcgtgtttttaacatattcatggttttttgttttttagacaggatctcagtctgtcacccaggctggagtgcagtgatgcaatcacggctcactgtagcctcgaccccctgggctcaagcaacccttccatttcagcctcccaagtagctgacaccacagacacatgccaccatgcaggattaatttattattattttttgtagagacgggggtctcacttcattgcccaggctggtctcgaactcctggcctcaagtgatcctcccgcttgggcatcccaaagtgctgggattacaggcatgagccaccatgcaggaccacacatttgtacttataattttattttcagtacactcttggggaaaagatgacagaccttcacttgatcaataatgaaattgaggctccagttggctaagtagtttgtctaatggcctgtcactagcaactgaatcaaaactctgatgatttgtattccagtcctatgttctttcccctgggggagaagtagctgcctagccagtggtctatgaatataagacatcattaccagcaacttcacaccctatggtgcagagaacatacaaaagtcaaagataagcacaagttactatcataacacagaaattcaaagaccctgagtaatttgctgcagacttcagatgactggacaatcatggcctgaggcagtccctgctaccccctcttgccttctagatacaagactgaaagctgccctggtgacacattgcagagattttagtaaataaagaagaatgtgtttctcagagccaacgcccaaatcttcatagctggacccaacccagaccaggagtcttcatagcgagtgaacccttaggtaagtgtcatacttaagtctcatgagtcttctgcttaagaaataaactactagtggttcccaaacctacctgcactgatcagaatgattctgggagagttttcaaataaagatctttcaattcacacaaggcctggagacttagaaatgccaaaggtgagagcctggggaatgtatgttttaaaattcagccagcctggaaatccactggtttttctcatgtcttagtgctgcagtgtgatacagagaggaaagatgcctgcttttattatctagtgggcaagctaagttaggctgcatcctttaaaggctgcttccagaagagtcttctctgctacccaaggcccctgtatcagtaggaaggtcccgggcatatccgcctggttacctgtgaagtcagttgtctcactccctttggctgcacatcaaacccccacacaaccccgggaaggctttttctgaggtcggtttaccaatttctttgtgaagcagaccctagcctacaaaggtgaggggcatctccagcagaaagaatctcagagcgtggatcatctctcacccccaaccaccgccaaaggggcctggctgcctccccatgggactcttctctgccctagacagccagctactggcttggaaaaagaaaaagggaaaaggaaaagaaagaaggtagttcaggccccggtggccagcaccctcaaggaggacacgagcagttcttacctggagatggaagaggagctgctctgttcgttcactcaggaattctgtctctgcaggtgagcattaagcttgcaactcactggactttgaacaaagattgatttaaaagctaatgtatttaacagggacatgtggtctgaattcaagtgacctctgtcctgcttcctgccagctggctgggccctgagctggaaaatctgacaaacctcagcaaaccaaaagctctggcccacctgcctggccctgcggggaggccgctgctcgccagccactcccagagaacaaggaggggagagggggtgaaggacagccagggaggaggtgcctccgctttccttggtactctccctttggcagataccttggttacacccaaccaacccccaatcctgttaggatcctccagtcccccatcctggggtcagggccgaggctcatacaggagtatcctcaatcactgaggcctccccaaggagcagtagcctataaaactcccacccacgaggccagtaagccccaggaaatggggccaagcactcagggcacccatcctgcttccctctgccctggattctcacttgtgtgctccctaggagtttagcaagcaaagccctagagcaagcaaagcccttgttcttgtgtcccaggcttccttcttcttatccactctctcccctctctttttttcttctctttctcacctgatggtgctctttctattctccagcctagcgataattgtcttccccttcacacactcagagcctctcgggcaagcccagcagggtaggtggaaggcatttttacaaacccctccatcctgctgccttgctgcccgagcagtaggctggtgcccgtgtgctcagccgctagccctagccatgatcagcagctgatccctatcagcagcacccacacagacaattctatcactggccttctcactgacctgaatcctcagcccacaatgcaaatcagggcaagagattgctcccggcactgaggcaaagcaaaccacaggccgaggactgggtgacctcacccctcttccacccacactggaagagccatttgtctttgctgggccttggcttggcccccaacaaagacatgacctgagcccatggataaacggtttaaaatgacattgagcagcttcctcataccagcttatcttcctccacctcggggctaagccctcctggcctcctctatatctttcaaagcagaaggtagaatgggaaaatctggatttaggatcagaacacctgagttcatcgcaatcccagcaatttgtgaggccaaagcgggcagattgcctgagctcaagagttcgaaaccagcctgggccacatggcaaaaccttgtctctacaaaaggtacaaaaagccaggcatggtggtgcatgcctgtagtcccagctactctggaggctgaggtgggaggatcacttgattgagaggcagaggttgcagtgagccgtgatcatgccactgcactccagcctcaatgacagagcgagaccctgtctccaaaaaaaaaacaacaaaacaaaaaagaaagaaagaacacctgagttcaattctgacgccaccatttcccatttcccaggtgtttgatccagagtaattcatttttaactctctgggtctcaccttcatcatgtataaatagttgttattgtatggtttttagaaatttttaaaaattgctgttgttgttgttgttgtttgagatggagtctcactctgttacagcccaggctgaaatgcagtggtgcaatctcagctcactgcaacatccgcttcctgagttcaagtgattctcctgcctcagcctcccgagtggctgggattacaagtgcccgccaccatgcctggctaattttttgtattttcagtagagacagggtttcaccatgttggccaggctggtctcgaactcctgacctcaagtgatcctcccgccttggcctcccaaagtactgggattacaggcctggtgtattccttttgtctctggtttatttcattcaatatgatgtttgtgaggttcactcacgttgctgtgagtagctgtagttca

SEQ ID NO: 1574 - DNA, 4001 bp, Homo sapiens
attcccccagctgggtgcccagggactagggccagagattaggttgaggccccaacctgcacccttctctactttttttattttttaatagagacagggtcttactacgttgcccaggctggtctcaaactcctgggctcaggcgagcctctggccttggcctcccaaagtgctgggattacaggcatgagctactgcaccaggtcccttctctgctttttgacccttgacaccaacacagtccctcaagattttcctgaagtccctgccttcaggcctctgcttccccaaaggactttcctcttccccagcatcactgcactccatgagcctgcaggagctcagccttgtagagaaaagaccctcagcggggagaagtcccaggacaaaacacaggtcagcagggggcttcagaggggtcctgcctccaggccagaatatacctgcatccctatattttgagggacccaagctggacatgagaaaaccttcctctggctcactcctgctcaaatgtcctcctttgagtctaccaaaagctctcctgctgcagtggaggcctgacctcttctccgagcctggcaaatattgggaaggaggaaggaggctaggaactctctggcctgtagtgaggtcagacctcacttatctccaggggaagcagaagacacacagtgtgattaccctcagttccacacctgccaaaaagcagtatttgggagtcattgtttccctaggggttcagactgctccctcaggtcagtggttgctcaagcatggggagttagggctcaacccttggaggcccctccctgtttcctcctagaccctgcagccaattctctccagtcaccccagggaccacagtccctgctcctcctcccatgcacatacagcaaggggcagtgtctggggcaggagaaaggtggtctgaaccctgtcctttcttgccgtgctctgtgactcaacctctctggtctgcagttccccagagggcttccaagacctgggagacagagttgaagcagacacacataagagctcggggtgggggtgggaggggagctctgaaagcatctttgccagtcccctctggaccaagtcccacctgcagagtccccagactttggctgcagatgcagcctgacagtgtagaatgaaagccagaccttgggttagttacttcaccaggtgcaaagcccttcttcacctctgacctggcagcagccctgggaggtgggcagggtggggtttattgttctcattttataggtgagaaaactgagtctcaggaaggggcagtgatttgctcaaggtcacacatccattcaggcagagcaggacgaagaggtcagatatttgggggagtcacactgggcactgttctctatccaagcccaagaggccgagacaaagcccaagtctttgaggggtggcttgggccccactctcaccctacttgtacccccgggtcccctgtactcaggacccagccatcccttgggcaatgcctgctcttggggcttgggcctcaaatcctgttcctccctgagatcctagaaccaactgctgccagttttcactcgttgaaaacaagtgacaggcagagacttggttcagaggtctctgccttgggacattctttcagctagcgcagtccctgctccccctccaaactgtaagtatcaaggccctggggaggggagccagaacaccacctgtccacccctgggtctcccgtgcccagccctctcctcctgagctaccttgctgacagctggcaggtggcactgccgtgagcaggcccagaatgaggaggctgagggccgacatggctgcagcagctcctagccttgcttctggccgccggtgtctgggctcctggagctgctgtggagtctattggtgtccgcctgaaatcaacctgggctcagtctggccctggaggagaggagctaggaaggaggaaggcgagggagggaggagacacgaagacgggcgtcggagagaacgtgccctccctcccatggtaatgagctgccagacctggcctcccctggctggtgcccagctcacttgggctggcattcgaggtcatcttccaggggccagctaaggaggtgggtatgaggaacaagcagatgtgggagagtcccagcctcacctccatgccctgagctcccttttcctggcagtggggctggattctagggaaaggggtgacacacagtcgctcctgccttgactgagcccagtgggcggggcttcttggaaggctgacagtgggattaagaaatgtcctggctggctcaggagcctggggaaaaccccagaagcccagagaaggctcaaagctgccagactccgccgagagcctggcctatttcctgttctccccaccacctgcccctgccccgccaagctaaactctgggactctaatgctgggacacactacggcttcagtgccttccacgccctggcccagcccagtagcttcctaaatccacccccttctgcaaagatctcaatagagggcctgaaggtcccagtccccagctttcacagcccatgcccaggccctgacccagcacagctaacctagtcccagttcggttcttcctcttggccccagatgtggtccctggaaaccgggcagggcctcaaaacaagatacagccttggtcagaggcttcaacacccaacttcagatccatctccacccatggcagaggagaaaatgggcaaacacagcctgctgtgggggacaaaggacggacaccccagatggcaaggtgcgatctggggccctgaagccctgggcccgtcaccctcatagccaaaagcagcattgaggaaggcacacctagcccctggaacagggaggccctggagccagagccctcggaagaggcaaaagcctccccaggatcacgtggtgtccacctggccctccagctcagggaatgagaatggccagagttcctgtgcaagcccctgaccaagggtcatgctggtctccttgccccaccccccaccccagaagtatgggaagctgagatgctgactccctagaaaggagcgggccaactggaacaaagtctcatcagagatggaaggtccccaggagccagcacctgagctgaaggcacctccacagcctctcttccctgaagccaccaaactcctattcatcaggcctcctgggcaacccttcctatggcaggttgattctgccttcctgctccagcgggagcactcagacatcatgcctcaggcctgcttcctgtgtgtgtgtgtgtgtgtgtgtgtgtgtgtgtgtgtgtgtgtgtgtgtggtgtgtgtgggtgtgtgtgtgtgtgttcacatgcgtgtgcagtcgggcccattgccatccaaagatggagtgtctcaaggtgatctgggagaactttgcttggagttgagtgatgcctcccaaacatgtatatcctggcctccctcccacacccaacttggtgtcctcagaatcttctaacacagactggagtaagcactgtgcatgttaatgaacagccagagaatcactgattggaatgtaaggaatggggctgaatttaacaaacatctactggtgccttctccaagaattttagggaggagagtcacatggttagttttgcgtttgggaaaacacctctccatgcagtgtggagagtgaaaggggcatgcaaaggctggagaagagaaatccagggatctgctacagtggccacaacaccagtgcctggacctgggcaggaagtgcccatgggaacagatctgagccctgttgaggaggtagagaagccggggtgtggctgctggaacacagtgccaagctgggagaatgggtacaggcaggaggcagggcttcaggtgactcccaggtttctggcgtaggcagctgggtagatgctagtgcctcagtaggggccagagcaagtttggggggttggaggattaatgagctatagattttga

SEQ ID NO: 1575 - DNA, 4001 bp, Homo sapiens
gcatttcctttctacttcatctttcagtctctcttttcctcctttctataggctttcaccccttctagcatttcctactcacctatccaacttagtggtagccatgaatacttaggactcctgagatctgtgcttcactgtccccatctgaatattcggagctgcaattaggaaggggtgagcatccctgctacaaaagacagagtaagtttggtcggagtggcttggagattcagtggttggctgcctaccagctggtgaagatatccatcatgacattgtgcgtgaggatctgtgtgagagagtgaggcgctctgtgattctgtgaccctcttcatgcatgataatacatccacacatgatgggcacggaattgaggaagtaggcaaccagggaagcctgcagcctagggcatcactggcaatttccccaatggagtatttaaccacaaagggaagagcaattaaagctaatcgctctgacagcctggggcccagacacacgtaccactttccctaactcccagtggtctcccccaaccttcatcctccctaatttgtttagtgcactctcaaacactgtttgcacttctctgaccatctctttctctcacttcctccctctccctggttccctgactatctctagacctctctggagatgtctgtctgcttctcacacacattcctctcattctctctctgacttgggttccattcttggctgactcatacccattctttttcctctccgtttcttccaccccctcctcctccatcccttggccactcttacccagaaactagccactcccagcacgctaagccctaactggacccaggaagagaagccaccagaagcccctaccctcattagtccgcaaaatcctgtctccttgtgttagaggaatgagaccaagattttctcccatctttccccacagttttaaagaggaacaatctgaaaccatggggctgggaaaagctgccagaaaatcaggatggatttggggacagtggccctttctgtccactcagctgtcctgtcggactgatgacttggagcccgcagttcagaagactcctcatgggatgccccaccccacagagtgggggtgtggtgggcggccggatgcgtagtccagggacgtttgtgatttggagtgtgctagactatgtgtataagtcacatgggtgtgtgtcactgtgtgtgctggcgtgccttataggtgtgcgtgtttccctgtcagttttgacacggattatatgaaattaataagggtttttacgttagatatacatcacttctctacacccccagctcctccttccctctggacaagctttccgccaagcccacctcttccccaggtgcagtgagctgggggtgagggcacatggtaccagccgcccgcggaaccgagacagggctgggccgggagaccgccagcggaggcgagtccgaagcctgagcggggagggaggggcgggcgctggcctggccgagccggctgggcgggaagcaggctgcatcctaatccacaggccccggtccgactcccaaactgccgttcagcgtggaacgggctggccggagccacgccgcctccagcacacgctcggcgctcgggacgcaccgaccgagggacggaccccgtgaggcctgacacaaagtggactcgtccggggtccccacactccccgtctggcccccggtgtcccagatcgttgcccctccaagcctagaccccgaaatctgccccttccccgcgacatgtctcctctccgcccctctcaccgcctctggagctgagcgctcagggcgcgggcactcctgagtccccggttcctaagcagcgtccggaacctcctcctcggctcccgccgccgccgccgccgcttctgccgccgccgccgcctcttccgcccgcggagccggagcccgagcccagcgccgctcactccacccggctggccggtgatgtcagagccggggaggggcggggggcggggaatggcgggaggagggggagggatggagaggcaggagggggcgggggaccgaggggctggggttctggaagactcctaggatgggggacagaattgggcggagggctggagcggagacggtctcttccccctgaactgcgaaacaattctcatatttaattcttacccagtagggcaccctcctccccttttgacctttggatgaccacggtgcctaggacccctgggaggcacagagtaggtttggtttagggggttggaaagcctttgggggctggattctcttagctgctggctttaatatttgtaaaaacttcttgccttgccttaagggtcaggggcgcagtggaaaatgactgatcagacttatccacattgggagtgaggggttggggccacatggggacttgaggagccctggatcttctctttccaggatgatgccttcaggccctcttgcgtgcctctcacctttcccaaacatgccccactcctgccttccccctaccatgatgtaattttattttctggggagaaaaagagcagcagtgagctcagcatgcaaatatagacaacttgcaaagccacacttagctccatctcctagctctgcccctctgcccaggcccaatgtggcagctctcacttcccctctaccccagggactttcctcccccagattctcagccagactgaaaagaggaaaggaagaattggagaagcatctgttttcacccccatctctatagcctaaggggtcttgcctcagctctgggcagggtttggccctggaaagaagtctgaccctgggtaggtccttcctgccaggaactccagcaggcccaggttgggggattcccctcagtgtttgtgccacttccaggatcacccatctcatctcagttcctacctggcagagactcctccagaaacctcaaacgagcccctcctttcttgggtctacaccattcctagaagaggcccaagttcctgctgctctgggtttcatagcatttctctgctgtttcctctccccagcattccctgtcacacactaatcatttgcctttgtatatatcatgtttgctctgtgttgtagggacaaaaactatttcgttgacccatctttgagactcatgtagtttctaagtgaaaggctcaggtctggaggcaacaagacacaggggccttgggctgcgtgctagttccacccattccttgggcaagttatgcctgaaagccttagtgtcctcaccggtcagatcagggtgccaatgtctatttctgagggttcttctgagattcagaaatagtaagtctctagggactggcacagatgggtgcttaaaaaataggagctattatttagaccggggccttccactgacctatgctagacagtaagctccacaatattattgtaagactagcttagtgcccatactacttattaaacatttattaaatagctacaagttggaatgaatacatagtttctgctttctacacccctgccacattctctaggaacacttcctggacttgtctgtggagagtgaaaatatatctaatctcaggtctcatctttccgtacttagaaatcctctaagtctctcagcaacaactttacacctgatccatgaaaaatataatgttggcttggcgtggtggctcacgcctgtaatcccagcactttgggaggctgaggcaggtggatcacctgaggtcaggagttcaagactagcctgaccaacatggtgaaaccccatctctactaaaactacaaaaaagttagctgagtgtggtggtgggcacctgtagtcccagttacctgggaggctgagataggagaatctcttgaacccgggagtcggaggttgcagtgaaccgagatctcaccactgcactccaacctggcaacagagtgagactccatctcaaaaaaaaaaaaaaaaaagaaaaaaatatatatatatacacacacatata

SEQ ID NO: 1576 - DNA, 4001 bp, Homo sapiens
ctgtctccgcctcctttttgttctatccctaggtctctgctctatttttctaggcctgcttttctccctccgggcattttgttgtaatgagtctgtgcctctgctgtgtctctgcatctgtcagcctctgtttccgtatttatatctgtctctatctctgtctttgtgtttctctctctccttccctgtcttctctgcctcttccttctggcttctcccctgtaggttagatgacagaagccaagatcctccccaaagctaggatggcaccccagggtcccccatgagtcctgggaggcctctttctcaaggctcccaaggctcctcagaggagaggcttggggaatgccgtggtggaggctccacctggcctcagcctcctccccagcagtgtgtgtcgggtgcggggaggcacacagcagccccatgaccttctatctctctccaggtttccgactggtggatgaggctgcctggagcgtgagtttcctcttctgggagagtctgataggagatgttgaggggggacagagggtggaggaacagatgccaactctcagcttcatcctccagtggagagagaggaaggcagagaagtgagtctggccaacccagctcctagagatggcagccccacctgcagtggggaacatggtgggtgggccttcggaggcctcaagagtgggagaggccacacagcagggaggagacacaggagataggagggctgcgcccacaccctggcttatgactggctcacaagcacacacaacaggccctataccatgagctggttttgagtggggttcagagatgagctcccccgtctccaaccgtccccctagcacaaggccagcttaggccagggttgagagctgacacccggcccaatcctgcccgagctgagccctggctgagcctgggaacctcaggccagcacaagctgttcctgtccccggggactagggtcacagcccagccccaggagaggccactcataacaggccagaacaggggagtggagagcagctactggaggctggagacgggggtgggggtgaagggttgccttgctggggcctgggctcctggaccccccacacacccacctggcccttagcacaacttcagatcatcagcctgccaagttttctgaggatccagttgcccgggacctcaagctgaacccccagtcctcataactggcaaagatgtgagagccagggacctgcaaacctgggtccttcccctacatcctccctcaaacattcctgccgctggacagagagatgacactgataatctgtttatctagcgtcattcaaagcaggagacacgtttttgctcacttaagcctcacaacccatgaggtaggccctatattattctcctttagaaatgagaaactgaggcacagaggtcaggcctcttgaccaagaccccacagacagtaagctgcagagtggagggtggcacttaggcagtcttggctccagtgtcgatgctcttgtggctacacttcccttgcaagccaaggacagcacccagtcttctcttcccagccctgggagggggcagtgagccaggctgcccctgactcacaaagtccggggaccaggggcttagggaacaacctcgctagcatttcatctcatttacatgttcattacggaagggaacccccaacccatcctctctggccccctccactgtccccttcccctccttcacgtctctctccatcagtccctcttttctacactcctgggtctggggcctcagactccagtcgaggagggggacctcagggaccgcaagccctttccccggggcagggtggtctccggggccgcaccaccgggcctcccctgccagggggcgcgcagtcactcacctgccttggggccccgtctcccctgcggcctggggtaggaaccgccggggtctgcgaggaggaggactggacagccgaggacggggcgagggtccccacttcgagccccagcctgactgcgggagcggcggggaggcgggacgctgctgatcgcagggccgggaggggcgccgaggggcggggggcaggaagggggtgggaactcgggccctcgccaaggcaggaagttttgacaaggaaacaggagccgggggaggggagatccaggcgcccgggagggaaaactgtattctgggtgggatcacagaggccgactctgcgcggcctgggccaggagcagagggggataagaaggggatgaggaggggaggtcagcgcaggggcccagggccccagtccctccctagcttcccctcgttgtgcggcctgggttacttaccctctcgtgcctcagctttcctatctgcaaagtggggttgtgggaaggaatcaatgagatcgcctacgtcgggcactgtccagtgctgcccagcaaccgtgatcttattaagacccctcccgggcaccgcatcccactagtctcggagaggctgacagggcgaggcccccctctcctcctgccgcccctaatcgcactgcggaaggccgggcgcggtggctcatgcctataatcccagcactttggaaggccgaggccggccgatcgtggagcccagagtttggagaccagcctggccaacatggcgaaatcctgtctctactaaaaatacaaaaattagggccgggcgccgtggctcaggcctgtaatcccagcactttgggaggccaaggagggcggatcatttgaggtcaggagttagagaccagcctggccaacacggtgaaactccgtctctacgaagagtacaaaaaaaattgccgggcgtggtggtgggcgcctgtaatcccagctactgggggaggctgaggcaggagaatcgcttgaacccaggagacgaaggtggcagtgagccgagatcgtgccactgcactccagcttgggcgacagagcacagctccgtcaaaaaaaaaaaaaaaaaaaaaacgcgccaggtgtagtggcgcgcacctgtggtctcggtttactggggaggctgaagaggaaggatcgcttgagcctaggaggtcgagactgcagtgagccaagatcctgccactccactccagcctgggcgacagagcgagaccctatcttaaaaaaaagaaagaaaaaaaaaagaaaagaaaaaagtcacaccgcgggagggtgtgaccctgggaagcattctccgcctctgcccgccccgcctccggcccacacccaccagcgcgtaagcaactcctgagcccaccgagtccggtgcgagcgccacctcgcggctagcatccgcttcccagagccccacagccgggggaccagacctgggagcccttccccgcctgatagcaatgaacattagctttccccgcctgatagcaatgaacattagctttcgccgtggtcagcccttcaggcgtattgcctcattgaatccttcactcgagattggtttcatcattatgtccttttacatatggcgaaaccgacgtcctgagcggcttaggacactaattagtggcagaagcactatttggtttggttttgagacggagtcttgctctgtctcccacgcacgatctcagttcactgcaacctctgcctcccgggttcaagcgattctcccgcctcagcctcctgagtagctgggattacaggcgcgcgcccacacgtcaggctaatttttgtatttttagtagagatggggtttcaccatcttgtccaggctggtctcgacttcctgggctcaggcgatccgcctgcctcggcctcccaaagtgttgggattacagacctgagccacggcgccccgcctacaagcaagatttgaaccgaggtctgtggtgcgtccaattccagggctcacactccacctcctcacacagagagccacagagtaagcttaggtgaggagagcaaagcagtatcatccctcctgggagacttttaaaactcaactgtattgaggtataattgacatacaataaaaaa

SEQ ID NO: 1577 - DNA, 4001 bp, Homo sapiens
ttatattcctttctggatgatttacaatgtacattagcaaattaaggattctgaaatagcttgtggtcaataaacttattcagctatacttaagagtatttccaaaactttagttaactacagaatcctcctatattaacaatatctattaaaacctcccaagactcagcaaatggaatggactttaggaagcaactgctatgctacacttcctaactccagcccgcactggcctctctctttcctacctctctctaaggatgcaataagagaagtcctaagctctggtcatggcctcaccctcacttactacgtgtgacttttgggaagccacttaacctctttgggtttgctcctcagcagttaattaggggtaataatacctgcatgccgatagggacttcatgattaggataatggaggtccaaacactgtgtaacccgcacaagactgcactccctggaaggactgttacatcttttggcctgtgactaaactcagttgagcactgtgtaatataccaattgatcttgttttcccacatttcgtttatggatttcatctcctaaataactgtgtgatcgcagccctctgtgggcttcatttcctcctctgtaaaatgagggctctattttgaggaccctccgggcactggccttttagaagtctactaaaaatcaaaatgctaaagggcaacacatgttacacctcactatgtaccaaacgcttcgtaagcatcacctcctgactctccacaacagctttatgaggcagatcctattattcggccctattttacaggcggaaacttggactcagaaaggcaaaacagcttgctcaagggctcacaactatttaggtggtagagctaagatatgaacctacctctgacaccaaagtgcacttcaacaccctactatcacccaacaaagaattctggccacagaatcaccttgctgcggtattcctgactgaatcaagatacgctggggaagaggcatctgaagatagcccgggttctgacctcggccctgctgcctaactgcctggtgacttcaggtaagttctgtgtcttctcggggttcacttttctacacgcgaaatggcggtgttgaactaagtcagtggtcaaaccagctcacttgtggcgcctgctacaaccagagtttcctgatgactctgatgcagtgtggggtgggtccggaagcctggatttttatccgacgccccaaatgagatcggcggaaccagaactctaaacctccggtcatggctgatgcccccgcccaaggcccccatgagggccttgggaggctgtggagcccaggccagcgccagcctggacctgtggggtccaaggtccccaaatcctcgagtgagcgacgtcaagggggcgcgacacgacctcgcgaatgtgcggtccttcatgacgtgagcagggcgcgaccgacggtcccttttcggttctctacagcgcaaggcctcgctgaagcgaacccatcgtgggaagggcgcggagaaagcggggagaaagagcagggggacgtcgggcctgcgcctggcaccgccgctacctggattcgcgggcccctcacacactcacctgccggtaaggatagctggccatggtgattctgacgtcacactcaggcaaggggtggggctttccgctctcaaacccgcccctcgtctcggctttggggctgggcccgcatctgattggacgtccgcgcctgtcaatcttgggtgctgtcggccgacggaagtgacgatgggggcggtgggcggatgcctacccgagagaccaggggagctaagtgattgatggagcttccggaagtcttggcggctgtaccagcgctaatgttcctccttttcctgaggtggagtgggccgaagaggtggtcaggttgggaaatttagtgagaagcctgggtggggtgttgctgcggtagccatgttataacctggcaaatgggacgcatgatagtgacgtaattgctggagtagctcctgagtttccgcagatgagccgcgggaaaggagacgaggggcggtggccaggcggttgccctgacaacggggaaccgaccgactcttcccggtagggagaggcgatggcggaattactcctctaatgtcaaggtactgggtaccagttagtacccttgtagtgggatacagatctgtggtctttggagaaaaaaaccccagatcattagagttggaggaaaattgaattatctagtgcctctttcttcataaatggggaaactgaggtgcagagaggcagttgccttgccctagctcacagtgggtcgcctagaaccggggtcaatggatgtccagttctcagcagggaggtctaggtcggtccccatcgtaggtcaaatcctggtgaccgagtgatctcagcaccatgtacttgccactcagtggttccgtttctacacttatttgtgtgcttatttgatttctttgtcaagttctttcatgtgggctagggttttgtctgtttttgcttgtcattataactccagtacctagtatagcgactgacacgattattaaaataaatgaataaatgaatgttacgaactgttatccagtctagtccatctatctaaccaagtgcactttccaaaatcacagtgctgatcatgccacttgcccactacacagcctacaatggatgctcttcatccacgcctacaaaataaggcccaatctcttcattctggtactccaggcccttcagaatctggcccagcctcaactttccaatcttacggccccttctgctactctgtatttctgtgctcagttccaccattcagcacttctgctttggagggaggatctttgttttatcactttctaactgtatcaccttaggcaggttttttgtttgtttgtttttaatttccaacttttaagatcaggggtatatgagcaggatgtggtttgttacataggtaaatgtgtgccatggtggtttgtcgcacacatcatcccatcacccaagtgttaagcccagcatccattagctattcttcctgatgctctccctcttcccacctccctctacgctccgacagaccccagtggtgtatgtgctctcctcattcagctcccacttataagtggtaacatgcggtgtttggttttctgtttctctgttagtttgctgaggataatggcttccaattccatccacgtccctgcaaaggacatgatcttgttccttttttatggctgcatagtattccacagtgtatatctaccacattttatttaggcaagttatttaacctctctaaatttcacttttcttagctgacaggaacaaatgtgtaaatttgaaaatgagcttattatacctgctcatgccccaaacttaggttcaaaccactcctttcacctggaccagcagccctcccaactccagtcctgcaaggctcagttccaattccattctccacctaaccctcccacattccccttagctccagagttagccactctctcttgccactccccctttgcacttggtactgtcactgtgtggtattccagcctgccttgtataagagttttcttttggtgttttccccaaaacccattcctctccatctcagaaaatccacccagtctctcaggccaaaaacctaagatcattcctgtgtgtcctttttttctccacacactccctcacctccctcatctccatttgctctaattcaaacatgtacacatctgctcttttctccctgttcgcactatcactgtagtccaagacactatcatccgtgcctggatcactacaatagccgactgaccaatgttcctgctctcactcttctccccacgcttcattttctccacaggcagccagagtggttatcttattccttggcttcaactccctggggacttcccatcactcttataataaaagctaaactcatcctaatgacattcatggccacacataccagcat

SEQ ID NO: 1578 - DNA, 4001 bp, Homo sapiens
actctgtcattcaggaacatatcatatatgaagcactgaggtttgtgctaaagagaatatggctttaatgaaatccctggaaatgtcagagagaaaaagtgtttacaatggttcatttttagtttggtaaattcctgatatatcattactgcatttttatcattattattttttagagacagagtctcgctctgtcacccaggcgggagtgcagtggcgtgatctcggctcactgcaagctccgcctcccgggttcacgccgttctcctgtctcagcctcccgaatagctggactacaggcgcccgccaccacacccggctaattttttgtatttttagtagagacggggtttcaccgtattagccaggatggtctcgatctcctgacctcgtgatctgcccgcctcggcctcccaaagtgctgggattacaggcgtgaggcaccgcgcccagcctcattactgcattttgaaagtatgtgtacggcatgtaaaggtaactatttcgtggaatgcatttttttcccataacttccatagaagacaatatttctttaaaaggtcagccttcaaaatgtgcttatgctaaactctactctcttgcaacacatgagcaaaacattgcataggtattatacactattatacagataaagttttcctggtctttcacatgtgaacaattaagacacgaatggaatcggtgtagatttgctcatcttccacaaagcaccagaaaaagctcaaattatttgtctgactgagaccccactgaccactcctctggctgcttgtatgagtcctggtgcattcgtaggatgaaatttctctccggcttgtttaccttgaacgctgtggacacagcggagagcatagttgagggcatctagagtgcttggtttattgcgtctctccgaggggaagtattttttcatttcttggacaaccatgataagttcttcagaaactctgtttcgatcttgctgttcactggaagataaaaaaaaattacaacttcatcctctgaagacaacagcatcttgcggcttagggaacacaaactgcaagccaggtaagtttctaagtgctctaccggcatcagtccacagggtggtgacccctcttcctctaggtggggaactcgaggcaaagcaactggtgaatgacaaacattctccacttactttcccttaatccacttgagccccaactcagctaacttttgtaaccacttttccctcctgatactcttcggtaattttcttcagtgtcacggatcacttcatcctacattgcccgagtctcccctttacactttcccctgggcttgaaaacaaaagaataaaaagatttaggtccccctttccctgctccagggaaggacaacgaacgcatggggccctcggcctgaagccagcgcgtcacctgtggctgctgtccgccaatttcctctgcagatggaactcggggctccaccgctcccccgattcttcgcccagggcctcgtccttagccccccgtctcccggggccaggagcttccccgcggggcatctcgaggtctccgcggggctccacgtcgtgctgggacggcccgcagcctgcttctcgctcactttgcagtcagtgacagacaccggtttctcactccggtccccgccatggcgttagtgagaacaggcggccaccacgagccagggggtcacgctcatctccgaggagcttttccctccaacattttcaaaacccggagctcgctcgactttcaggactccggcctagggggaggagacaagggtgacaagggacaaatggaacagacagtccgacgccagcggcccggctggctggggcgccccgaccgcgcggtcctcacccctgccccaactttcccgcgcgccgagggatggggcccggggaggcgggtggctcggaagcgccacgctccgggggcccccagtaccgagggcagggctcgcggggctcctctgccgcgcgcgagtgcccagaactcccgcccggccgcccagaactcccgcccggccgcgcactcacctgctgcccccgcccttggccccgcgcacagccgctcgcccccggggccgccctcgcgcagtctcgaggctcgccgcgtgccggtcagcagccggcgccgcgccccctgccgccgcgtgaccggtcccgcccccgggccgtgcgattggtcgtcggggccgactccgcaggcctccattggccctggggcggggcgcgagccggtgcgcccgggttatataagccagggcgagggggcggggcccccggggcgcgttacataacgcgcgggctcgggcggaggccggcgctcggccaatcccagcaggccggcgggcgggcaggggacggggtggccctcagcggcctcaggcctgtgccgcgcgactggagtgtccggccccctggcacggcgccggggcggagccgctgaagccagcgcagaaatgatagggccaggaagctgccagccacgtgggggcgggacccgggctctgtggggcggggcgggtccggcccaacctccacgtgagaggcgggcggggaaggagaggggagtgagaggcgggggcagagaggggcgagaggcggagtcggggggcttgagtcggggtcagggggaggctggaaatggggacggatgggggcgagaggcggggacgggggggcggatgggagcgggggtgccgagagacgtggggagcgagaggcaggggcgggggggcgacggtgtcgagggcgggggcattagagggagggagaggcggggactgggggcgagcaggggcggctcaggccagcgctctggggtcgagtcctggagtttgtaggtggctcccggctgcccgagcgggtgtggggaggagcccagggtggggcgggctgccggcagcggtcctcatcgtgctttggccgtctttctgggttcccacggttttcaccgcccgtgacctaccgagcccaccccaaccgcccccatcctccgctaactctttcggtgagtggggtggacttggaggaaccgggccataaagcagccctggtaaaaagcccacccgatttttagaaacagattttttattttttgagacagggttttgctctgttgtccaggctggatggagtgcagtggcgcgattttggctcactgcaacctccgtcttctgggctcaagccagtttcctgcttcagcctcccgagtagctggaactacaggtgcagccaccacacctggctaatttttgtgtttttggtaaagatggtctgtgttagccaggctgttctcaaactcctaagccccagtgatctgctggcctcggtctcccaaaatgttgggattactggcgtgagccactgcaccggcccagaaacagaattttgacggtggaacttaaaacacttccctgcacttcctaaaattagattcatttggcaactggaggaagacaaacgtaaaagacactctgtttcagaaaagaagttgtagagccctttaaaaaaaatgtctgaaagctcagtttagtatctcaacatgttagaaatgaaaggtacagtgcagagtgccgcccctcttcgctgcctggtacagaaaaaatattcagtatttgttggatggatgaaattgtatgtaaaggaagaggggaaaagtgaggtgagtgttcatgttaggtattgaataaaccaccttatatcttccaagcgatactctaggttggcttgctctcctccgaagctgggttttgtcaaactgcattcgttcagcaagcatttattgcgtgcagatctgggtagggacgcttggaatcccagcggatagaacagtggcccaaagtccctgccacccagggagttgacgttttattgagaaagccatacaaacaaccccataaacaagttcataaagcctaaagcgatgtgtagaaaacaaactactggaaggaagagtaactgggagaaaggtggagtgggg

SEQ ID NO: 1579 - DNA, 4001 bp, Homo sapiens
ggcaggtgtagacacagccatgtctgacttagcccttgagacatctgggagggcttcccagacagtcgtggacactgtgtgcagcttggctcggcgcggggttctgatttggtctgtgccttgctctgtcacagggacaggtgtagacaggcccaaacctggccctggtctgtcttcctgcacaggggacctggggccaggctcaggagctcctgcaggacctggccccaactcctcctgcccggctttggccatcagctttgccgtctcaggactggccgcagggagcagcggggagcccgtctgggcagaagcagaggctcctgtgtgcccaccccccttggcacccacagctcgcctcttctttcggctggggctccgtggtggggctccagggctatcggggggcctctgggagccagtgctgtggccaggggacttgggactcccagggggctcaccagggggccgtggggcagggccctgcagaagcctctgcatctggtctccagaagacgccggaccagggcaggatgagaactggctgggagggctggcgccggggccgagggacggtggagcttctgcccgtgcggacgtgctgggtgtctgctgaccggtccccagggccaagacaggctcaccctgagacctgctgaccggctgctgtgtggccacgtcctcctcctcgcagccccgccggctccgccctcctgcagctagctgcccagttgggagaggtggggccctggggggactgctgccactgctgtccccttggtcaatgtcactggacaagagctcgtccccagaggccaggccggcctgcaggaggccacactcatcggcggtggctgagaactcggcccagtcctggtcactcagctggacgctgtactggaaattttccatgtggagtcagcagaggcactggagggtagcagaatgggtccggtggggtcttcatgggttcaggccccgggcaccaccctgcacatgccgcccctgccccacgagacctgggagctcccaccgcctcggggctccatccatgccctgaaaggaagagaacagcatctcgaggggagggccgcgcttccttcaaacctagtggtgacgatttccaagttagaagatccccagctcccatgaccctagttcccaacgcaccccaaatgatagctgtgtgatgatgcggtgttacattcctagaatcaaggatgattttctaccagtgaagctataaaaccagccgtcctcaggtttgaatgctctttcccatcacacctcagctggggcagcctcacctcctccaccttctgccagagctgtctttgcacggcaaagcacctttcagggtccacccgatgggaccagtgccctcgggggtgggcagccctggtccatcccagtgcgccccagctggcagccggccacaggaaaggtttacagggcccagcaggtgcccagccctcggcgatgaccttccgatcgccttggctgggccaggctattctctgagctcaccaggtggtgctggccagagctggcccaagtcagcacggagagcctgggcaggaggtgcaggctgcggtgggtctcttgacccagcagccacctcgggccgtcctcgaggtctgcaccacgatccaggcctgcccggctgcccggggtgccttcctttgccccgtctcagagaagcaaggagaccctagccagctgtcgggtctacccctagagggggccgccctcggcctcaggtcagcccctctggacccaggggtgggaagtcactttggtggggacggtcctgagacggaggccagggcatggtggcttcccacccactgaccttcgccctcctctctggtctcttgagaagcctctgtgggggttgttaccattggggccccttgggtcaggagccagcagctgaccatgtcctacctgggtcccggcggccgagctgggcgtctgagctgcccgtcctgggtcggcatggtgctaggctgtggctgcacaggctcctccccctgtgccaaaaataccacgtccctgtggccacatgagactcgtgccagccatcagggtccaggccacaaatagatggcatttgagggccctccagctacagtacatgaggacgacttcctggcacggggccgggctgaggtggggtcagacacgggccggaggacgctgaccagcaggcagcaccgctcagttcccgtgcctccgccacccgcggtgaaacctcagacctgccctccctgccgcccctggaatgttcctggcctgcttctgagatggcctctgtgtcccggccagggcttgtgcctcccggtcctgacctctggggctcatgtgagggtgagtgacgccagggagcgtcagcgtcagagcccccacgcctggctccgctcagctgcaccctccaggccgtcctgaccttggggttcacggtgcccattcccaggcaggttccgagccagaggggacaagaggacagggcgagggatccaacaataaacatccgatcaaacaggcaggtgagctcagctccgatggcagcacgtcctgagaaagaagtagggagaggcgtggctggaggggccggagacctctctaaggaggaggcttggaccgagaagctcctgagagttcagggcacgatactaggagactggggtgtgcgccgtgaggggtggcagtgagagctgggcgtgcagaaagtgcatgcctggtgccatacgatgcttttccagaaagtagctgccacgagaccacaggacaaggcgtcccgccacgcagggccggcctgacttgagctttcacaagtggaatcgcaccctgcatccctttctgcatctgtgtcctcgggcccacgccgtgctctggagacagctgccatgagggccgcgggcgactgcccgggcgggtgaggctgtcctgtgtgaacgtgccacgcggctgtgccgtttcccgtgggtggcgatgtgggtcgtttccagtttgcagctaccacacacggtgcggctgtgaatatctgggaacattcctttcggcgaacctctcacatttccaggacgcttggggtcagcgtcagaaggtgccgccccgttccccaggtggctgcgtggccgtgctccaggctggagtttcccaggagctgcgcatctgcttctgtgtggcgtctctcggctgcggccgcctccctgtgcctcctccctgtgggtctgtaggagtccttacgtattctggacgagctcttcattgaactcttgtactggggaatcttctccctctctgcctcctctttccaccctcataacggtacctttctttgcttgtttgtttgtttgagacggagtttcactcttgtcgcccaggctgatgtgcaatggcaaaatctcagctcactgcaacctccgcctcccaggttgaagagattctcctgcctcagcctcctgagtagctgggattacaggcaggcgccaccatgcccggctaattttgtatttttagtagggaccaggtttctccatgtttcccaggctgctctcaaactcctgacctcaggtgtgagccaccgcgcccggcctattccttcatttaaaaaaaaacttcactgtgtcgcctttcacgctcggctctgccacacacttggcattgacttctgtgagaggtgggaggtggggggcacgggactcctgtcttcacgtggacgctcagctgacccagcagcacatcctgggtggcatgcacgtggcatccgggccccacgtggaccatcacgagatgagaaggctttggggcttgggacaggagaggcagggaggccgacggcaaggctgtggccagggagctgtgcgaggaggtctagggtggcggagggaggggccctaccctgaggccttttcatgacgagctgtcactggagttggcctgaggcttcaggggaagcccttccctgtatccagcccagtcatgacccttcctgg

SEQ ID NO: 1580 - DNA, 4001 bp, Homo sapiens
cactcactccctggcctccctctctgcttctgtctccggaggcaccaccttgacttgccttagcgtgagctgcagacagtctgcgaagaatctcccacctgtgctcatctcttgctccgggattcccctgagcaactgttctagggcctatgagggccacatggaaagatggtctggggtattaagattacaggccagaggccaactgtctagcatcaaaaagcagctctccaacttgctggctgtgaggtctttctggaatctcaatttgctcatctatcagaagagtaataagtcctacttggagggatgtttgaagattcaatatttgtaaaacactgggaacagtgtctggcacaggggtaagtgccaagtgtactgtaaaacaagtaagtacacacacaaaaaattctcatcatgtcactctcctgttcagaatccaccaatggctgcccacctgacacccatgggcctcccggcacggagcctggctgtcctctgatatttacccatgctcttcctgtcccatggcactgttcctttggccacgacacccccaccactgggctctagtgccactgctccctgaaacgttctgctgggagttcatgcctttaacgactgcctgccccaccccccaaagacttgatggctttgcctttttttttttttttttttttttgagatggagtctcactctgttgcccagactggagtgcagtggcacgatcttggcttactgcaacctccgcctcccgggttcaagtgattctgtctcagcctcccaagtagctgggattacacgcacgcgccaccacgccctgctgatttttgtatttttagtagagacggggtttcaccatgttgtgtagactggtctcgaactcctgacctcaagtgatccacccgcctcggcctcccaaagtgctgggattacaggcgtgagccaccacacccggcatcttttttttttcgttttttaatcggtgatggggtctggccccgtcgcccaggctggagtgcagcggcacaatcatggctcactgcagcctcatccctcgggctcaggcgattctcttgcctcagcctcctgaagagctgggattacagacgccgccaccacgtccggctaattttcagattttttgtagagacggggtcttgccatgttgcccaggctggtttcaaactcctgggctcaagcgatcctcccgcctctgcctcccaaactgctgggatgacaggtgctgcttcattgagtacactggcttctgtactcagctcccggcctggtgaggcaggcagggcctggctgagcctacactggggtcagcagggcgaggggcctgggctgctgctcaggcctaggaaaggccggggtcagtgtgaaccggaccgaggtatgaggcgttcgcgccgcgggcgctctgacccctctgctcacaggggaggatcggagggaggcttgaagcacttgccaaggcctcacacctggaggggacagagtcttccccagccgctggcgtcagctggacctgccctgagctggggacgggaagggcttgggcgggaactggaggcccacgcaggtcccccgcggtgtctgcggcctgtgcctctggggccacctggccagggagggcaggaggtgccccgcacatccctgaatggccgcagggcaggcgaaggagactgccgggtcccaggttgtgggacgggcccaggcgaccgtgaccacacacggcagacaccccgcctccatgaggggcaacaccccctgggccgctcgcgaggacgtccggccgcgcccggccctcacccgccaggctgtgcagggcgccgcccgccgcgctccgcagcccaccgcggtagtactcgtccttctgcgccgcgcggatcacctccggggggctggcggcggccggggccatggccgcgggttcgggtggtcccgagcagccacgccggccacgcccacgcccagacgggcgagaactgatgacggcacgacgtggctctgcgtgcggcgcagacctctgcgtcaaggtgctggggcggggccggactggggctggaggcggggccagggcccgggcggaagcggggctggagtccgaaccagcgcagcgcggggcggggcagcgggaaggtagtcggaggcgcagggcggagcggagcggggcggggcccgcgagccgaggtgggggcggggcacgcgcgaggggcgctggcgaggcagcgggatgggctcgcggccgcgtggttgctgcgacctcggggtcctacgctgccaggggcccctgctctgctccctgcacgtccacgggccgccctcccactggggacagcgctgcggagtggagacgctgcaggcccatttacggctggggagacggaggctttcgcttgggtcttcgggaagccgagctcccagcgccggccgcggcggtcccgccctcgcgccctttgagctgcgcgggctctcagcgcgggttggccagttccggggagccggtcggtttgggggccagaggggcacgaggcgagacccgggaccttccaggccccgagcagccgccttccccagtaatcctgcgcgaaaagcacacggccggcttggtgtggacgcccccctggtgcccacgggaggcagggcctggcgggtggggggcagccgggaagccgccgcgtggttccaggacgggcggaaggtggccttccaccctccaccctccaccctgcctggcctgagccccgcaggtgctctggggaaccacatcgcaggcgctccgatccctctgctcccaggggacgagcggagggaggcctgaagcacttgccaaggccgcacacctggaggggacagaaccttccccagccgctggccacagctggacctgccctgagctgggggtgggaagggctggggcgggaactggaggcccacgcaggtcgcctgcggtgtctgcggcctgtgcctctggggccgcctggccagggagggcaggagatgcctggtacatacctgaatggctgcagggcaggtgaaggagaaggccctgttttttggccccaagggcagcacttggccctggagagtcctgcaggattgcaggaggaaggcagggcacgacaagggggcgtctgcgccccgctgacctcagtggggagggcctccagttccttgcctcacctctggttccatctacaggagctcagctgtgggatcatccccagactggcacagcccagtcacaaagccagagccccacactgcaggaatggcccctcttacagggaaggggcatggcctgggtggccccgccccgcaggccctctggctaccaaacctcccagcgcccccgcgcccctttggagttctgaccccgcgggtgcacccgtgtctcctggacacagaggctgccctctgattgggttgagcaccttgggctgaacccctcatccgtggaccaggcaacccggcatcgcccacgtggagccgctgaggtgatcatgtgttctggtcaatgcttagataacagtttgagatgccgctctggcccctgggttcatggctccacgtctgattctgaggaggaggcttcggctcctttggattcacactgggttctatgatgggcccctgacgggagggcctgctctaggaggcatcccccaccgctgtcctggctcaggactgctttccccactcttctcatctgcaccctgggcgacaaatcccagcctcacagtgggaggggcctgggcaggacctgaaacaaagtgtcccagtgtctgctgttcctgggcaggtggggcttgggggtcccccacggttcaagccttggctctaggccttggctgggccttgtaatggcacccgcgaccctcagttgcctcactcattggggcttcgaaggcctctggtgccccgagggtccttcctgagggcgacttgaatacggcggtcctatcctgggatggccggcaggtggcagcgt

SEQ ID NO: 1581 - DNA, 4001 bp, Homo sapiens
ctaacagtgatgcagaatctcaggacaacatctgataggtgaacagctcttttggctgactcaagggcatctgctgagttacccaggcgtagaacttgtggagattagaaagggaaagcaaggatttgtaagtggagaggcagataacaagaaacagaaacagagaaagcaagagggcaaaagttgagcaataataatgacaatttttttaaagagcagaaacaggctgggcatggtggctcaagcctgtaatcccaacattttgggaggccgaggtgggtggatcacctgaggtcacgagtttgagaccagcctggccaacatggtgtaaccccatctctactaaaaatacaaaaattagcccggcatggtggtgggcacctgtagtcccagctgctcaggaggctgagacaggagaattgcttgaacctgggaggcagaggttgcagtgagccaagattgcgccactgcactctgacctggacgagagactctgtctcaaaaaaataaaaaataaagagcagaaacagtccatttttcaatttcaaatttaatttttgtgccagtttagttttctcaaacttgacccattctctccagtccgcctaattacttccatacccctgctctcttatctcaactggactcatgcagagggtaagtgcagagccaaatgagaaagaagaacagagagggtacaggaaggagggacaaaggaaggtgagctggggatggaggaaaggttgggggataaaaggaaagacagagttacttacgctttcttccaaggctcaggtggctctccagttgtcgaatctgtttctgtaactcaggactggctccatgcctctgcagcgcatggccaagaagagagcaagcatactgggcggccctagaggagagggcaggcaaggtaaggtggagacctccctaaccttccgctcaaaactatcttccaaaaggcacagacagacttccccctttcccagtttgagaacactccccttcctcctccatgcccatatctcaccatttctccaggccagaggaagggaaaggcataaggagaaaaaagagtctagaaaggggtggggagcactattgaatgttgagcaaattagagatttgacaatgatgaggcctgaaggggccagtgcaggccgcaggggtccatcacaagcacatcagcgtgagcatgtacgtgatcgatgagggggaggcagacagttggagggcattttattcctcagaataggtgaactgagagatttcaaggccctctagctgaatggagaccaaacgccagggcggaggcaggggagttcccgaatggcagcacggtgtggggacacggaaactgggagtgcctcctcagctctgggggcagagtctggggctatccaccgtggggcgaatgctcctcattccatcaccgcccagtgaggacactgtcggtcttatgtggacacagcaaccctgagcggcctccccgctggcccactcatgcctcagtttccccatctcttccgcgaacggaaaggaatcatctcaacagcggctcaaatctgcgcctcacggtccgttcgggcccccgtagccggagttgacccttcttgacccccctgtagcctaaactgacttcgcctcactagagtcttcctctgtccatccctcccccgccccacccccattcctattcgggccgcacctacacagccgctcccgggcttggctctgagcactgaagcggacccaggcgtccatgacagccgcagcccaggctccgcggccctgctcccgccccacttcccgcccctagtcacgcctactgcgcgacccaacggtgcctcgcgagggacaaacagtatcagaaaagaaagcttggccctggaagcggaatttcaggacgcgaaactcgtgtcttttgagcctccatctgtgtattactgtgcgtgtctgcgtcacagcttccccttatcagacgacccctactccctagcacgcctccagcggcaccttcttctttaaatattcatgaccaagggcggggcctgcaggggccggggcggggcgagaaagcgccgcagtgatctccacgtcttggaggccgccggcataggtgtgcgcctggcagaacctcacaaatacacatgcacgcaggccccgactgaatccagggctgtaggggctaaagaggtctaggtcagtagaggcctgaagcccaggctggtctgtccaaggaaaaaggagcgtgattggtaccagatcttcgttccctgcagaaccttgacagttgaacaagtgacctcctccagaacagatggagagtctccagaagcagaggctttagtgaacgaaattcgcaataatcagctccagatcctgaaaaggagggcgaagaatcagtggccaaagctaaccgcttcatacccacacttcatcctcctcagtttctctccaggccaccatgtctgcaggcaacggcaccccttggggtcagcagcgggggaggaggtctgggctggatcaggagtggaggtggagggctcagagctgcccaccttctcggcagcagccaaggtccgagtgggagtgaccattgtgctgtttgtttcttcggctggagggaacctggcagtcctgtggtcagtgacacggcgggaacccagccagctccgcccctctccggtcaggagactcttcatccatttagcagccgccgacttactagtcacttttgtggttatgcccctagatgccacctggaatatcactgttcaatggctggctgtggacatcgcatgtcggacactgatgttcctgaaactaatggccacgtattctgcagctttcctgcctgtggtcattggattggaccgccaggcagcagtactcaacccgcttggatcccgttcaggtgtaaggaaacttctgggggcagcctggggacttagtttcctgcttgccttcccccaggtgagtgacctaggactcaggaccgggcaggacagggatttgggtccatagcatgagttaaagggtgcgcttgggggccattagccattaattctcagggagtaagcctctgcttgcttttttttttttttgccggctcactgcaacctccgcctcccgggttcaagcaattctcctccctcagcctcccgagaagctacaggcgcccgctaccatgcccggctaatttttgtatttttagtagaggcgaggtttcaccatgttggccaggtggtctccatctcttgacctcatgatccacctgtctcagcctcccaaagtgctgagattacaggcgtgagccaccgcaccctgctacctctgctctctcttctgtaagattatttgtatgttaatttacatctgttaagagcctgccttttcgattcctcagggatctagaactagaaataccatttgacccagccatcccattactgggtatatacccaaaggactataaatcatgctgctataaagacacatgcacacatgtttattgcggcactattcacaacagcaaagacttggaaccaacccaaatgtctaataatgatagactggattaagaaaatgtggcacatatacaccatggaatactatgcagccgtaaaaaatgatgagttcatgtcctttgtagggacatggatgaaattggaaatcatcattctcagtaaactattgcaaggacaaaaaaccaaacaccgcatgttctcactcatagatgggaattgaacaatgagaacacatggacacaggaaggggaacatcacactctggggactgttggggggtggggggaggggggagggatagcattaggagatatacctaatgctaaatgacgagttaatgggtgcagcacaccagcatggcacatgtatacatatgtaactaacctgcacattgtgcacatgtaccctaaaacttaaagtataataataataataataataaaagagcctgccttgtaaaaacagtatcct

SEQ ID NO: 1582 - DNA, 4001 bp, Homo sapiens
taagcaggtagtgagggggaataacctgtggtatagaagcacaattaaagtgatataatatcttaccttgcacaatattagtcattcattatggaagagcatctgtcttccatctctccccatttgatattctccgatagtttaagatctaagtgattggaagccaagtgactgatcaagacttatatactctggaaagatcctaagatatctttccctcatataagacaagctatgcaatatagaggctacaaaaaaaaatcttaaaggagaacaggatatcaaacctgaatgaacgctgggcccacttctcctgatccacacggggagccagtccagactttccagcccacaggacattgtcacaggcgaagtacaaggctcgattgaggtgactaacagtgatgcagaatctcaggacaacatctgataggtgaacagctcttttggctgactcaagggcatctgctgagttacccaggcgtagaacttgtggagattagaaagggaaagcaaggatttgtaagtggagaggcagataacaagaaacagaaacagagaaagcaagagggcaaaagttgagcaataataatgacaatttttttaaagagcagaaacaggctgggcatggtggctcaagcctgtaatcccaacattttgggaggccgaggtgggtggatcacctgaggtcacgagtttgagaccagcctggccaacatggtgtaaccccatctctactaaaaatacaaaaattagcccggcatggtggtgggcacctgtagtcccagctgctcaggaggctgagacaggagaattgcttgaacctgggaggcagaggttgcagtgagccaagattgcgccactgcactctgacctggacgagagactctgtctcaaaaaaataaaaaataaagagcagaaacagtccatttttcaatttcaaatttaatttttgtgccagtttagttttctcaaacttgacccattctctccagtccgcctaattacttccatacccctgctctcttatctcaactggactcatgcagagggtaagtgcagagccaaatgagaaagaagaacagagagggtacaggaaggagggacaaaggaaggtgagctggggatggaggaaaggttgggggataaaaggaaagacagagttacttacgctttcttccaaggctcaggtggctctccagttgtcgaatctgtttctgtaactcaggactggctccatgcctctgcagcgcatggccaagaagagagcaagcatactgggcggccctagaggagagggcaggcaaggtaaggtggagacctccctaaccttccgctcaaaactatcttccaaaaggcacagacagacttccccctttcccagtttgagaacactccccttcctcctccatgcccatatctcaccatttctccaggccagaggaagggaaaggcataaggagaaaaaagagtctagaaaggggtggggagcactattgaatgttgagcaaattagagatttgacaatgatgaggcctgaaggggccagtgcaggccgcaggggtccatcacaagcacatcagcgtgagcatgtacgtgatcgatgagggggaggcagacagttggagggcattttattcctcagaataggtgaactgagagatttcaaggccctctagctgaatggagaccaaacgccagggcggaggcaggggagttcccgaatggcagcacggtgtggggacacggaaactgggagtgcctcctcagctctgggggcagagtctggggctatccaccgtggggcgaatgctcctcattccatcaccgcccagtgaggacactgtcggtcttatgtggacacagcaaccctgagcggcctccccgctggcccactcatgcctcagtttccccatctcttccgcgaacggaaaggaatcatctcaacagcggctcaaatctgcgcctcacggtccgttcgggcccccgtagccggagttgacccttcttgacccccctgtagcctaaactgacttcgcctcactagagtcttcctctgtccatccctcccccgccccacccccattcctattcgggccgcacctacacagccgctcccgggcttggctctgagcactgaagcggacccaggcgtccatgacagccgcagcccaggctccgcggccctgctcccgccccacttcccgcccctagtcacgcctactgcgcgacccaacggtgcctcgcgagggacaaacagtatcagaaaagaaagcttggccctggaagcggaatttcaggacgcgaaactcgtgtcttttgagcctccatctgtgtattactgtgcgtgtctgcgtcacagcttccccttatcagacgacccctactccctagcacgcctccagcggcaccttcttctttaaatattcatgaccaagggcggggcctgcaggggccggggcggggcgagaaagcgccgcagtgatctccacgtcttggaggccgccggcataggtgtgcgcctggcagaacctcacaaatacacatgcacgcaggccccgactgaatccagggctgtaggggctaaagaggtctaggtcagtagaggcctgaagcccaggctggtctgtccaaggaaaaaggagcgtgattggtaccagatcttcgttccctgcagaaccttgacagttgaacaagtgacctcctccagaacagatggagagtctccagaagcagaggctttagtgaacgaaattcgcaataatcagctccagatcctgaaaaggagggcgaagaatcagtggccaaagctaaccgcttcatacccacacttcatcctcctcagtttctctccaggccaccatgtctgcaggcaacggcaccccttggggtcagcagcgggggaggaggtctgggctggatcaggagtggaggtggagggctcagagctgcccaccttctcggcagcagccaaggtccgagtgggagtgaccattgtgctgtttgtttcttcggctggagggaacctggcagtcctgtggtcagtgacacggcgggaacccagccagctccgcccctctccggtcaggagactcttcatccatttagcagccgccgacttactagtcacttttgtggttatgcccctagatgccacctggaatatcactgttcaatggctggctgtggacatcgcatgtcggacactgatgttcctgaaactaatggccacgtattctgcagctttcctgcctgtggtcattggattggaccgccaggcagcagtactcaacccgcttggatcccgttcaggtgtaaggaaacttctgggggcagcctggggacttagtttcctgcttgccttcccccaggtgagtgacctaggactcaggaccgggcaggacagggatttgggtccatagcatgagttaaagggtgcgcttgggggccattagccattaattctcagggagtaagcctctgcttgcttttttttttttttgccggctcactgcaacctccgcctcccgggttcaagcaattctcctccctcagcctcccgagaagctacaggcgcccgctaccatgcccggctaatttttgtatttttagtagaggcgaggtttcaccatgttggccaggtggtctccatctcttgacctcatgatccacctgtctcagcctcccaaagtgctgagattacaggcgtgagccaccgcaccctgctacctctgctctctcttctgtaagattatttgtatgttaatttacatctgttaagagcctgccttttcgattcctcagggatctagaactagaaataccatttgacccagccatcccattactgggtatatacccaaaggactataaatcatgctgctataaagacacatgcacacatgtttattgcggcactattcacaacagcaaagacttggaaccaacccaaatgtctaataatgatagactggattaagaaaatgtggcacatatacacc

SEQ ID NO: 1583 - DNA, 4001 bp, Homo sapiens
aggaccttagatccttttctattaaatacatatacagagagggcaaacttgcaaaaccaaaagaatccttgggcataacagtggctccaagtggcaagatttttagtactgtttacagcactggcaaattaaatgtcctataagaatcaggaacagagccgggcacggtggctcacgcatataatctcagcactttgggaggctgaggcgggcagatcacttgaagtcaggagtttaagaccagcctggccaacatggtgaaacctatcgctactaaaattacaaaaattagtcaggtgtggtggcaggcacccgtagtcccagctacttgggaggctgaggcaggagaattgctcgaacccgggaggcagtgagccgagattgcgccaatgcactccagcatgggcgacagagagagactccgtcttaagaaagaaaaaagaatcaggaactgaggacacccttcaatcccagcctgtgggcattcctaacacaaaacaattcagagaaacccagaccccaagatgccttagtatttcagcaaactaaatgtggtaaggcaagaaaggagaggccctcctctcgagacacttgccaaactccagaacacctgacagtgagaaggccagaatcagtccttgttatctcccatgttttacaatcaagacatcttcttcctgaatcattcacactgctaatagaaactggtatgggggaacacaccaactcctttaagttcaattcttgtaacagacgtgcagaataagacagtaagaaacactaagcggtggtcttctgcctctgaaggaagtgaaatactagtaagttgctgaaaactcttagaggtgcttcaaggagatgggagaggaggaatgaggccccaagttgaaactattttcttcttcctcattctaatcctaactaaactcaaaaatgtatggatgactagtggagtcacacaggttcaatacaggctcaacagagcacacgatttggggcatgtcacaaacccttagtattcatttctgtgaaatggaggttagtagcctgcacttcataaaggttgtagtgaacactaaacgagataatagatgtaatttgtgctcaacatgacaccacacaggcagttaaatgtaagatgtctcttagcccttttctcctcaccccaccctaccccacctttggactataaaccccttcggagaccttatcatccactgcctcccggccgcagaggcacaggcgtcaacgctggtccttatggtccccttattggagtgggatttgtctgaatctgcaggtgaaaagctagagcggagccctcggccaacaaaaccaaacccagggaagcgaggatgggtcctcagccaaaagcttggtggcgtctgttagtcacagtgcgtccctttcctatcaacgcactgagagggctcgactagattatttctgactatccaacttgacgagagaagcgcaaaggtgaccacagatgaagaggctggcagccgctccaggaggctgaggccgtgagggagtgggaaccctaatggaaacaggcccctccccggaggggacagccgggaacgatcgatctatcctctccttctcaagccctcgcagctcaaggctggggacttcccaagggtcccgtcaccctccccaacaagctcaagtgggaccagaggtgctggcaggcgggaagtggggacccgggggcacagccaaacaccagagcccgggctccggaatgtggtcaaagaggggtcaccggggggaggggccgggtggggaggacctggggaggggcggggctcaggagggggcaagaggtcggggtccccagcttcggagactcggggtccctacccggctcccagccgtatgctgagcgccccctccagccggggtctccgccgcacagcggggcagtcccactccccttacctggctcggctgctctgcctgctccgaggacgccatctttctgaggcctgactaatcaaccgccgctgggcgaggtttctcccaggcgccctcgctctcgccctcccgcccagactaaggtagccggaacagagcctgtcgatgtaggggactggggcagaggggtggagcccgggtgtccgggtcaccttgcatagtttccgttaagactctgctttccaggaagatcccaagtctatatcttctttgcgttgttatatgtgtattattctggttttgctttttttttttgagacggagtttcgcacttgttgcctaggctggagtgcaatggcgcgatatcggctcaccgcaacctcagcctcccggtttcaagtgattctcctgcctcagcctcccgagtagctgggattgcaggcatgcgccaccatgcccggctaacattgtatttttagtagagatggagtttctccatgttggtcaggctgctctcgaactcccgacctcaggtgatctgcccgcctcggcctcccaaagtgttgggattacagaagtgagccacagcgcccggcccatattattcttattgagttaatctctgcccatccccacagtgccatgggcacatttagggacttgccaatggatgaatgcgaagaaacttggaaattaatttttagacatcagttcagttccattcattgagtgcctactatatgctagggactttggtaggccttgaaataaaaacattcaagactcaatccctactcccacgcccaggccaaacacacttacaattacagtattatggggataggactcggataagtgtgcaggtctattgggagaacataaaagggggcattttgaagagaagaggcttctacaaaacgtcattattttacactggttgaattgttagatttttttaattgttagattttaaattaaatattggacgggagcagtggctcacacctgtaatcccaacactttaggaggccaaggcaggaggatcccttgagcccaggaggttgaggctgcagtgaactatgattatgccactgcactccagcctgggcgacagagcgagaccttgtctaaaaataagataagaaaataaaaaatgaaattatatgaaaaaggatacatacattagagttaaccgccagctcctattatagttgtgttttgatcaatatagactgcttaaaagggatgacttaatgaataattcctcctactaaacgctgttttaaatgtctaaacttttcttgagataatatccaatttcctctcccacgttttttttgtttgtttttgcttttgtttttgtttttgcttgagacgaagtcttgctcctgacgcccaggctggagtgcaatggtgcgatctgggccgactgcaacctccgcctcccgggttcaagcgattcacctgcctcagcctcccaagagctgggactacaggcgtgcgccatcacgcccggctaatttttgtatttttagtagagatagggtttcaccatgctggccaggctggtctcaaactactgacctcagatcatctgtccgcctcggcctcctaaagtgctgagattacaggggtgagccaccgcccccggggcccttgcccacgtttttataaacaaaatatgaggtgggaggattgcttgagcccaggagatcaaaactgcagtgagccatcatcgcgccactgcactccagcctgggagacagagcgaaacgctgtctcaaaaaaagaaaaaagaaacaaggaaggaaagtgtcccccgaatgaataaatatgagcagataattacttctagtttacataaaatgccctcttttaagagaggaactttttgatcatttttattactattcttttaatcttagatgtttatttttcaggaggaaaaaaacaaacttttccatagtagcagtattaaaacaaagatgaatatgttgtcaagaggcatctgaacaatctccaacagtgccgagtcgcatttcccctttcctctccgatgcatttgagactttaatgcttac

SEQ ID NO: 1584 - DNA, 4001 bp, Homo sapiens
tacactgcacctggcctctgatagaagccacaggcagtggctatgggaaatgcacctccctcctacccaattccactggacattctaactactgctcctaatgaggatagcaaaaaaggtatctagtcattgaaggagggtatgggatggcataccaatccaaccatttaaacctactattttttcaaggaactctgagattcccccactcaacctcaagtccttatttcacaaggactgaggctggcaagagcactcaccaatgtgaggccaaggtaccctcccacattcccctctggcccataggggcctgcccaacctctgctcagggctgcatgcccatcccctccccatcccttaagggggtggaatttatactttggcagtgtctcctggcgatctcttctggggccccgaagcatcaggggccgtggtggtagaagggggtgctggggagggtttggctttatcgaaatcatcaagagcaccttcagagacaagagacatggtgtgtgtgttggcgacagatgagaatgcaagcaaggctgggtggtttctgggcaaagcattaggaatatgatttttcaaattgccaactttcctcaattttcctccttgagtcccccacctccccagaccaccctcaatgagcctcctacttccttctggattacctaatttattgtgagcaaaggcaaagaaatcccttaaggtggaacaaatgtccatctcagagctgggaggagaggattaaaaagttctgcagagacatctccatctatagtgtctcccttgccacaccctaacgattccctagaaatcccatacaaatacccaacagtagtagagaacacagatgtcctcatccctctgaactcactctggagctctaaaaggaataacttggtgagaaagcacaggacatcccacccagcttcctgttggtactggtaccagcacagactgagggactacataccagactccatggtacggcattaaactatcttctcttattctccagtttagtgctccccaacaaccttctagagctccctttggcctgatctctgcagataaccgtacactaatttacacagtcacttggcactcctcagggtttctgttcatttttctgcctgcccacatctccgtgattgagcaagcgattacaaattcacctctgccctgaaaagcctgtgtcctcaccaccattctgttcgccaggcctagggagagagcactggccctactctgggcaggaagtcaacaggggagtggagagtaatgctaagaaaacatcccccgtctttcaggagggtgaactgctttcccctgaaatcgccacatcctcagtttctcaaaataagggaaaggagtccgcttgagctactgacaagatgaaagaactgttaaggggcctaacgagagaaagagaaaaggactaggaggagaaaagtgtctttcgtgttaaggaagacaggacgaggcacacaaggaccggccacgagcttgctaggagttaatgtaagcaatcagtgagtgcgtagttcgctacccagcaagaaccaaatgctgctgctgctgctactgctgctgaagtcgaactttaagaactcagtaacctaaagaggagtttgaagaggtatcatgaaacgccgtcctgcggaaacatccaccatccggaccactgagggaccccaggtgagctccccagctccagtcgccggggtggggcaggatgacccagagatttttggggggctcgggggtcagactctccgcccccatttaacctttggagagcctctcctgcccgtccctaatatctcaggttcacttaacccccagaatgggtcctcacacgtgccctcttcgggcctttcccactatgggctcttactttccagaagctcctccaattccctgtccgcttcggccccgacactacagccttcctcagcggcggccatcttgctacctccgacttgccgtaggaggcgggacctcctcggtgccgacacgccctccaccccttcgctcccgccctcttctgcctcgggtaaccaatggtattgttgaccagtgcggaaccgccatttttaaagggccaggaagctttgagtgtttgtgttttgggtatttttcccttttctcctgtgaaacagaattagggataagatagggttattttctgtctggttttagaggcccggactcctttctttcaacttcccaaattacctggcgaagctctttcattattttttcctgagctgtgagtaggccagattgagacaaactgcctacaaataaccagaatctaaacatatataattgatatgacaattatggcacataacatactactttctctcacttcatttttttttttttatttttttttgagaaggaatcttgctctgtcgcctacgctggaatgcagtggcgccatctcggctcactgcagccttggcctcccgggttcaagcgattcttcctgcctcagcctcccgtgtagctgggatgacaggcgcgcgacaccacgtccgactaatttttgtagagacggggttttaacatgttggccaggctggttggccaggctggtctcgaactccggacctcagctgatccgcccacctcggcctcccgaagtgctgggattacaggcgtgagccactgcgcccggcttcacttcattgtttccctcaaatattatcttttctgaaacgctttccttggccattcccgttccttttcttcctaacactgaacagtatctgacatactatctaccgtacttttttattctccgctccccaccctgcagaatttaaacaccatgaacgcaaagattttcgtctgttgtcttcactgctgtaaagcccaactcccaggctagggtttaaaacttagtaggcattcattggccactctttgctctcgcagtccctaatcaggcacatctgtctgcccaatctagtggcatctctcatttcctattatctattagaactgtttgattaaaggacacagggccggccaggaacttagaactccatgttattaagagagcctctggtaccttggactgagcagggcaattcgaatgcagtagtaatagacttactttccctgaacaatctccttttctccacacagaacccaacctccaactgagtgaacacggggaatgctcagatagaggtaactctagacgtccctttcctcctttggaattgttctattcagatgtcagaatgtagcaactgtttcacatacaaatctgttttcgcacttagagagcacctattattaaggtcttgttctgggcacagtgaggacagagagataaatcaggaccaccccctgctgtaaggtagctaagtgggggtgagccggaggtatgatgagatatacacacagtatgatacaaggtaagaattttaaatgaaaaaaaatcctgtgttaagtcacctcatcactttcattcttagcttcctaaacacacatttgagtactgcatcaagcaccagatcaagcacttactatgtccttcacagatagggcacagacttgtaaaatcatatctgcaaaacctgttttcttccaaccacaagtagtgtgttttgggatcaaaatattatgaactgtgagttagaaagcctaaattccagccccaattctgccactaatcacttttgaagtcctttacaattctaaacttctgtaatcaaatcctttcctgataaacctgttttccaacacctgcaacataatttattccagactttctcattcaaactgcttacacgtgtatctccaatatggctatagttgtaacaagcacgtcaaaaaaagaaaacttgtctatcaacaggcatctctattggttttattttttgagacagagtttcactgttgcccaggctggagtgcagtggtgcaattttggctcactgcagcctccacctcccgggttcaagtgattctcctgt

SEQ ID NO: 1585 - DNA, 4001 bp, Homo sapiens
aattagccattcaaatggcttatgcctatagtcccagctactcaggaggctgagtcaggaggatggcttgatcacccagggatttcaaggctgcagcgggctatcatcacgccattgcactcagcctgagcaacgaagtgaaactctgtctctaaaaaaaaaagtactgtggctcatgcctgtaatcccaccactctgggaggccaaggcaggcggatcacttgaggtcaggagttcgagaccagcttggccaacatggtgaaaccccgtctctaccaaaaagacaacaattagccaggtatggtggtgcacctgtaatcccagctactcgggaggctgaggcaccagaatctcttgaacctgggaggcagaggttgcagtcagccgagatcacgccactgcactccagcctcggcaacagagactccgtctcaacaacaaaaaagtattaaaaagcattaggttccttttcccttcccccaccccaagtcagaaaccatattccatagcactttatacttctcttaggacacttatcttctgcctcatatgagcattttgcttctcttatttaccccactagactatgctcttcgagaccagcatgggcaacatggtgaaatcctgcctctacaaaaattaactgggcgtggtggtgcgggcatgtaatcccagctactcgggaggctaaggcagaaatgcttgaacccgggaggtggaggctgtggtgagccgacatcccgcaactgtactccagcctggatgacagagcgaaactctgtctcaaaaaacaataaaaataaaaatctttatgctgatacatctgcttgtattaattgttcaacaaaaactgaacctataattaagacagctgtaggccgggagcggtggctcacgcctgtaatcccagtactttgggaggccgaggcgtgcggatcattaggtcaggagttggagaccagcctggccaatatggtgaaaccccgtctctactaaaaatacaaaaattagccaggtgtggcggcgcgcgcctgtagtcccagctactcgggaggctgaggcagaagaatagcttgaatgaaccacgaggcggattgcagtaaggcgagatcgcgccactgcatgcactccagcctgggcgacagagcgagactccgtctcaaaaaaaaacgataataataaagtagctgttaactgttttcatttctattgtgtagctttcctcccactcctatttttccacttagcaaaacacggttcccaagccacaaagggttttctaattaacttatcaaacgcttcccgatgctaggcactggggaaaatgcaaactcggattagaaaggggtttctggtctctaaagaaattcgatctagtaatgaactcccgaattaaaatagtatatagaacactaggctgttcgagtatgagagtcacgtggctctgcagcgtgacggcgattgtcaacgtgggttcaggatcacgtaacagactacacagccagcccgttaactaattctctagggttagtttcgagctgtcttgcccagccataacctgtttggagaggctgaggagagatagagaaagcagcaaaccatctcccctcagacctgtgcatcttcccagaccctacatgtcagggctttccccttgctcaggctcacccaccacctcacggaggcgtggctctcacctacccacccgtctacctctccgaaggggttcggctagcttttccggggacccttccctctctaggtgccacgcacatgtggtgctggagtaaaggcctgcacaagccacaggctcccccttctcgctagtattccagacccaggtgggtaccctgcttcgcgttagccactcctcacctgctctgcggacaccgcccccttccccgcgccgctcccgctgctcttgccggcgcgaccgctgttctccgccatcttcgccgcctgctgggtttccggccggcgcagctcagcccccgccttgcgtcacgtccggcctgcgagttaccgcccactcgctgcggcgcttctggctccagaccgccctccggatcggaccctgcgaatggttttggctatatcttcatgtaggacctactccctatcccgtcggccgcggtgaatcccacctgcggtgctttaacttgtgtaacagagatgctgcctctgggagaggcggggagggacgggccaactggagcgggcggcgggagggtggagggcggggcgcggcttggggcctgggttcctttgccccttgcccaccagggaggggtgggagacgagagagggtgaactttcccctgcgagattctggtgaaaggggaaatatgcttcgagtcagtaaagctgcgcaagtgcacagtcaaggagagagtcttgggaaaaccaaggatagttcccggagatgacttttggactgcggaaacgtttgtcagaggaaagaggcttcagtttaatgtgagatcattggaagttgaactattcaggcggcgagcagagcccctttctccatcttcccactgtatggtcttgtcccttagcctataatttcttataaagagcgttttgaagactaggtttttactggcagggccctgattcaggctcacagtataaagagagaagtcagagaatcctagaaatttattgcttgaagaaggggttggtgtcctcatatctcaccttcctcaggctgggcttcatcaccaggcctcctcacagattcctgtcccttctgtgtcctggactccggatacctcaactctcagtactttgtgctcagcccaggtaacacgttttgttgtgtcctcagtgcctggcacttagatgctcagtttgttaaatggatagtgggagacacaggagtgtcaactatccacacatttgattggtgagccctactagccctgggtcaacgtgccctgtaagagcatgatcaaaaggaagtccagctttcctgcctctccacttgcaccccttagcattaaatttgcttccctgtgctatgaaatctgagaatcctgcctatgctgttcacaggcccagagccatggctatctcctcttcctcctgcgaactgcccctggtggctgtgtgccaggtaacatcgacgccagacaagcaacagaactttaaaacatgtgctgagctggttcgagaggctgccagactgggtgcctgcctggctttcctgcctgaggcatttgacttcattgcacgggaccctgcagagacgctacacctgtctgaaccactgggtgggaaacttttggaagaatacacccagcttgccaggtatcagggaaatagcgagggagaggtagaatctttgttggacagtgtccctgggttgccagatatgagggtagagccttgagaagtcagtgaagagttgtcagtgtcccttccccccagggaatgtggactctggctgtccttgggtggtttccatgagcgtggccaagactgggagcagactcagaaaatctacaattgtcacgtgctgctgaacagcaaaggtgagactttataaccctttagcctgcctcttcccatgctcttctacctagattctccagaattgtttctcaactcttatttccttgacccaaggatttaggggtggtcctacttcagttcctagcctataaactatctcctccttgggaggagtaagcaaggcttctagaacaccagcactgatattccttctttcttactgtaggggcagtagtggccacttacaggaagacacatctgtgtgacgtagagattccagggcaggggcctatgtgtgaaagcaactctaccatgcctgggcccagtcttgagtcacctgtcagcacaccagcaggcaaggtaggagttgtgaaaggatgagggaggggaacaggaatactttgaactggcagtagaggatagaaagccctaagagagggggtaatggaaatatgactagatgctgtgacaaacagagcaggaag

SEQ ID NO: 1586 - DNA, 4001 bp, Homo sapiens
ggctcattcccctcaggcctgtaggaaggaaaccaagcagcactggctcccatctgcaatttctacaatgagcagcactctcccaaaacttagcccaacagataaagctggtaacattaccagctccaagtaattcctgcacctgcaactgtgccttactcattgtgtgtacaataatgttagttctaacttccatcagcaagccagtgtgcaaacatcccaggagacagagattcagtttaagaaagcagtaagaaactgctggactacaccagtagtcaagccccaagaacagacatttcactaagtctacttgttttagacaggacattctaccctggagactttgcattaaatttccatgtcaaataattatttatcactcccaccaagcagcagagtccaggattataactatattcccaagataaaatgctgagagagagcagtccctcctctctgccagaactcacaacatttcttctctgacattcgaagatttggggttttggtttcatagctgttgttgttctgttctgaggaagatgccccagacatggcagctcttcagatgtctgaaacagagaagtagaatgtaaaaaagggaaggggaagaaagaagacataacttaaaaaaagtcagtgcattggatccgtgtggtataagtaaaaacaccctgggccaagaggcaggttcagtcctgtttctcccagttagcagctacttctctagccctctgtttcctcacctataaaaagagttgcactagaaccttacatttatcttctgacttacgagtctacatttacagacgttatcttcttcagtcctaacaataatcttgtaattaggcagattttgccaccattatttcttctcattttacagattgaaaatttgagattcatcgaattaagtgtcctgctcaaggtttcatgacctcagattctagttttaagaatctgggcagagtagtggcagcagttggggtggggtgggttatgtatagacgaagtacattaccaggaaattaactccaatctaacggtaggactcagttttgcaaacagtgaggccgggcacggtggctcactcctggaattccaacacttggggaggctgaggcgggcggatcaagaggtcaagagatagagaccatcctggccaacatggtgaaacctcgtctctactaaaaatacaaaaattagccgggcctggtggtgcgcgcctgtagtcccagctactcgggaggctgaggcaggagaatcgcttgaacccgggaggcggaggttgcagtgagccaagatcccgccactgcactccagcctagcgacagagcgagactctgtcaaaaaaaaaaaaaaaaaaaatgaaaaatgaaaaagaaagaaagaaaagaaaaaagtgagggacgtgggaaaatctcgaacatattccctgaaggaaaaacagtaactggaccccaagacagccctagcacgtcgtcatttctcctctagtgcattctcaagccctgctccgcaccctctccctagttacccccgggactcagtctaaagaacgccggagcgctgaggtggtaaatgacttccccaaggtcacctcaggaagaggggtaagccctgattcaaactggagtgggaaagtcctgagctcatgcccccaattcagacaacagggggctggtgaggacggaagatcctgcgccttcaagagccttacacgattcctttactgaccacacaaatcctccaacccaaacacagactgtggctcccggtcccagaacgtccgcgctgcctgccatgcctggggaccagcacctctccccgcacttcatccgggggcacgcagcccccacatcccgccccgctagaccctacccggggctgcgcagctgtggctcaccctacgatctctcctaagatccctccctgccttggccccggcgcctgccctgtaacgcgaccgaaccgagccgacagcttgtggccgggaccggcgctacagtcgccggcaaatcatgtgagcccgtctggccccgccccctcgcgcgtaggtcctcacctggagagaatcatccaccaatcgggcgcctgcaggacccagggggcggggcagggtcgcaatcgcctaactggctcgggaaggcggctggaagtcggaaccagagagatcacaagctcctgagtttcccagcgccgaggagcctggtggcactgttgcttggtaactaatagggctgggggcggtgttaataaaaagcttgacttttttctgactctcgcgagagtagactattcggtaggcgtcttgagagcgggtgtgccgggtgacgagaaaatgctgcaaagattaacgctctcattcctgaatcccagcagaacctcattagatccataaatgggaacgtaagctttaaagatgtttttgctagaataaactaccacaacacttgagctaattatgccttagggtgtatacatacccggctccacaggtcagacgctgtgacctaagaaaatcaaccactctcatcgttgaaccagaagcttccctggacccacccatacaccccattggagttttttttgttttggtttggtttggtttttgttttttgagatggagttttgctcttgttgcccaggctggagtgcaatggcacgaccttggcaccgcaacttttgcctcccgtgttcaagcgattctcctgcctcccagtatctagaattaaaggcatggaccaccacgcccagctaattttgtatttttagtagagacggggtttctccatattgatgaggctggtctcgaacttctgacctcgggtgattcacccgcctcggcctcccaaagtgctgggattacaggtgtgagccactgcgcccggccaccccggtggacttctaaccactcctaccttccctcctacctaccccctaacccaggctgtatcatccgttgcagtcgtcttgaagaaccaaggaggaaaattgcaccagcaaaaaaaaattgagtcatgaaagatgtgaaaagatggaaacattacatataatttattcagaagcaaagtcttttacagtggaggtgagtttgcaccaagtgaactacacttttcatagttgccccagcgggcccgtttgatgcttgataaacccactcttggcaagtgggacttgctgtctgaatcccggctggataaagaacaatgagtatggatttcttggaaaagagagatataaattcagggatgtctttattcctccttcgcctgggaattaaactaattcttccaaaagttcaaacagttatctcctctttaaggctttttacaactcccagagtgctctagttgccctctctatgtctatacaactctgtctttattcattcagccagtatttgttgaacactttttatttgcgaggcacagtcctgggttctaggcatacacgtttgaaaaggtacagataatctagcattatcacgttgctttgaaattcagtggctgtgtgtctcacaccccaccctgtctcccaactgcaatgaatacttgttacaatgaaggcaggaatgaagtcttcatatttgtatgcccaggaactgaactggaatctgatgacacgcgttacacgactcctccttacactgccaccacctgaatgaggcagctgccctgggcccagatgctgacctcatactgtgctttctgaagtggcaaatagacgttttcaagcacagtcccagggaggcagaaaggccagtcttttggcccctggaaccccaatgagtcaatgtttaatgcagccacgagtctagtcacaagtgtgattgtttttgactggtcctttgactcactgaccattcctggcattcgtttgcgttgtgaactatgattctgtttctcctggtgtagtctgggtgtagtgtggaagccccaatttaataatttccgacctcactaagtgcaaggtcacattccaatctccagaccttc

SEQ ID NO: 1587 - DNA, 4001 bp, Homo sapiens
tcctaggggattgggaggtgggagagctgctgtttaaaatgtaaatttctccaaggaaagacaggacaactaaatgctgtcttggaacctaaattacaaaatggaaataggtgagagtaaagaaattcgaataaggcctgtaggtgttaatatcctggttttgttgactgttttgtaaaataagatgttaacccctaggaaatccagacgaaccgtacatgggaatttttgcttgtttcacaacactctgaaactctgaaattaattcaagataaaaattattcaaaagacattttatagatgtaaatgccccaaagctgagccaggtgcctaactgtagggaaaagaaagagaagtcagactgctactgtgtctatgtagaaagggaagacataagaaattccattttgacctgtaccttgaacaattgctttgccctgagatgctcttaatctgtaactttgccccaacctctttgctccaaccttgacctcacaaaaacatgtgttgtatggaatcaaggtttaaggggtctagggctgtgcaggacatgtcttgttaacaaaatgtttacaagcagtatgcttggtaaaagtcatcaccattctctagtctcaataaacaaggggcgcaatgcaccatgaaaagccacagggacctctgccctggaaagccgggtattgtccaaggtttctccccatgtgatagtctgaaatacagcctcgtgggaagagaaagaccttaccgtcccccagcccgacacccgtctgtgctgaggtggattagtaaaagaggaaagcctcttgcagttgagatagatgaaggccactgtgtcctgcctgcccctgggaactgaatgtctccgtacaaaacctgattgtacatttgttcaattctgagataggagaaaaactgccctatggcaggaggcaagacatgttggcagcaatgctgccctgttattctttattccactgaaatgtttgggcagagagaaacataaatgtggcctacgtgcacatccaggcatagtacctccacttgaacttatgacataaattcttttgctcacatgtttctttgctgacctccttatcaccctgctctcctaccgcattcctcttgctgagataatgaaaacaataatcaataaaaactgagggaactcagagaccggtgctggtgcaagtccttggtatgctgagtgccggtcccctgggcccactgtggtttctctatactttgtctctgtgtcttatttcttttctcagtctctcctcccacctgacaagatatcccacaggtgtggaagggcaggccaccccttcacccaacagctcagaatggcttttgtgggatacggaagaaccctcccttctcttcacctcactagcaaaagagaaagaagggcaaacaaagaccctcagaaacctcagcagcttcccaggcagacgcagttaaaaacgacccgcccccagcgcgccccggcacagagccaccccgccccaggatgtgacgtggcattcgcagtcccgccgccagcctcaggccgcccgcctccttcgtcccgcccaccccgcccgagcctgccctggtccctcccaccccgccctgaatccatccctctttagcccgaccccgccctggtccccacccaccccgctccgcctcccgctcagccggcccggcctccggcctcgcaccccaacccgcagaaggagcgcccccttgcggccctcggaatcccattgttcctgtcctggtcccgccagcccaccgtcggcgcgcagtggtgaggacgaactcctcggatgccgccgttgagaaaacgcaacatcaacgccaaccactcctgtactcaagcgaagccctgcctgcagcgcgagcacactgaggcctacctgccctaccccagacggagactcgcgagcccgaaccggaccatgagccgcgccgaatcggagcgctgcgcctgcgttggcgtcgggcgtcgcggccgcgcaacgtccggcaccagagggctcgctgcacctcggccggccttccatgccacgcccccgggccaggccacgccccggcccgagcgaccatcgagactccaggacctccgcggcgcctagagggatcccgaaaacgcctgcgaggccagaacggccgaaataacccaccccagcgggccagctcttcccgccactctcccttaccctcccacccctgtcctactttggaaaccttcctcgctccttcctaatcaggagagcatggggactttctagggtagtggttctcaaatgtgcccccaatctaacagcagcttcacctgggaaatcgatggaaatgcaaatcttgggaccccactacaggccttctgagtaagaaactctgagggtgtgcccaataatcggccttaccaaccctgaaggtaattgtggtacaaactagggcttgagaaccactgctgtatggcagggtttctcaacctccactcttgacattttgggcctggataattctttgttgagagggaaggaggctgtcctgtgcattataggaggcagggtcacggataaaatacagttaaatttgagtttcaggtaacagtgttgttcatctaagattcacatttaactggaagtccctgtatttcatctggctaccttgcctacctatatttttacttggtaaaaatagaaccttaattgtaggatattgagcatccctagcaactaaatgccagtagcacaccacactctctccactctagttatgacaaataaaagtatctccccctacttcttgagaatcacggctctataaggactttgtccagctgaaacccagtagcccattaggtatataggacagtgtactccgcagaaaactgccttgccctgaaaggctttgaacacagaaatccctgggaccaaaccgtgttaacattcaaaaagagggccacttagtgaagagtttgtatttgcttctccacactgacacttcacaaaggttttttggtcactgtaaagtgtgttccaaaacccctggatcagaagaaaaaaatcatgctcatttgtgagattctgaagtgaagggcacgtattagtttgtcattcattccacatatgagcaaattgagaaaacaggcaataagccatgggaaaatgggagtgctactctaggtaaggtagggtggtgtttctaacttgctttgttccccagatcctgtgtctcattcattcattcaagtgttaaatgagtgtcttctctgtgacaatcactcctctgagcagtgatgttagaacagtgaaaaagaaaaggcacaagagaaaaaccctcttgtcatttcagtgggagaaccagacagtaaacaaaatatatggcatgtcaaagtggaaagtgctaggaagaaaataaaggaagcaaaggggaccaataagactgttgtgaattcagttttaaataatttggtcagggaaggttggtaagtgagaaggttgtatttgagggaaaagccaaagaatatgaagagcaaattccccatgcagaattcaagggggaaaatatttgaagcagagagaatggcatgtgcaaatgctctgaggcgaagcaagcctagcacatttgagaatggctggagacaaaagaaagtcaaagaaatgaggtcaaagagggggtgagttcaacaaggagtaataaggtgcttgctggctgtttcttccatacctttatgatccagagagaattctcactgcaatttggatacttgcatatgtaatttaaagttaataaaaagatcgggaccaagtgtaagtgtttatggagctgcaaagagtccatctagacattttcagtgcattgctttgaataaagctacgtttaaaaacaaagtcaaatctttgaaaacaatgtcaaatttggggtagaatggcagaagaactgcatgataggaattgggaaaaaaaaaaaaatttagcccgttaagctagaatcctttgaggaaaata

SEQ ID NO: 1588 - DNA, 4001 bp, Homo sapiens
tctgctgcagaatttctcccatttcaaggttactaagaaatataagatggatttaaaatttatttgtgtgctcacccttctcacatcagcacattcaggattctttttcataactaggcttgacctagcacaagttctctatttcgccctgagacacgcagagacttgctgtgcagtcccaggtggacctggatctcaaatgttccaggatcgaaattacatcacagatgctcacggcataaagtctgccaaaccaggtctgtggactggtacaattcttaaagagccaataggaaaacagctgtctagggccaggagaccttaatgacatcctggaaaatataggacagtataaaaggactatagagagtcaatgattttgaaaattcccaagctcttaactacagcccaaatgcacatgctttaaaatgtacccacccccaaagcagtgcacagctaactgtgactttgcaagcccagctttagctccgcgcatccacaccgcagcctgccagaggtctgcagaccactccctactcagagtccagctaaccctaccggcctcccagcaggctgcagcatgatgcccagatccaagtccaggcaccagctggaggtcccttgggcctgccttcccatgtgccgtgttcctgaccggttgaacaataatcagagaaggccacaggaaaagccgcatcatgcccaccgcggccactccctggccctcatcaacaccggttgcgcgcacttctacggaagaacacagcatgcaggagcacgggcctgctacagaaggccgtggaacaagaaataccagcatgagagggcggctggtctgcagctttcaaagaaggcagaggctgcggagcttctgcagaggaagtggtgatatttcaacagccaactcccacaaaaacagacagtgaagaggagtggggcagccgcagctgccagcaccctagccaccttctccaggtattcggggcttgtctgtggccacagtggtaagcaggacacacctgaaagtaccttctggcggaaaagcaagcaccttaacgctgcccaatcggtcccttccttcactcctccccattcttaacaagagatctggaatggcgcggacagggaaagtttctcagattaaggagaaaactaagccaagtcaagacgccgcgggtggcctctctctcaactctcactgggccaactcctacctgcctcgcccgcgtcacctgctgtaaggcttgctcttgggctgtcagtgaaaaaacgactccccctgcctccaccagccacgccgggctttcagaaaagccccctcaactaggaaagcctaacttcaatccacccctaaaagtccgacccacaggtgtgacagacttcccatgcaggggctggggtgctcccaggaagtgaaggaaaaggtccccgacgacattgtcactggaaaagtgctggccacggcctccgccttaccctctccacccacgggttcggagcccccaggagcagtcagaccgatcaccgctcctgcagcctcatttgtttccggagagacacccacaagccagcccacggagagtctggactcgcccgccccagcacccacgcctcccccgcgcccggttccagcgccgcccccgacatccacccgcgggcagccccttaccgccggtatcctcgaagcgcgggggcgggcggtcccgcagcgctgcgctccagcccgcgccggcctcgtcctcctccggctcctgtgcgtccggggcgcggggcggtggcggggcggcccctgggggtcccgggggctcgcgctcgtcgtccgaggaggcggccgaggaggagcgcgaggcggccgaggtgctgtagaaggggttcccgccgctgtccgggccggactcgccgaacacgtcgtccgagatgtgcaggctctcgtagcgcgcgcgggcagcctcgagcagcgccggcgccctcctccgcgcgcccccgccgccctcggccatggccccggccgccgcccgcgcgcccgcccccacagtgcctcccagccgcacacgccgggccctgggcccgcgccgcggcccgccgccccccaccagcgcagcccgcagcacagcgcccgccgccccgtgcccggccggcccgccgtcttggccgcctcgggcccagcgcccggggaagcgccctcggagctcgggcgccgcaggctgcgggccgcggcgggaggcgagccgcgcgcggggctggcaggggcgacccagagcgggcgggacgcagaggctgcggccgagaccaggcgccgccgccgccaccgccgccaccaccgccaccaccgccgccgctgcgtctcctcggcgcccgccgcctccctgcccgccctctccacggcctccggcgctcggctgccgaccttcccgggcgcgagccgccagaggcgggccctgccgcccctcacctcccgcccgccggccaatggggagcccggcccggacagccgcgggggagctgggcgggcccggcgcggggaacgcccccaccctcctccgcggggcggggcggggcgcgcggccggggctggcggttagggggagggccgccggcggcagtgccggtctcctcctacagggacgcgcagcccgggaccgccacgcgcagcgcgggagggggagggcgggaccggggaacaggaggggagggggacccgggtgcttccagcggtccgggcccgcggacggagtgcgggccgatcccgctcactgtccccttccgcagtccgcgtgcagctccagggagctgtccgccccggtggttctgaaccaggcgccgccgaaacgctccaggtaggcggcgggcccgaggtcaccacacccgcggcggcggctgctgccgaggtttcctgggggtcactgccagctgcgccgcatgctcccataaatacaggggctgtccagcttctgggaatctcgctctaattaggagcccgcctcgccggtccactgttggtcgctggtcagatgctaactccgtctcgcttcagtatccctgtaatttaagggtgccagcactggagttaagtagctagtcattcctcatcatcgttgacgtgtggcatcttttgaactcaaaatatccattacttccaaatactaattactctcacacctctattttaatatctccttcacacacacacttgaaacactcatgtactgaaatattgcatgatcacccaggcttcagtgctctcataaacaatagcacagaaaggttgcatccgcccctcttccttgggcaggaatgtgtggtggtcatcctgttgatggcgatacgcgtaacggagactgccttgtcttcttgctcccctcctcctccttcgaataatgcaataagtcacactaatggtaaatgggccataaagtcactttcactctgaaataaaataaatcctcagagatgtgaagggcttacaaatcctactgagcattaactaaattgtagttacatgaaacagaaaggcatgttgcgatttctacgaatgcataaaggatgaaggaccattttgccgccaagtggggtcacttctagtgtcgagcaggaaccttcactcatgccctcccctccccagcccctgtggttcctccttccacatcaggggctctgcacaggcataggttcatgatcatcactaacagacaatatataaaaaggaaaagattcatggaactttccttgctatgtggattggctgaaaaatgaggaagtgcttgcaaagcatttttactctcttggaagaattatgccacggaaaatatctggtttccaacatacctatatactgtgctaaccagctgaaagttgttgaagagagtacaggtaatctgacttatcaaaaagggtgatagtaaagcataggttgaagatgcaagaagaagagtaagactccatagctcaagttcaaattctgcaattaggaattgtgtgaggctcctgcaagatttcatgtt

SEQ ID NO: 1589 - DNA, 4001 bp, Homo sapiens
ttcaccatgttggccaggctggtctcgaacctgggaccataagcttgtagctgggaccataagcttacaccaccatacccagctaattttttaattttatgtagagacagggtttcgccatgttgcccaggctggtctcgaactcctgggctcaaacgatccatctgaaccagcctcccaaaaagtgctgggattacaggcctgagccactgtgccccgccttaatgtttattgaaatgtctgttagtattctcagaattactaccaccaaaggacaaagttacttcataagcgcttatcaagttaaccaacactgcaacagttaagcaatcatttggtcagagcttagcagaaattgaaaaaaaaaaatctctagagttaaaagaaggagaactaaaggaagaaaccaaaaacagctgctatcgtggtagcagctgagagcacagctggcctcaccaatttctcgatgaaatcatccacagcttgcccagccttcaccaggaggatgatccgccggggcttcttcagcttggagaccatctctttcagggactgggcacccaccactttggttccctttgcctcattggccaagaaatcatcaactttggagacagtcctattaaaagcacagacctagaaggacaaaagtcctgagtaggagatccaggacacacaagactttcagactgtggccaaagtaacaatgacctttccattcaacccaagttctggggaggtcagacctgcctttgccttttcttcccccagctgtgggaggctcactgtaaagttatgtcacctcagtaggatgaaaacggcggacaaccgaggcgaaggccaactacccccggtgtgtcaggtagaatccacacccaacgtgttaggactcaaaatcaaatccaggaactggccggttcaacaggctctatctgttgttattgatcatcctggcgtctaagccactttaacatttagaagaaacattttcactctccccagatctcatcaggcaatcaagttagagctctacacagccagcaagggttctcctcccgcacccttcttctctacttaagacactaattcgttcattcgggctgtgaacctcacggacccacaggcacactccgcaggactaagttcgggatcggcccgcccacgcctacagggtgcttctcctttccatacaaaaatgccacgagcagcaacagagcacattagcaaagcacggccaggagacccgtaagctcccaaacctatcgccggcctcggctaaagcgcccgggaaccagagagaagacaacgcgcccacgccgcttaccacaaagccgtggtcattcatgttcagaattaagttctggcccatgacggccaatccgatcagcgcgatgtcagctctagagaggcagaaacagaacaaaggaaagagtcagcaccgctcgacgcgctgcaacccaggggtccggtccttccacatttggccgtgactgggagtctgcactttcctccgcgcctcccgcgggcccccagaagccgggcgcgcacgctgcagagcctcggccgggcaggcggcccccagccccgccctcgcgcccggctcccgctggcacgcgtcccgcaggtgtccctgcagactcggcgaggcctggccgcgcctcctccctggccctcgaagggacccgccccgccccatgcctgcgcggccgagagggcagggggccgggcccgcagggaaggagctctgggcccgagacgccgtagggccagggtcacagagccccaagtgagctcaggcgacccccagggtgggaggcgtcggagagaacgagggagatctcgacccccaaagagttccccgcccgctgaggccgagccgggctgcccctggcgagtcactcactgggccatggcggcggacagagcagaaccgaagagcggcgacgcgcggaggacgagtgagggaaagacccgcagcggctccctccagaaactgcggccgctcacgcccggcttttcggcgccggccaatcgaatggaagggggtggagccatgaagccacaccattggctctccccgacgcctgttagaccatccgaggcaaacgtgcccgcccacccccgggggccggatcagtggagcgccgagcacctagatgacattgccccggcgaggctccgggctccccgcccacgcgcagagctttccgctcgtcccagctgcacctcggtcctgcaggccgtccgcctggcgcagctgtagccatagcaactcacgcaggaccgcgctttacagtttaccaggcactcggacgcctttggcgcgagcgcccgtcgctccttcctcaggtcactgcggtgcaccgtgcgggtccgcgtcgtgtcctccgctccggagcagggaccgggcgtgctcgttcagtcctgtgcgcactcggaatggggccggggaaggctgagcctcagggcgaccctgatgtggagccgtgcgaccgctcactgcggttgaagagacccaggcgcagacagcgcaggcggggtatgtattggttggagtatgatggggtcaggacttgagtcttttacccaggcccggagttaacggtattgaaccccttctcattttgtagaggctatgtgacccgcgagatggaccaggttaaatgcagaggcagatacaaaaaaccagccatcttaagccagacatttgcaaagtagccaagcagcgcttcttatcttactgagtcccttcttgctaggaggaaattgttattcagaagtttgagttttagattttttttgttttttttgagacggagtctcgcactgtcgcccgggctggaatgcagtggtgtgatctcagctcactgcaccttccgcctcccgggttcaagcaattttcctgcctcagcctcccaagtagctgggattacaggcgcccgccaccacgcccagctaatttttgtatttttagtagagatggggtttcaccatcttggccaggctggtctcaaactcctgacctcgtgatccgcccgccttggcctcccaaagtgctgagattaccggcgtgagccaccgtgcccggcctttttttgatgtcattgttgagatggagtctggctgtgtctccaggctggagggcagtggcgcgatctgggctcactgcaacctccacctcccaggttcaagcgattctcctgcctcagcctcccaagtagctgggactacaggtgtgtgccaccatgcccagctaatgtttttatttttagtagagacagggtttcaccatgttggccaggctggtctcgaactcctaacctcaagtgatccacccacctcagcctcccaaagttctgggattagaggtgtgagccactgtgcccggccggtttttaatttttataaagaccaggtctttgctctgttgcccaggctggagtgcagtggcatgaccatagcttactgcagccttgaactcctgaggtcgagcaatcttctagcctcaacttcctgagtagctaggactacaggcatgcaacaccatgcccggctaagacatcctactttaaaatatgtcaaacttcacagcacagttctttttttaaaatacagatttaatgagataatttacatgtcatacaattcaaacattgtaagtacacatttggatgacctttaatttatactgttgtgtagccatcaccataatccacttatagaaaacttccatcaccccaaaacgttcccttgggcctatttgtagtcagtctctgctctcacccccagccaacctctgatctactttgcatggtttttgccttttccagaaatttcatagaaatggaataatagcatataatttttttggtctggcttctttcacttagcatcacgtttctgaggctcatctgtgttgtaggtatgagtggtttgttccttttcattgctgagtggtattccattaatgcaattgtgtcatcatttgcttatccatttat

SEQ ID NO: 1590 - DNA, 4001 bp, Homo sapiens
tcctcctccccaggtcacctaacgtcttctagcaagcacacagaggagaaccacagaagtctctggccttggcctgcctctgccttccacatctgcccagagaggcctttgtcctcccacctcccccagcctccctccattccaggagcactgcagtctcacctgctgccttatctgggcagtgccacctttcctggttcaccggcagacctactaatcaaaccgtcggtacccagcagagtgtcccataccaagacagttgtgacatgttgagctaacacacatgtcttaatcacctattggtgccagacaaggttcttgaaacagaaatatacagattattgtgaccgccttcaaaaactagacgttttagagatgttttactgtggattagccactgccagcctgtccttatcccccattgctcccattcagtaccaggggtcctgggagcagtagccaatggcagcagtgacattgttagcaaccccatctcccacagaccagccctgtggttacaaagcacatccaaggatgctatcagaattgtggcttaaaacaacttcatgagttaagcaaagcaactatgctgtctatagagaagggaaaccaagtcttagggaagttaggttacttgtctaacataacagaggttttaagcgtagatttagattccaatcagaatctctggccccgaagcccctgttcataacaactgtactctgcagcctccccaaagttgtcagatgaacttgggttagtcactgccacaatgtgacctgtttctcttcctacaagacaaagtcactgagggtctccaccatgattctgaggttctgtccttctgtgaaatcaagagcaaatacatgaccaggaccccaagtccaaggtgtgctggagagactgctgaggacaggagcccacctcagcaggcagagggcctaagctgggctgtgaaggggacacagaggactggggagggggagggaggagcccggagaggacactttacaaatgaaacccacaggactctcagagtggaagagcagcccgcaggccaacactgacacctggcagggcaggaaccaggaggcagggatgaggaccacacaaaactccctgctttgcttgggcaagttaatttccccatcagggcctcagcttctccattcatacaatgaaaggcctgtgagtttctctaacactaactccaggtaatcccattaaatttgctgtctgagtagcagaggacagagagaaagctatattacatttttccttccgaagggggtctgtgtatgtaaaacaaactgaaaaacatgtcatatttaagaatcaccaagctcactttcattttaattcaacagcatttatttaatgaacattgctatgtgtctactcttatgtatataacgataagaaatcttcttaatctagagaaacggcattgctactcttggggaatttgcttttatttacaaatgtagacccaagtgctgggtttaactatgactggtataataacgatggtgacaataattaaatcatagctacaaattacccagcactaactacttgggcattgtgctaaatggcgcacacttgtgatctaatttaatcctcaaaaacaactctaagaaatgagcaatattatcctttcatcatgggagcaaataagattccaagaaattgaataacttgttgaagaccataacaaaggacaggcaaggatttgaaaaaaatctgtaaactctagaacagggctccaaattgcaaagctacactatccactaacaaagtgaaagcactcggatgggtttctattattaaacttgagaacggtcttctcttgctcatcaaaagcacttctgatgcaagtaaataaaacttaccccaagcctggagacccagaatgaagaaggcaagaagccatggcagcgtccccatgtggtcccaggactctgaccgggagagtgtggacggcagccctggaagagaggctaacagttaacacaaccatgctaactctgcaagtggagcacccacctactatgtggcaccactgtctgcctcccctaccatcctgtggcttcctgagggccagcacctggctcaggcttctcggggccccttaaacacatcaggttcccaataaatgtgagggcactaatggctatgtctagccaccgactccccacccacctcctgttgccctgggcaactcctggttcctcatagaagcgcagtgcctgatcttaggcctttcagggtagaaaataacaatttctaaaatcctcaaggtagctgttatgaaaaaacactgtgtatttattttcatatctagtggtgcaatttcatatttgattcaatttttataggtaagaacattgaggctcagatggagtgaactacaagcagaagcaggcttggcttcgccccctgcaccatttgagagtcccaggtatgtaaagtcattcaattcagtcatctactctgcaaagatccctgacagttgttcgactaacctcttctttagtgagaatcataataacagctaccacttactgactgcattctgtgttccaaggtttttgctgaggactccatggatattcactaagtagtctcacaatgacctatgagacccgcacttatcatcagaacactgggcctcagagagtttgagtcacttgtcctaagtttcccagataatagggtcagagccagattcatacccaggtctgtctgactccagagcctctgcctgaaacttcacaacctgtttgagtttctgatggacgttctcaatgtgggcccaagaggttgaactataggatcactatagtcttttccagctccaggaatctttcctgctctttcaggtagaagtgaattgcttactcatactcagtcagactgaaactttagctgtatgagctaccacccaaaacatcaactttccccccaattttcctactgagaaaatataaagtggagtttgaaaccaaatgggatagatcattgccctccagggtttttaaactgcaatcagcagtccccaaatggaaaatttttaaaaccatgtcttaagagtagaacatgtggaagcctcctgggtcaggacaagcaaccacttagcagataacacccaggattccattcattcaggaaaactgcagtgaagacaaaatgagctaattacaaatgaggcaggcacctaataaatataaggaaaaatgttcagcctccctcgttagttaaatgagaggtaaggattcactttcccaagattgaaggcctgttaggagctggcctcctgcaaagctactggaagccactatcaattctggtttgcaccctggtcacttaatcactgtgcttccacaaccatgaaacgtcagtatggcaaatcctgccccaagctggtcatatcatacatccaaaatatcaaggcttcagcccagtccctgaccttgccagagacagaactgataatgtctccaatccacaccatgaactgcaaacactaagctggtaggataagctagagccaaggatttaccaccttggctcacattgctgtgcatcctgtatactgaaagaaacattagaccaggagacaagtgagacataatagataagaatttagggctctacagaaaaggaagaaattgggtagaggtaacctcagaacccacagccttgccaagaaagatccagcagtggtgaaaccaaactcatttagaagaatttagaatgaagaaaattttcttatttggagaaagagttccaaaaaacgagatcaggggagctttccctaccatgtacacattttaaccctatagacttccgtcccattgctgaatgaagacttctaaagaaatacacacacacacacacacacacactcaaactcacagatacctgtgggttctgtgctgttccagcccagcaggtcagggtgcagtcggctcgcccctgattggccagcagctccttcc

SEQ ID NO: 1591 - DNA, 4001 bp, Homo sapiens
ccgaagcaatggggaagcgtgtgtgaagaaggggttagaattacctgcacggctcagaccagttcccccgggattgattttagggacgtgtgctatgcccattctcctgtctgaaggcccatgggggatgggcagggtgttgattgagacccttacccacaaggagctttctcttattgacaagcacaaacccaagccataggctggactctgattgacatcataataacacaaatgtaatccttgctcctgtttatttgcttttactgcccacgtattgctatatcttcaggtgcattatctcatttaatcctcacagtgagtttaggaagtcataactatctcaattttcagatgggaaaataagggtttatagagcttaattgcttgtttaaaatcattcctagaggcagagcgaggacttgaatccaggtctataggctccaagttctgtgctctatgtacaatctattctttctccttaagagagagtaggttttgggggattttttcgttttgttttgttttttgtttgtttgtttgtttgagacggactctcactctgtcaccaggctggagtgcagtggctcaatctcggctcactacaacctctgcctcccgggttcaagcagttctctcatgcctccctcccgagtagttgggactacaggagcgcgccagatggagtttcaccatgttggccaggatggtctcgatctcttgacctccttatctgcatgcctcggcttcccaaagtgctgggattagaggcgtgagcaactgcgcccggccaagagagaatgggtttgtttttgtttgtttgttggtttgtttgttttttgagacaagttctcgctctgtcacccaggttggagtgcagtggcacgatctcatctcactacaacctccatctcctggcttcaagcaattctcctacctcagcctccctcctgagtagctggaactagaggcatgtgccaccacacccagctaatttttgtatttttagtagagacgtggtttcaccatgttggccaggatggtctcgatctcttaacctcgtgatctgcccacctaggcctcccaaagtgctgggattacaagcataagccaccacccctggccaagagagagtagttttttttgttgttgtttgtttgtttttgagacaagttcttcctctgtcactcaggctggagtgcagtggtgggatctcggctcactgcagccttgaactcctcaggctcagatggacagtaggtattttttaattcctattatgagactttaggatcacccttctcggttgctttttggcccagggaaagaaaacttaccccaggcctggatacccagagcagagaagacaagaagccacggcagcatccccacgtggtcccaggacaccaatctggagagtgtggatggcagcctgagagagacgctgacagttgttaacatgaccattctcaatctgcagagcatcccaaaccctgactgcagtgggtgccatctgcctcctctaccatcctgtggcctcctgagggccagcacctgcttcagtcttctcagggcccccagcatacagcaggtgctcagcatccctgtcctattattacccgaggaactcaatttcatcacgtgcccacggcgtgcaaggctgtgtacacacttgcacatgcagtcttatttaattagtcctcacactaatcctgtcatgtaagactgttaacccccatttttacagacaaaggaagtaagatccaagaatggtacaaccgagaaatccagactcatatggatgggtcttatgcagagaatcccttcccagctgggaatatgccagatgagggagatataggagtaggaggggttcctagttctagggcagaggaaatccaatccttaacactctttctggtggattccagtccctttgctggaagagggcttctgaagaagaaacacatactcaactcacagatatctgtgggtcctgtgctgtcccagcccagcaggtcagggtgcagtcagcttgcccctgattggccagcagctccttcccttccagacttggcctccaggccctgcccttcttcaccaactggcgccttctcctccagccttcactctccctagccctagagggcactccctccctgggaatggagcactcgggctctagcttcccagagagaagagagcccaggatccctaacaaaagatggggagaagggaagacagagggcaaggctctgagccagctcctttcacagcacctggagaaatgcaagtgggaccagactcaggctgagagcacctggggacccgccctgtgaataagcccaggtagctcctccctgggaaagggcaagattgcccaacactcccgagagctcgtcctcagccccaacctgggaaagcctgcagggcctgagggttgtgtctgcaacatctagaaacttcctgcctgtgaagttctgctccaggagcctgaagactgtggattgaagtcactcaccaacaccaccttttaccagggtcatgagcagggtcaggatggacagagagaaactgggaggtacaatctcaggaaacagctcacgatgcctaattctgccccaatagcttacatgtctgcccatcatcctcccgcctgccactccccaccgtcggcatcaagctgccacctaccacagaaagcctcccacaaaccaagaatctccagctcctcgccatgttccagttgtcacctaatctcattccacattctgcaacctggacttacagcccttgagtcttcacagaggaaactctgcatgacactttccaagaacgcagtaggatgcagtctccacggggacctgcagagcctctcatgtcccggagggtggggcagcctccctagacacttaggaagtgccctgaatccagaacagttgctctcagtgagctgcagtcccactctcagactgggctccccaggagcgctctctggatggggcccattgagcatgcgccaggtctacctggcattcatcccagtcatgcacccagacccaggctggagctgtgtgatgagcaggggctgctgagctctgtcctggggtgagggtgaatgtggggcagagccagagacagagatgaaggagaccaagaactgcagcctgggaccagcactgtagggaccctggtagtttccccagcctggcaacatgctgtttctccatgccttttgctggccgcccatcctaaataagtagaacagttctcaaaatgagaaggtttctgggcttgcatccggggcaccaaggacttgaggagactcggttcccctttttggagcggcttggggaggggaagcccaagaagagattgggtggtggctgccaaaggggaccaacagattctctgccccatccagagaccaacagattcttgaggactaacagactgagggctgtccgggacgagggcatcgggagggaggaagagagcagtgtgggttgtccctctctgattctgtgaactcagaatcccgagaggacctcctaagtcctaaattatctggcccccagccccatctcactccacgctgccagagcaggctcccagtgctctctgccccacctcccaccatctcaagacccttcccaagtgcccagcctcgctccccacctgcgcccagaggctccacttcagcctggcatctttggaaagggctccgtgactagttgggactggtagaggctcagagtctctcttctccattctagcacctgaatgaattgtaattataatctcctcaagagcagttcccaagtctatctctttacctgcctttaatactatcattatttatatttacatttttttgtcctctgtcttaagcctccctccagctgtgaatttcacagaagtgggaatttactttattctgtagtctcagggtttagcttagtgtctggcataatgctgacacatgttagaaactcaataag

SEQ ID NO: 1592 - DNA, 4001 bp, Homo sapiens
gtgtgcctgaattacacattcctaccacttcttccacattcttcagctccacacaaaaatgaaatggagccaaatatatcacagcaaaggggacagtgtaccagatccactcaacagtctagatatatgtggagaaataatgttccattcgttccctctcaaaagattaaaagcatcttaatactgttccctttgcagctctcctcaaagaaaaaatttatggcatgtcacattttatcttaaaaatgtgtatgcttcataataatttcatatttgagtgctttatcagcaacttttacatgagaggcattcagattctgaaactgagtatcaggaaaactctaattataaacaacaggatctacaaacactttaaaatttagtgtggtggtacattttattttgttttgctttaattttgcttctgcaaacatacctgctcagcatattttgaaaatacactgaaaatgaatgtctaacacacttagttgcaatactacattttatctaccaagaatcagaatctcttccagaaaagaaatacaccagattttaaaatttgcaggtactgaaggactatgtgctccaactaattgctaatcattatctaaaacactaaaaatgtatttctggtcccactgaggaatttgcagagcaaaaacatcaatgtcctgatgcccaccttcctggaaaccagtgggctgcacgaattgttagattatcaagatcaatgcgttctggtacaatattccttctcatttgcttaatccagccaacacggtttttcacgatgcagaggtttagcagagccgcctcatactatagtcttacaggagttattatctctaccctgctgcacaaattcaccatgcgcacggcttctttgtgtccaaggtcattataagcaggtgcccctgtaacaggtcccctcaaaaggctcacacctaacattttccaacccctcctagcatttctgcgtgactaccaggatccataaacaacagcatgccctggcttttgttttcctgtttgacaagtgactgaacttcaacaagaaagccattgaaagaaaacaaaatcctcttctctccaccattcagtagagccctcttacacaggacagggtgccccttgaagctagttagaatgtagataaaacagcttaagaccgggagtgtgctttaaatgtctaaaaagcaacaggtactttgtcaagcaacagaacacagcataatacctaagaagctgaacttaacattcctgtatcccagtgtggctaatgtaatttctgaagtattttcacaatatacaatcactgaagttacaatgaaacttagctggatgttagtagaattgaagtgtataccacatataaatccttgtacgtttgtatacttctgtaaaattaaggttatttggagagccagaaacataacaatacttatcatatacccaccccattggcagctgccatctgcactattgtttctattgctgatttattaaagtaccgcccatctccaccaaccaccagtgatgatccctggcgatcttttaggtctatggaaaagaatatactctggatgaaattctccagatagcatggcttttcctcaaaataataggttttcttccgtaatccacttgttcctggtttctgatcgtggtagggagctgtagcaaaagtcaacagagggagaggaccttcttccatttttctatatgtcccagaaatccattcttcaaaatcactcatccttcacttccaccgactggctcagtgagggtgtccagaaagcagtcaagggactccaaaataggtctgtccaacctgaagctgcaacagtgtcgtatgagtaactaaaatagagggtttgcatggacgatcactctcaatgagaaagcttggttaattccttgttgttgttgtcccttgtgaacaagttaagggccacacacccactcgcacccacacacaaagcaggtcttcaaagttgttttgatgaggacacttctgcccacttaaccaagccaaatacccttcaattatttttgtctcatttccccgttagggtagagatagctccaaggagtgctgcatgcagccaacttcagctgtaaacaccaggtggctgacaggctccactctcagagcccaggcaaagagggcaaatgcagtcccacgaagcagatttgtgaacaagacaccctggtgtggctctcactgctcctgccatcccttaaaccagagcctctctgggcattcatctctgagaaggccatctgcagctaaagttgccccatgccacctagcaagttaaaggtcaatcttaaaatggaagtgagggagcttaatttacccctggttttcttacatcactgtcattttgaaacctaagaaattatttttacttcacacatgcaatctatcaggaaaaaaattatctaacagatttattcattggccaccaaagatttaagaaaacagtgttcagttctagaagaacagatacctccaaagttgccctgaataaccaacagcttggtcattcctttgaatatacaaaaaaacaggcgtgaggatgcaccaagtccttaaaaatgtaagcaaaacacggaaaaaatatacatatgtttttctgagtacacagggttggatcgagtttttatttagaaaaataatatgaacatgagattcgtttttaacattttctcagttttaagcatacttgacttttaataaaatgtttttagggaagcagtttaagtcctttgtatttgaagaaactaggatgtttaaaaatattttacctaaataaatttcatatctaattccatttgatccctgagattttattaatgatctatttaaatacatacatgtgtgttctcagccaggcatggtggctcacacctgtaatcccagcactttgggaggccaaagtgggcagatcacctgaggtcaggagttcgagaccagtctgttcaacatggtgaaaccctgtctctgctaaaaatacaaaaattagccaggcatggtggcgtgcacccgtagtcacagctacttgggaggctgaggcaggagaattgcttgaacctgggaggctgagattgcagtgagctaagatcgtgccattgtattccagcctggacaacagaccaaacatgcactgaggaattaaggttttgaagggaaaagtgaatcatcccttgagcaacaaaatctgagtctttttatactaacttgtcaagtagcatccgaaagtagacaggcactggtagctgccaactgccctctgtcaagaatgccgctgtgttccggggctgctctgcacaagaccagcaggaataacaggctcacaagcagaaagtaggccactggcaagggagccccttcaaatgacaaatgggcctggcccatgtgcaggaaatacctcgagacataacattaacacaattcacaaaacacatctattatgttgaaaaccagtcagccaaaagacgactactttttatagcttattttgggctcttaatttgtttttaaaagtcaaattctttagaaattaattgaaaaagcaagcatgctttattaacagtttacataaccactgtttttcaacgtactataaatgattttttaaattcctattttgtaagttctgtgccaagttttccctggttttatatgggcttgtgaattaggctggcatgtgtgtcttgacatatccgataatagatccagatttataaaatatcattccaataatcttttcattggaataacagagcagccaaccacataattggtagttttcttaatgagatcttgaaatcccagggtaaatttgggggtacttgggcacaaggatattcccacatcccataccaaagcctctctgcccacataatacaccacactccagcatagtctctgctggcagcctcccagtctctcggtgaagttctttctgagggcagaattacgagagcaacatttt

SEQ ID NO: 1593 - DNA, 4001 bp, Homo sapiens
tcccaaatggacaaatttccatctgggcacctaaaattcccactctgctgtaagctccttaaggacaactcttgggtctgcatcatccttttagtccacacatttctctgaacatggtattcaacaggatctgttgaatgactgactgaataaatgaatgaatgaatgaaatgcaaattcagcacaggtggtaacagggaaatgatctactgggatacagctattgtctgttcttctttcatgggaatttgcgcttgtctgaaaattcaggaccacaaagtaaacaaatccaggcaatcttctctcactgatgcttataaatgtttggcccaggaaggcagatgtagatagagcccagtttagattttggagcctggaaaacagatcttcaagatcaagggctgttcattcttcattctcaggagctgttcaagttcttgggattggcagatctatattggactcttagtgctgccattatagtttttgtaaattatttaacctacctaagcttcagcgtcctcgttggcaacttgaagatacccataatagcatctaccttatagggctgcaggaggataaatgagacccagaaatgaagcgcttaccatagtgcttggcaaatagtactcaatgtcaacaaaataagataaataaagtactattaaaatgaataaaaatatccatttcaggggatgcgttccagaagaattgggcataagtcaaatctcacttaaaatatagaaagaaaacttggtcctcagaactccttagaaatgttttacaaaagtaagtgaataattagccccaacttatcaatccactttttttttctttttttttttttttgagacggagtctcgctctgtcgccgaggctagagtgcagtggcgggatctcagctcactgcaagctccgcctcccgggttcacgccattctcctgcctcagcctcccgagtagctgagactacaggcgcccgccaccacgcctggctaatttttttttttttttttttttttgtattttttagtagagacgtggtttcaccgtgttagccagaatggtctcgatctcctgacctcaggtgatccaccaccctcagcctcccaaagtgctgggattacaggcgtgagccaccatgcccggccccacatttccatatatcagatttactgaaaaactttttttttttaatttcccctatccgagtggacccgcccaatcaagtcagttaactttccttggccgggggcggaaccaaggtgttgcggtaatttcctggcctgccacgactgcttgcttgcgtaagggcgtctttgggtatgttgccattctaatgaaaattcagctccagccccgtcggtggaacagatcccgggcaccactgggcagagactagatgtttcaaacgcctgccccccagcaagcaggccgcgcaaagggcaggagttcggaaccaaggcaaactagggggcggggagaaaagattggcacccgcctgctgagatctgccaacctgacgccccagggggatgggtgctctcgccacccttgccccacagtgtcgggctccgagccagcgggaagcgccagtcctagccgagaatagcagaggagcgggcgggatgcgagggggctctgggcgaggcggcggcagtctaacctttcctgcttaaggcgacagcactctgcgccgtaatcgtatcttccaaggctgcaaggttagggcaaatgtcagacgcctcgggaggggcgggggacggggagagggaaggcagcggctagagacggagagtcgggcgtgaccttgggaggctccgcgcccgcacctcccggcgccccgggagtcaggcgagcaggtctgccgggtcccgtggccactttccccagcccggcgacctccgtcgggcctccaggccagaagagcgagcgcgaaggagagggaggagcgggaggtggaaaccgaggcggcagcgcgcggaagcggccggccccgagcgagggagggcgccgcgggccgcacgtcgcacacgcgccagggtgcacagcggcgcggggccgcgcatcccttaccccgttggcggcagcgatgcgagcgatgagctggatggcctccttcatgtagaaccggccgtccccgcccaccaccagcgtggcctcctgccgctgcgccggctccacggtggagatgatactctggatgaagttctccgcgtagttggcgctgctctggaacaccttcacccgcttccgcagcccgctcgtgcccggcttctggtcctggtacgcctgggtcttaactgtcacgatcttcaccatggtggcgacttgctgccgggggtcagagcggcggacttggctggcggaggggcggccggctgaggctgcagctgctctggggtgagggcacggcgggtgggggctacgccgcactctaggccggcgtttggccctcctccttaaagggacaggggacagggccctccctccgcgccagcccacctcctggcaggtccggcgggaggggaaaggggagcgccggtctctaggcctcctgtgaaatgggtggagccttactgatttactctccccttcggaatcctatccactgtaaaaagaggcccgcaactcctcctctaagtgttggggcagaggttggggtaggaacccggtcatagggcaaggacgtgaggcagggtggaaaaaagtacagggtagaatgatttccagtggtttggcgaatgcatcgtgtgtaaatagctttctggaaacctgttgggagggtcagaagtgccagccccagctcgatttcatgagtcgtaattctttctatttctccctaaatgtgagggcatttgagttccgtaaaggagtcgactccaaatgtttcctgctgcaccacacacttgactaccattggtgacggtgacttagctatgacttgctgagtgtagcgtttctaaaccttactaaactctgggttttatttttcccctttttatgcttacaaaactgaaattcaaagaataaaatgccttgtctcattgccacacagctaagtccatgcgggaggccaattcaggtggtctggctccaaaaccagggctcttcccatgatttgcccgctgtgacaccaggttggcaactaggaaatgtacaagcaggacttgacaaatgtaggagcaaatatatggtaaggataagtatgaacaccatcaaaattagccagttactcatgtaatagaaataaagtgaggagatcaacaaacaaggactgacatggctggaaaagtttcacgggggatagcaaggtcaaccaaggggatttgattattaagtaggaatcttcagtctttcttgcttttcggtttagtatctcccttaatttgatgagagtgattgtctcctctgttcaagaaacctgtcattttggtaaagtggcaaaaaacttggctttacaaggtgtgtgctcttgggaaagttagttaatgtccgtgggcatcaatttccttactgtaaaataaacatatcacctactttggaatatttttgcaagatttaatggggttttgtatgtcagaaattctcagtcatggatacacagtagaatcctactgtgacccatgctcacagtagaattacttgaggtggtttctaaatgacccagtccaaacaaattcaatcataatcagctgttagaagtaaatcatctagcctggtgcctgaaacatagaggccttcaaaaatattagctccccttccccaattccaaaaccagagcatatcattcacctgtgaattatattcttttggtagttaattggtatgtcttgatcaagcagggaggcgaacagacccataagagtgcagactctcacaaaccaagtgttgatatacatgctcatatagtacatgctatgtagatacagtgtgttgatgtagtcactatagatgagtttcggtggcaaatattatgtgaaaacggaaccctggactgct

SEQ ID NO: 1594 - DNA, 4001 bp, Homo sapiens
ttgaagatacccataatagcatctaccttatagggctgcaggaggataaatgagacccagaaatgaagcgcttaccatagtgcttggcaaatagtactcaatgtcaacaaaataagataaataaagtactattaaaatgaataaaaatatccatttcaggggatgcgttccagaagaattgggcataagtcaaatctcacttaaaatatagaaagaaaacttggtcctcagaactccttagaaatgttttacaaaagtaagtgaataattagccccaacttatcaatccactttttttttctttttttttttttttgagacggagtctcgctctgtcgccgaggctagagtgcagtggcgggatctcagctcactgcaagctccgcctcccgggttcacgccattctcctgcctcagcctcccgagtagctgagactacaggcgcccgccaccacgcctggctaatttttttttttttttttttttttgtattttttagtagagacgtggtttcaccgtgttagccagaatggtctcgatctcctgacctcaggtgatccaccaccctcagcctcccaaagtgctgggattacaggcgtgagccaccatgcccggccccacatttccatatatcagatttactgaaaaactttttttttttaatttcccctatccgagtggacccgcccaatcaagtcagttaactttccttggccgggggcggaaccaaggtgttgcggtaatttcctggcctgccacgactgcttgcttgcgtaagggcgtctttgggtatgttgccattctaatgaaaattcagctccagccccgtcggtggaacagatcccgggcaccactgggcagagactagatgtttcaaacgcctgccccccagcaagcaggccgcgcaaagggcaggagttcggaaccaaggcaaactagggggcggggagaaaagattggcacccgcctgctgagatctgccaacctgacgccccagggggatgggtgctctcgccacccttgccccacagtgtcgggctccgagccagcgggaagcgccagtcctagccgagaatagcagaggagcgggcgggatgcgagggggctctgggcgaggcggcggcagtctaacctttcctgcttaaggcgacagcactctgcgccgtaatcgtatcttccaaggctgcaaggttagggcaaatgtcagacgcctcgggaggggcgggggacggggagagggaaggcagcggctagagacggagagtcgggcgtgaccttgggaggctccgcgcccgcacctcccggcgccccgggagtcaggcgagcaggtctgccgggtcccgtggccactttccccagcccggcgacctccgtcgggcctccaggccagaagagcgagcgcgaaggagagggaggagcgggaggtggaaaccgaggcggcagcgcgcggaagcggccggccccgagcgagggagggcgccgcgggccgcacgtcgcacacgcgccagggtgcacagcggcgcggggccgcgcatcccttaccccgttggcggcagcgatgcgagcgatgagctggatggcctccttcatgtagaaccggccgtccccgcccaccaccagcgtggcctcctgccgctgcgccggctccacggtggagatgatactctggatgaagttctccgcgtagttggcgctgctctggaacaccttcacccgcttccgcagcccgctcgtgcccggcttctggtcctggtacgcctgggtcttaactgtcacgatcttcaccatggtggcgacttgctgccgggggtcagagcggcggacttggctggcggaggggcggccggctgaggctgcagctgctctggggtgagggcacggcgggtgggggctacgccgcactctaggccggcgtttggccctcctccttaaagggacaggggacagggccctccctccgcgccagcccacctcctggcaggtccggcgggaggggaaaggggagcgccggtctctaggcctcctgtgaaatgggtggagccttactgatttactctccccttcggaatcctatccactgtaaaaagaggcccgcaactcctcctctaagtgttggggcagaggttggggtaggaacccggtcatagggcaaggacgtgaggcagggtggaaaaaagtacagggtagaatgatttccagtggtttggcgaatgcatcgtgtgtaaatagctttctggaaacctgttgggagggtcagaagtgccagccccagctcgatttcatgagtcgtaattctttctatttctccctaaatgtgagggcatttgagttccgtaaaggagtcgactccaaatgtttcctgctgcaccacacacttgactaccattggtgacggtgacttagctatgacttgctgagtgtagcgtttctaaaccttactaaactctgggttttatttttcccctttttatgcttacaaaactgaaattcaaagaataaaatgccttgtctcattgccacacagctaagtccatgcgggaggccaattcaggtggtctggctccaaaaccagggctcttcccatgatttgcccgctgtgacaccaggttggcaactaggaaatgtacaagcaggacttgacaaatgtaggagcaaatatatggtaaggataagtatgaacaccatcaaaattagccagttactcatgtaatagaaataaagtgaggagatcaacaaacaaggactgacatggctggaaaagtttcacgggggatagcaaggtcaaccaaggggatttgattattaagtaggaatcttcagtctttcttgcttttcggtttagtatctcccttaatttgatgagagtgattgtctcctctgttcaagaaacctgtcattttggtaaagtggcaaaaaacttggctttacaaggtgtgtgctcttgggaaagttagttaatgtccgtgggcatcaatttccttactgtaaaataaacatatcacctactttggaatatttttgcaagatttaatggggttttgtatgtcagaaattctcagtcatggatacacagtagaatcctactgtgacccatgctcacagtagaattacttgaggtggtttctaaatgacccagtccaaacaaattcaatcataatcagctgttagaagtaaatcatctagcctggtgcctgaaacatagaggccttcaaaaatattagctccccttccccaattccaaaaccagagcatatcattcacctgtgaattatattcttttggtagttaattggtatgtcttgatcaagcagggaggcgaacagacccataagagtgcagactctcacaaaccaagtgttgatatacatgctcatatagtacatgctatgtagatacagtgtgttgatgtagtcactatagatgagtttcggtggcaaatattatgtgaaaacggaaccctggactgctagtaatgagttctaatatttgcacaggagtttacagagcagtgtaatcttgtgaattaaataatataatcaagcccattttatagacgagagaattgaggattggatggtgaatgtaatcaaggttatctaactccacaaaatgaaaatatagcatagattcactgagccttcaaaatacctaccttagagttgtatggtttagatagagaatatacagctcctaccacagtgctaataagtaagtcatcaataaatgataacttgtaaagtcacgggcccaaattcagatctcatgccctttctatattcttcagtatctttggaaatatgatggagcttttcatttaagaggaattgatctatacttctctcaccccagaagttgtaacaattagctttaactgcataacacaccagtctaaatctgagtggcttaagacaacccccattcatgattatagttcatgattctatgagttaactggcagttctgctgttctggacagggttactgtggccccttatacagac

SEQ ID NO: 1595 - DNA, 4001 bp, Homo sapiens
tggctcacgcttgtaatcccagcactttgggagaccgaggcgggtggatcacctgaggttaggagttcaaggccagcctggctaacatggtgaaaccttgtttctaccaaaaatacaaaaactagctgggcatggtggcacacacctgtaatcccagctactcaggaggctgaggcaggagaatcgcttcaacctgggaagtggaggttgcagtgagccaagatcgtgccattgcattccagcctgggtaacaaagtgagattgtctcaaaataaataaataaatataaataaattaaattaaatagtcgggcacagtggctcatgcctctagtcccaggcatctgggagcctctggtggaaggatggcttaagccaagaagttcgaggctacagtgaactaggagctctccactgtactcaagcttcagcaaccaagctagactcttgtctcttaaatgaaacaaacaaacaaattttaccttaagctgattctagcaatgcagtcttccaacaggaggacatacacagttaccattatctagccaaatttgatcgaatccacaatccacgcagttccgcggtttccggtaagaatctaccacacctcatcccctaaactggcttcatttctaaacgggcttcattccttttttttttaagatggggtcttgctgtgttgcccaggctggtcgcgaacttctggcctcaagcgattctcctgcctcagcctccagaatagttggcattacaggcgcgcgccaccacgcccgaaattcatttctttaatttggcgaaaaagtaagtgacttctagaagccactgggtttctggttcctctataaagcaaattcttccactgaaggactttttccttccactgtttgttttaaaaagaacaagaaaaggaagaggttggaaggagcgaggagctgagtgtccgaatgaagcactggagggttttttttttttgcaagcaatcagtgatgccctgtaagtcactctcctccgagatttgggaggtgcgtgaactgccattctaccattcaccactggttctttggtccaccgatcacagatgtgagctgcacagacatcgcagcaaattcgatgccttcccggtttcccggagccggggtgtagagggtgggagagaggggtcgcttcttttccttaatctcatctctccaccaagaaaaacgtcgggagtttcgtgccctgaagccgcccaggctgatgtttgaaagttaaataataacctccaggtttttacagaaactccgcctggctccgaagcccccgttctgcccagcaggggtgcagaggtctgaggcaggacggttttgaaaaatgtactttgacccgatccggttactgtaaccggatccccagggagcagtccctgttggggaccgggggaacaggctcccccgtggcggagactccatgcacggacacaaagggggagcaacgcagcccagacaaaagggcccagccaagtctcggggggcggagagggcgagcctgcgcgggccctgcctcaggcggagaagcccgggttggaccgttgtgggagggccgaggagggaggcggcggccccgccccgccctggcccgaagcgacggcgacccgggccgttaccttctgcccggaccgggaccctctcgcagagccaagaaaggggccgcagcctgagaggaggccgcagcctgatactgagcgcgtcctgctcactttcccttgctcgctgaacttacccagatctccgccgccgcctcctcagcctccacagcagcctctcccggaaatcctacctggcccgttggccgccaggcagcagccggagcccttggcccccggggagggggaaaaagggagccggctggacagtgtagggtaggacgtgccgccgcggaggcttacgggacttgtagtccccagcaggggccggttgcccggcaagctgaacaaaatggcgggaagcgtgcgtcctttctctccgggcggtcgtcctccttacgacctctctgggcatgcgctggccgctctgcgcaccttgtgtgtaaaagaacttgggcacctttcctggtactatgggaggcaaaggtctttgggcttgggaggacagggttcaatactgggctccaggcagtacccaaaaagggaactgatacaagagtgttgtttgagaaaactgtatccctgactggccaaatttcaatcataacctccccaaaggaaaaactatttattgaggaccaatttgaagtgcaaaaaacgtacaagcaagttatctaccctcagtgttgtgcgtaagaaacccaggaatcattctggacacttccctcaagccattaagtccagtcattctacatccccagtattttaattcatttcgatatccttcactactatcacctagtgaaagccaccatcacttctctccaagtctcagtagtttcaggccctaggctatcaccctccgaaaaccttccttgctgctgccagaggacccttctaaatgcaaacccattgtatcacacaacctaaattagacctacatgtaaaacttgaagctacggcacatctagaggacattccaggagaaaaatcgatgtgacttttcaaatacactatccataaaattaaaaaaattggccaggcgcggtggcgcatgcctgtaatcccagctactcaggaggctgaggcaggagaatcgcttgaacccaggaggcggaggttgcagtgagccgagatcttgccattgcagtccagcctgggcgacagagcaagactccgtcgcaaaacaaacaaacaaacaaacaaacaaattatccggggcctagtgccaagctcctgtagtcccagctacgtgggaggctgaggtgagatgatcacttgagcctggggggtcgagatcgcaccagtgcactccagcctgggcagcagagcaagaccctgtctcaatagaaaaagaaaaaagaagaaaaaaaaattggccgggtgcagtggctcacacctctcatcccagcactttgggaggctaaggcgggaggatcccttgagccctggagtttgagaccagcctgccagcctgggcaacagagtgaggccccatctctacaaaaacaattttaaaaattagctgggcatgatggaacgtgcctgtagtcccaggtactcaggaggctgaaataggaggattatttgagctggggaggtccaggctgcaatgagctgtgatggtgtcgctacactccagcctggacgacagagggagaccttgtctcaaaaaaatatttaaaatatatttattggcctggcacggtggctcacgcctgtaatcccagcactttgtgaggttgaggctggtagatcacctgaggtcaggagttcgagaccagcctctccaaaatggtgaaaccacatctctactaaaaatacaaaaattggccgggcacggtggctcacacttgtaatcccagcactttgggaggctgaggcgggcgggtcacgaggtcaggatatcgagaccatcctggctaacgcaatgaaaccctgtctctactaaaaatacaaaaaattagccgggcgtggtggagggcgcgtgtagtcccagcaactcgggaggctgaggcaggagaatggcgtgaacccgggaggcagagcttgcagtgatctgagatcgcgccactgcactccagcctgggcaacagagcgagatcccgtcttaaaaaaaaaaaatacaaaaatttattgggcgtgatggcccacccctgtaatcccagctactcaggagggtgaggcaggagaagcgcttgaacccaggaggcggaggtttcagggagccgagatcgcaccattgcactccagcctgggttacaagagggaaactcagtctcaaaaataaaattaaaaaatatatttttttaaattaataggctacacatgataactcatgcctgtaattccagcactctggaaggccaaggctggagggc

SEQ ID NO: 1596 - DNA, 4001 bp, Homo sapiens
tttttgtatttttagtagagacggggtttcaccgtgttagccagaatggtctcgatcgcctgacctcatgatccgcctgcctcggcctcccaacgtgctgggattacaggcgtgagccaccgcgcccggcctcagatgaagtttttaatacagtatatagatcttagatgggcattcttcttaaataccaccactcaccactaaattttacttgctttacaatttattgtttgtcaaagccctttcatttccatctcatagataaatgcctagcattgagtccttactatacttgctaacaaacaactaatgtttggcgtagaaaccacaggagaatttacagcccaaaagtgagttatttatcaaatataggagagtgtttaattctggaaacaaagaagcaaaatgtcatcagaagggaatgcagaagagaaggatagtgtgaggtttatctttatgttctaaatttcatctgttaggctggggagtggccccagatgattctttatatttttctttatacctttttctatttatgaaacatttcatttttttaaatgagttaatgaattgataaagacacagccctagtgatcaaggtaaagtgagtcaagtcctgacttcagttctgaaaatctgttgctgaatgactcactttgtgatccatgtgcctcagtttcaataatacatgaaaaatactgaagatatttcatctaggaagctctcaggtgaaaatactacctttagaaacaaaatctcactacattatgaaacatttgggagtgttacctgtgtttccacactttatgctttttttttaagtcaccaacattttttgtttctgaaaaacaaaaaacaaaaaatgcagcctaggactgaacatgttttctgctgctccataaatcaaagtgaaggtataaatctttcttaaatattataatgtctagaaatgattcacaggctttccctagttttgcttatacttaagcaaccctttaatgaacatctgcttaaaactgtttttcccaatttatgattgtcatataaaaccctacaagattaggaaaatgagcttgcagtgacaagtgactaccatttcacatagaagatttgaaactctgagctatactcacaatcagcttgctctctagctatcccttagtaacatttcaaatgtaaagtactaacttcagaaaagtttatatcaaagtgttgacttaagagaaacggaaacactagtgcaatggaaaatgcctgagacttattaggaaaatgtataaccaagtctaaaaacttaattcttaaaagtggttctgtctatagaagtcaacagttctattttccaagttctgtaaaatactaacaaaatatctctgaattctaaataagtttctgtagcatttatctttagtaacggcaagaaattaacagataattccttagcaatataatataaaaaacttcaaagagatcaagtaaaacaaaactgtgagcgataaattaataaactgaatttaagtttttaagttttaaaaaacttaattttttaaagtttctcgccatgttccgcatgacttcattcattcttcacaaacataaacatttcaaagttgggatcatcaacattctcgtgtttaacttcacataaatactcaagttcacctgtaaatctgccttgcttctgtcaagattttctgtttctctgccttctattactcaccaactgcatctggatttaccggtctggagacatcagcttgtcccatgattatattgtctgatgtatctcacgacaacaaactgtcccggacaaaagcaaacttttcataaaagataaatccacataaagaggggacatgcggtcctctttcagtgtcactgccaaacatcaggaaatggcataaggtcagttcatctgctgaagtttctgtttcccatacagcctgagcacttgcagttcttacaaaactgtcttcacactggcactcttcacacaggaatgcctgtcattccagaatgcacactgtgtagagctgaagtgcaggaaggggaggagactgccaaccacattctggctgctgactggcatagcccaaaagtccacacccccgttcctgacttttgagcttggctgcaacgctccaggctctgagtcacagaagaaagggagcctgctcaagagtacaccaaagaatttacaaatttaatcacacaaaaacaccaggatggttttgagtaaaaggctaataggagcagtagtccattcaaaggtgtgttttagacacaggtttacctcaaaagtatcagatttcactgtgttatggactgaatgtttgtgtccccttacaatttatatatggaaattctaatgaccaatgtgatggtgataggaaatgggttctttgggagataattaggtcattgagggttttaaagccctcactaataggattagtactttatcaaaaaagacccagagagttctctttttccatcatgtgaggctacgcaagaagacaactgtctggaaaccaggaagaaggccctcacagatacccagtctcctggcaccttgaccttggacttcccagtatccagaactgttagaaataaatgtctgtggctgggcctggtgactcatgcctgtaatcctagcactttgggaggccaaggctgaaggattacttaagcccaagagctcgagatcagcgtgggtaacataatgagactctgtctctataaaaaatttaaaaattagccaggcatggtggcatgtgccagtagtcccagctactggagggaggggaggtgaggtgggaggattgcctgagcccaggaggtgagttgtgagctgtgattacaccactgcactccagcctaggcaacaatgcaagaccctgtctcaaaaataaataaataaaaataaaagaaagaaagaaatgtttgttgtttaagccccccagtctatagtattctgttataatagcctgaacagactaagacatgctgcttattctaaaattttatttcctacctgtaggtgggcatgcctaaagcaaggtgagatctatgtactgggaattaataacattagaaacagtattttaggattgaatataccttttctgagaatacaaacaaatatttctgaaaatctgcttactaaaacaataaacgaaataaatatttggaaggtattatataacagtctcttcttgctaaaactcaataatttccatatgatcttggggaataaaaaattacaaagagtagccctacatgctgggcataatacatggaaagatcagctaatcacatgcagcaaatgaacgtccagtttgcacattgatttttccttttttatccgtaactaacttacatatagccaagtacataaatattaaggatacagcttgataaatttttatttagtatactaacactaaattttctaaatgtaaaaaagacacacataacacaaccttaacataacctccacataacctggattattccactaacatctgaaggtaaaagaggaagctaacaattctgagtaatatattaaggagttttacacttgttactgcatttaatcatcaccacaactaaccatgcattgtgaggtatatttatttaccctattttcaggtaagaaaactagggctagtaaggtcaaatcctgtgtctaatatcaccaagctagtaagtaccaaagccctaatattccttcaataaaagacagctaccactgggtggagtggcgtgcacctgtagtctcagttactcaggaggctgaggtgggaggatcacttgacaccaagagtttgagtccagcctcggcaacacagtgagccctgtctctaaaaaaaaaaattaaaataattttttaaaaaaagacagctaccaaaaaatgggagtttttcatttaaatctttattctccaaactgagatcccagaaagatttctagcatctgaactttcctgtacttagcttgtc

SEQ ID NO: 1597 - DNA, 4001 bp, Homo sapiens
acttaggtacagagaaatcaccagtggaaaacacagtttatcagctggttagaaagggtgaatactcccaaatgtagatccagatgttgggagctatttgttaaaatcacttttatattccccagtgcctagggcagtactttacctaaaatgggagccaaataaaagtatgttaaatctaactgaatgaaaccagaactgctttgctgtgctggttatcttaaggttcaagacagcctcttgcccgataaccaacacagtcaggtactttatttctgttctaaagtcaaaacgatgggaagccctacatcccttgtgacctaaacctaaatcctaatcaatagggtctgccacaggtctgttgccctgtaccagaataaaagatgggcgggtgggggaggtgggaagaaatacaagagcaagaaggaatttccttgcctcattagcctgtaatgttcatgctgacctagaaatcctggcagttccaacatttgggttgactcaggcggggaagaaaaatcccaggtgaatgataattggattacccagttatgctccagagccaaatggctggaaaaggccaggtcagtaggctgtggtacaaagtgacattattttttaaaccaaaaatggagatactcaggctgatggacaatgggatggaatagtttaaattggggctgtcctagaaaaatcagggacatatgatggatttaggtaggtagcttattttgcaagggatcctctgggcccaatatgctaatggagaggggattaaagatcaaacacgggagatatccgaggggaaggctgtcattgatttgtaagggaagaaaaagatgaaaagagtgtgttccgtacacagcacatgaaggtacatatcgtaggtatggagtaggaaggaaaggaaagttgttcagaaccgaaagtatgtgggtgagatcagttcaggttatggaagacgggtgggtgggcagtagcagggcactgactggtatccgacacggggcccagggcttagttcagatggtagcgtcgccactggtttgcaacctgaccttgggccaattatttccctgtctgtggacttcagtttaaatacagaatctcacaaatcccgattttaatgtaaagaagcaacaaatatagtctaccttcatttggcataggaaggagagaaaacgctcttctaaaaatggaagaaaagacacagaacagcttgtccctttccatccaattaaaaacctcgtgagactgaactagattaaaaacaaaactctccagcgaagccgcaggcgcctccaagatagggagtccaccaccaataaagtacggcagatgccagcagtctcgtccccgaacgcaccgtccgtcccagggaagtcgcagcggcggggaggccggtcctaggttggggctggggtggggtgtgcggggcctggggacgcggaagctgcggcgcgccgaggtgacacggcttccaggggcgacgggcgcgcagggtccccaggcgagcgaggctggggagcagggcacctcccaggcgccgcgcggacgagagccgcgactggcacggcctggcagccgcgtaggcccgggccgttaggggcaccgagggcggtgcccgacttccagtgcggcgagcgcggcccccggcctccctactggcgagaacccctcccccgccccggcactgacctgtccagggcccggctgggcctggccgggcggggcctacgcagcccctcggccgggcgccgactcgcgcggggtcccgggcccgggcgggccgcctcctctccgccgggagcctccgagccggggcccggggctgccgcggcgcatccgaccgcaccggcctggccggcgtcaacaaagggcggccggggcgcgaggccgggacgggggcgcgaggccggggcgggagcgcgggcggcggccggggttgcgcgcgcgcgcgcggcgggcgctcgagggctgcagccgccgcggagacaatgcggcgagtctgggacggctcccgcggccgcctccgccgggggcggggcgagggagcggggcggggaggggcggggccgcgggaggggcggggcggacacgggccgcgcgcttcctttgtgcggcgagccccgcctcgcgccctccggaaggcgggttagggacgcccggggctcagcttagggaggcgggcgccacgccacgaggaggctgccctgatagccggtgcaagtgctccttggcggggcggcccgcgactcccgccttggaccgttcactccctgaggggcctgggggtcagtcagaagactaacgaccaccagtcaccgagagctcagttcgtgccaaaccctgctcgcgctgtccccgacttattgttcacaacgaccctacaagtcattctccttcccactgggaaccgaggatcagagggaagtcatggcccgagtgccccggtcacacctccgtgagcggcctcgggctcgcggttgaggctgattgaggaagtgggttcaggcggcccgccgtgcctggcacacggtcagagtcccgtaagtgttggttatcttccccaagcgcaccgggtgaacctgcgctgtcgtggcgaagcatactcattcagcacgcgcgcgaggggctgcgggggtacagagacgtgcagcgtgacacagtccccaccctcaggagcgcgaggcgcaggaaggtgctggacacacgccaggcacttctctccattcttgacttccctctgttcccaacatggtcccattttcttgccttccttagtattcatattcgttgcctgcctttcttctccccccacccctttccactctcaggcctcatcccatcttctttgtttacatttattttacattccccgaatatttacttagctccctttctcctctatttttcaaattttcaaccccccttttcattaatattcatatttccttctcctctgcctctgcatttcttacacttatattttgttttataaactagggtaacacaggattgtatcctcaactcctgttccctaacatgcccacactttcctgcctccctctcttaagttccaccagttcttcctggaatgctctttcctcaactttgcatgtccaggtcctacctatccttcaaggtccagactcaagaacagcagttggcaaactttttctgccagggaccagagagtaaatattttagactttgtaggtcacacggtctgtggcaacaactcatctctgctgttgccgcaggaaagcaaccacagacaatatgtacgtgaaggagtgtggttgtgttccaatagaactttatttatgggcactagaattggaatttcagataattttcatgtatcatgaaatagaattcttttgattttttcaaaaaaaaatttaaaatgtagaaatcattattagcttgcgagctgtacgaacactggcaatgtgatggttttggccattgggctgtagtttgtcaacctctgctctagaacaatgcctcgtcctccctgaaatctatcctgaacatctctagttggcagtaacttttcctgttttgtagcttttaaatgacttacctcaaatccatctatggcatttatcgcattttactttctattgtaatttttttcctgtgcatttttcatcgtttcaagtagaccttcagctcttgaggtggggtacagaccgtgtttctcagtgtgctacctcccttcccacagtgctttgcacagagcaggcattcacacatacacagaatgggccgggcgcagtggctcacacctgtaatcccagcacttgggaggccgaggcgggcagatcacctgaggtcaggagtttgagaccagcctggctaacatggcgaaaccctgtctctactaaaagtacaaaaattagctgggcatggtggtgtgcacctgtaatcccagctactcgggaggctgaggcaggagagtcacttgaacccgggaggtgtagattgcagtgagc

SEQ ID NO: 1598 - DNA, 4001 bp, Homo sapiens
gagtgcctttccccagccctaagatcctctgtcttcttcctgtgagtcccagagacatttctcctcccttctcccactggtcaccctcctgccatctcttcccagttgatgccctgcactggccttcaccaggcttccccctattttctacccttacctctgctgaatccctggccacaggcagctcctgaccctgggccctgtcccggcgagcaagccttgccagaacggggcccagggtcaggtcaggctttccccaggttggtgtgacttctagggctgacagctctaggacaaaacagcctctggctcagatttggggttctgtaaaaacagcctgttgttatagcagatcctccgtgggctctggtgtctccccagacatccccatcccaactcttccacatgttgcccccagattccactcctctgacgtgaacacccctctccgataccctgttttattttaactctattctttttctctcctgctctctcagaattatctgtctgtattccctttgcctaggcctttctattagactcctgaaagtgacctccccagcagtccagcccatgtagttgagatcctgtgacccttcctcatgagaagatgtcaatgaagggagacaggaggagcccaggatggttctgcatgcaaccttgggtgattccactcgccagaacaggaccccagacccccttttgcctagaattgtgatgagtggcaggagtgggtatatctgaatgccgtggctataaatcagagctaaggttctcatgcatgatgggccagggccaggtgctggggctagggacaagggtaggggcaggaaacatggattcactaagcacgaggtagaaataagtgggagagggaagagtccagggtatctgatggcatcttctttaacttgggttttcaggccctcttactgtctgttgtgggttctcccttgttcccttatctgggcctaagttcaaagcaggatgaggtcacttttctagtatatccaaactgtaatagcaaagtcactgggagtaaacacttctcagctgtggtctctcttttctgcctgtattatccaggaacctcaaaaaaacattgtagtgattaagaacacaggtctggggtgagaggttcaatttttttgtctttacctgaatgaccttgaacaagttattaccttctctgagccccagttttctcaactacagaattgtgcctaataataaccaaaaggataagcgtgcaaaatgcttagtaccatgtcaggcacacagcagatggtagtgcatggccctgactgcatttaggagcagtgagccgccacctggaaggccttctggatgacatttgccaactgctgctttaagggagaaggtaaaaagctgcaatgacaaaggattatttgggggttctctttggcttttggtctctgaaaaactgagatgtgttcttcaccgggcaatggtcatttagagagtgggtctgggttgtggctgagcagctcttggtcatgtattatttgttattgttacttgtctgccctttatactttcacacacgtgtcctccaaactccttgattgggccattttgcatccttcaccccctgtaactatacacaaatgtgtatctacgaactcactcccatatgcccgttctagagtccacatctagattatcccaccagaccatgccaacacctcctccttgctagccctggagatgattaaggagtataattcccagatcaattagactcttacctgcacggtctgccggtctggaataccactgtacacagaaatctggggcccggtggggcggccacttccaccactgctgctgttgttgcagccactgctgctactggccccgctggtactgctggtggcacaggcactgctagatgtatgtgggactggcagctcattctccatggcctgcagtgtggcgcagtcagggcgctcggatggcagaagggcaggcagatgctaggagggaagaggcagaagtgaatgttttgacagacgcttactagagaatgttcacaaagtcagccttttgtatctgtgggttccacatccatggattcaaccaaccacaggatcaaaaatattcaaaaaatacggtgtctgtactgaacacgtaaactttttttgtgtcattattccctaaccaatacagtgtaacaactatttgcatagcatttacattgtatgaggtattataagtaatctagagatggtttaaagtatataggaggatgtgggtcagttatatgcaaatgttatgctactttatattagggacttgagcttccatgaatgttggcatccaagggggttcctggaaccagtcctcagtggataccaggtgacgactatgcagtatatacatcagctttccagtctgtggtggggccacttgggaactgaggtctctgttttttgagactggagttttgctttatcactcaggctggagtgcagtggcacaatctcggctcactgcaatctccatctcccgggttcaagcgattctcgtgcctcagcctcctgagtagctgggattacaggcgaccaccaccacacccagctaatttttgtatttttagtagagacagggtttcgccatgttggccaggctggtctcgaactcctgcccctgagtgatccacctgccttgaccttccaaagtgctgggattataggcatgagccgccatgcccgaccacttgggaactgaggtcttaagacacacttgccctcagaaggacagggcagacttggttcactaggtgagatttgagatcaggtctggctgattctaaagcctatgacctgtttattttgccagaggaagcaaaactaggaaaggaggcagacttcctataacgttctccctagcagtgatctcatggatcacctctcaccctatcagccttttcatcgttggggtggggacactgaacatcagagaatttactatttgtccatatttatacagccacctagtgaaagaagcaggactaacaatctacagagaaggccgggtgcggtggctcatgcctgtaatcccagcactttgggaggctaaggtgggcagatcacgaggtcaagagatcgagaccatcctggccaacatggtgaaaccccatctttactataaatacaaaaattagttgggcatggtggtgtgcgcctgtggtcccagctacctgggaggctgaggcagaagaatcacttgaacccaggagacagaggttgcagtgagctgagatcacaccactgcactccagcctggtgacaaaaccagaaggcaatcaaataaactgaggtgtttatttagtttagttttcaaagccagaagagctcaagtgtgtttgaggtatctatctttattaggtatgtacttactgagtgccctctggatctaacgcttagcagggtaccatactgaccaatctggttaaaatctcaggttgtggaatcagaaagacttggctttgtcctggctctgccactttctagccaggaaatcctggcatgtcacacctgtctgacctgtttcttaatcaattagatgtgacaggatatgggctgtggtgaacataaagaaaagtgatgatgaaaggtgctcagcagagtgccaagcatatcctgtgtgctctgtaagcactggctcttgtggcctggttcacactgcccagatccaatagatagggtctctcctaagacagaaatggcagaaccttctggaatctcctatcccagtcagtaaggagggccataaattccttcagggcccatcctatggtctgaatacagaactggaaattctaccttcccttgaggctgtgtgcttggcagtggagaggggttgggaaagaaggaaagggtggtgggagaggcacacccagatctgagtttaagttcctctttttttctttttccatgcttttcttaaaaatcctcatttctgtgtagaggctg

SEQ ID NO: 1599 - DNA, 4001 bp, Homo sapiens
gcaaaacaagtgtgccgtattgctgtttattcgcccggcacgttccctgaggttcctttcagtgccttgtccgacccacccccatccttcccgaggtgctgttacccggccgccactctgctgggggagagccggtggggaaatggggggcaggggtctcgggccgcccctcccgccgcgaggagcaggcgtgcggcccgcgggttttctttcgagaaagtcggtgcccttagaaaattattttctcaacctggttcaagcaaaccttctcctctcccacccccttggaccccagggccgcccacggagcggaggcgaaggcccgcgttgaccgcgctccccgcactggcgagcctgcccagccacgggaaccgcgggccgccacccgggcctccaactcccgcgaagaacttttctttcggcggggaaccagcagaagtgggtcaaaaacccgaatgccaagtggagggcggcgacggcctcgggccgggggcgcgcgggaggcaccggcgcggggactgggggttccacgccgcccccacacggcccacgccgcccgcccccccggccgcctcctcggaaagcagatggcggagcggcccccacccgccctcccgcggcagccgccccccgcgacactcggcccccgaaggtgcggggcccatcccgcgagtatgtgtgaggggggtgcgccaggcaggattccggggtcccaggcctggggaggccctgcgaacccccgggggcggcagcgagaccggcgggctccggcgccgcctcccctcccccacccgcccgcggtcgccggacccgcacccccgaccccaacgagcctcggctggggggaggggaccgcgcgggggggaggccgggagccccgagggccgatccccggaaggagggggagtgagccggggcggagccagcaaagcccgcgggcggggggcgggggcccgaagagagaggccagcgcgccggggggcggtgggtgggggcaggactcgggtccccagagcgggtggggcccccggaggacgcggcccccgagagccgtagggggcgggggccgactgggccccgcgcggagtcagggggcggggcgcgggccaccgggcccgggggatcgggggagcagccgggggcctcgggagccgaccccggtccgaggggggcctaaaactcctcgagagcaaccggagccaggggcgggcggcggctcggaccgcgtccccgggggcggggaaagagtaagcaggccggcggggaggggctgggggcgccgacaggtcccaggtcgacgcgaggccggagaggggcggcccgggggagagaaataggcgcaacggccctggggaaagggcgcggggaggacgcggaggtccgcggaggggacgcggaggcgaggcccggcggagaggaccgagcgcgggcccgagcagggggcgggggttgggctcccgggggggccgacgaggggaaagcgggggaaggggagggcggcgctccgggcgaccgggggtctggctgcctgaggacggcaggatcgcggagggggtggtcgggggcgattcggacgcacagcttcactcacctccgggtggaaggcggcggcgcaagagtcagagtccatgttccgggcggggggcggcggcggctgcgagagtgcaggagctgggatgctggagcggggccgcccggggctgggggctcgggcggctgcgcagggcgagggcggacccgggaggggtcgcccgggctggaggtgatggggggctcagcgcgtcgcttctcaagctctgtgaccccggactggcggttccaccgccgaccggagtggacgatgcagctcccgcggcggtagaggcgggagagtggctgcagggggcggcggcggcggcggtgagcgggaacccgaccggctccccgacctgacgcccagttcggctcgtgtctcgggagggagggcgggagagccgggaggcctgtcgggaaatgtagtctgggtggcgactggaagccagcggcgagggggcgtggcgcgggaggcgggcgcggtgccttgtgggagtggtagtccaaggccccgccaatactgcgcacaaaggaaaccttggggactccaacccccatgaggctccgcggcggcggccccggtgtgtggaggcgggtcttctggactcgaggccgcgcgagcgggggaggtgcgggggcccgcgccggctcggccgcggggggaggggcagtgtgagcggtagcgccttggtctcggcgggcgcgggggcgggagtcgctgcggcggtgggggcggggctgacggcccgggttgcgaagggcggcggcggctggcacctacccttcctcgtctcctacttggggttcgcgcccctttgtggggcgggggtccccgaggcctggccgggagtaggggcggcaggggcggggacgctgacgtcgcggccgccccgggcatcgctccccgctccccgctccccgctgagggcggagtcgccgcccggcccccgctccaggccgggctcagcgaagttgttttcgcggctgcgggcttcgtgcggctccctgctccgggcccgcggggccgggactggaccgggctcttctctaggcatctgcgggattcactcgaggtggccgggttcgtgcattaaaaacaccgggccagcgttgtcagtgttctaaagaggtgtgcgttcagtttgctttctgttgccgcctaagcctaaccttgggaccggccgttttcccactctcctgaatatcctccggcccgcagggcgaggcggagacgcggtgtttggcgctggcatcgactggtacttgtttagtggtgtttaactgggatgggcagtgtgtaaacgctggaccgcagagtatccgacagctgtacgtgtggaaggctggccggacacggtggggactgcccctatgcggtgaccaaaaggcggtctgacgggaacatttttaatattcgaaagtgggggaaaaaggtaagtacaaaacgcagatgattcagtaacctgtttggtagcttcgaagaagttaaaggggagtgacacaaaattgaaaattcaaattagaaaacgaactcttggagatactagtaagatatttgacaggcgccgaatgctccatcaagctggctgttgctatttcaagggttatgatcattctgatgaagatatttaatagttaggagatggtgttaatcttagaaatacttctctgagcggccgggcgcggtggctcgcgcctgtattcccagcactttgggaggccgaggcgggtggatcacgaggtcaggagttcgaaaccagcctgaccaacatggtgaaaccccgtctttactaaaaatacaaaaattagatgggcgtggtggcggacacctgtaatcccagctactcgggaggctgaggcgggagaattgcttgaacccgggaggcggagcttgcagtgagccgagatcgtgccactgcactccagcctgggcgacagagcgagactctgtctcaaaaaaaaaaaaaaaaatacttctctgagcctcagtttcctaagctgttaaattttagcgtagtgcctggctaaataaatggtagcttactgttgttgttgttgttgttgttttattatttctgcaatattgtagcccattggagggcttcccaaaggtgataaattgaggtactttacaagataaaacatgaaattactgattaaaacagagacattggacttggcccatcgagacttgattaacaacttcttatacaattgcacagatgatttagccagatttggaatgttacctggttactgtgaccaaagcagatgccccgaagttagcctgtattgcccaaggtcatattcacaaggagcaactcgttttgccagaataagaaacactgctaaggtgttgatcccgttggtagtttaaaaatgtaaataccaaaaagaataattctttttttttttggagacagaatctc

SEQ ID NO: 1600 - DNA, 4001 bp, Homo sapiens
ccctcttcccaacctggtgctctggtggaggtgagagtcagaggctgttctgcaggacaccccactgcctttcctggttgttccccagagccactgatacaatttcacacaagaaaggaggtgacagatgtgaggagcctgccacccgtccaatcctactcaagtcctaagcccttgcccaccaattctgtgcatgatgattggacctttctctggcttttccagaaggggaacacgcaaaggttagggagctggatggtctaattcggggctatgctcttgtgtcatctgctcaactgtctcctgcgtattagccatgctccctaaccagcttacaaacttcttgaaggcagggaccaaattcttctgagtacagggcagagctggatacttggatatagtgtcatgccatggtgacaagatccacgccagcagatacaaaggcagacaaagtgagcgaggcagtttccaggaccacgtggttgtggcacaactaaagcaacaacagcagcctctgcggtctaaggggtcctcggaggaggagacggctgaaggtggtggacagggctgaggcgggcagaaggcggttgtgcgatttggagggtgggggagaatatactggatcaggtgaggtagagactgggcagctgggtcgactacagaggtcgaaagtgcaggcactggagtgaagagttcacaaaataaatattccggacaaggccaccaggcccagcaggccttttcaaacacggtggataaagatttgaagtagattaattatatatcacaacaaaaggagataaaaatttgctaagactataaatcatctgggagcgtttgggatcggattctagtcgagtctggtcactcccaaccagcgataaaccaaaggtggggaggaggctaaatctggaccccagcgctccccgcccgcctccctttcctccgaaggctcccaggaggcagaggggcggcgaaagcacggagcagtcttgcatcagacgaggggcgggtacgtgtttgctgccttacgagggctgccttcccctccagctgccccagcagccaccagactggttgggtctccgccagcttccccccgccccccgacccccccaaccccgccaccgccaaggcaggctagaatcggcggggcggcccagaacttggttgggaagaatcgccagtccctgggttccccgcaaagaagccactttggggcccctctcccgatcgccccgcgcggaggcggttgggggttgggggagaggcggcgcgaggctgccagaacaattgcgcgctaaggcgctggggcgccgcgctggcatcccgcgctggcatccgcgagcagcctgcaggaccagttggagcagcccgcactttgcaatgctagcggaggcatgccaacgtgaaagacgcggttgcaaactaaaagaaaagtttgcatctcgccgccgtttgttcttccctctttctgcctcctcccgcccccgttcttctctaccccccaatctcaggaggccccggaactaattgatacggggtgcatgcgaggggggcgcgctggcctgggcgcagccagcctttttccatggaggttgccctagagacctcaattttctctctctcgccttacctgcagctccgctatcagctcctctttgctaaggttctgcttttccaccacctgcagccctccatcttgcaagatcttccggcagcaagggtccaggctgtcactgatgagcactttccgcagatttgcaaaagccattgctggagttggcctcggaatcggccgctgtgagtagaagtacctaagccaagaagctgcggttcggcctggcgcgctagagtaactgggcagtattctccagctcccgctccccagtcatctcctcctcctcctcctcttacagtctccttttgattggacggaaatactcaaactctccgcgactccgcctcctcctcgcggctctgaggttgccaaatccctgcccgctttattatcctcccgcgatgaatttctccatctcagccaaagctcttacctacacctggtgagcatataaaaagcacaatttacgctgactagctgatgcatatctgaaatgaacggagaaatacacctcatcctgagagaaaaacttcattttcacttttcctcctaaggattcatttattaattccttacgaaattttttttgagtgggtaaatgtgcaaggcactgtgctagacgttgaagggaattcgactatcaaaaagaaaatgtccaacaatgatagactggattaagaaaatatggcacatatacaccatggaatactatgcagccataaaaaatgatgagttcatgtcctttgtagggacatggatgaaattggaaatcatcattctcagtaaactatcgcaagaacaaaaaaccaaacaccgcatattctcactcataggtgggaattgaacaatgagaacacatggacacaggaaggggaacatcacactctggggactgttgtggggtggggggagggggggagggatagcattaggagatatacctaatgctaaatgacgagttaatgggtgcagcacaccagcatggcacatgtatacatatgtaactaacctgcgcattgtgcacatgtaccctaaaacttaaagtataaaaaaaaaaaagatacatcctctttcctctggtggcctaacatcctagagtaccaaacacacagacttggaaagttacgtagtgaaaagcaataggaagctttctgagacaccaaggagctgtgattaatttcaaattagtgatgcaatgagaattatgagtttataaaagagcggggacctggtgcatttaaactaggcatactttgttaaagttatttatttcctttccctccacttcctctctaattatgaaaaagaagaaaaggaaaacgggatgtcagtgtggtttaattgaccaaggaggcacttctcagctcttaactcttttatatttaaaccccataaccgacgtgctctctcatgccccattttacagaaatgtcagaaaattcaatttgggattaaagtcacctagaatcagaagcagaatcagagatgctcatagttgaattagaattcagctttatggacatatccagtccaactaaccattgtgtgttatgtcatcctgagctattcataactcaagtgctagatccttatcctacagaactatgcaatatcaattctataaagtaatgaaaattctatacagataattcctgggcacaaatcagatttttagacacaatgtcctcagtgggtaaaaaaaaaaattgtctatcatgtttgcttgttcggatgaattgttattcctacattccaagactcatgagtattcaaattctctgtctctcttgaagtgcccagcagtaccctggagtctagggacagacaggggacctatcccaggaggcttaatggagggtcttgggaagcatccatttttgtaactgctttccttcaactcctcccagggctcactaactgcttcctttcagtgtagaatctaaaccctgctatcattaacatgtaatcccaccctttcacaccaagtcaaacttcttggatactgtctgaacgcacaacccagagggcctcctaagcctgatcacctgttttctttatttattatttatgacccacctactttttaaacagatccaagccacacaataaaagacacttctaaaccgttaagaaaataattaacagattaagagtccatttccaagtgaaaaggagggtgtgtgataattgttacataagtcagaaatgttccctccttttaaatttctatagaattaacttcaagttatctcacagtgccttaagcaatatatttatgaacttttcatgtcttgttccccatgaactctcatttccttaaatcagagacacgattttgtatacccccagtagtgcctagcaccatgccttccacatcaca

SEQ ID NO: 1601 - DNA, 4001 bp, Homo sapiens
gtggcgtgtgcctgtagtcccagctacctggaggctgaggtgggaggatcgcttgagcccaagaggttgaagctgttgaggctgcagtgagccatgactatgctactgcaccagtctgggcgacaggtagagatcctgtctcaaaaatatatatataggctgggtgcagtggctcacacctgtaatcccagcacttggggaggccgaggcaggcagatcacctgaggtcaggagttcaagaccagcctggccaacatggcgaaaccccatctctactaaaaatacaaaaattagcagggtgtggtggcaggcacctgtaatcccagctgttctggaagctgaagcaggagatttgcttgagcccaggaggtagaggttgcaatgagccaagatcacacgactgtactccagcctgggtgacacagcgagactctgtctcaaacaacaacaacaacaacaacaaaccatacacacacacacacacacacacacacacacacacacacacacatatgtagaggaggagctggatccctcaggcccagtccagccaaggcggcccactgaggccccaccttccactgaggccccaccttgggagccggactccttggctctatttgcaacccttgatggtgccttcgccatctgggagatactgtctttctacatcaattcaatgctcaaactttatgacaagcattcaacctagagggaaagagggtcggcctccacgatccgcgtccccaccctcggttgtcctcagctgccagaaagccgaagtccaggagccctgctctgcgtggaaagcagaggcccacagcctggggcaatgtgcaggccaacctccctctacttccttccacctgagtcagggctgaaccaacttgaaagaaggctcatctcacccaggtatccccctcccagggcttccatcttcctctcacacacctggatcacattctggaccggccaacctggtgcctcaggggaaagtccggatctgctgggttggccactggcccaagcctcccatgccctcagttggccccaggaacctcccccctaagatgtccggctctgaagtagaatgctagtcctcattctctctgtaggggaaagagaagggagggaaggagagaagagggcccagtcccccgggggcttacctgccttgacctcagcactgaggtggtgggtagcatgaaggaaagatggtgcgcccggtggtttaggacacgagggtcccggtcccgaggctctgccgggcccgcactgtctggatggcctgctggttcttgaacttgaccaggcctagggtgatctgggcgttccagccgggatcttccagggggcagcggaagtcgatctcgccgcccccttcggtcaccagcgtgaagtagatgtggcgcccggtgctctccacgcactccacggccttgatgcgggcgaagctgagctccttgggccggccgcccgtgcccttggcctcgaagagctgcagcccgcgttcggtgaggacgcagcgcttccgcttccacagctgcagcagcccgccgctgcgcttctccagcacgccctccttgagcacggtagccgtcgccgccgccgtcatgggcgccccgaggttcgcggaaagctccaggctgcggcgggcgcggcgcccctctcggccccgcagcgcaggattctggcgccccgggctggcaggccgtgcgcgctgcccacctgcgccctgactgctccgcgcacccacaccgcggccctcagcacccggctgccggtgaggtggtgtcggtgcccccagcgcgctccgcgcccaccgccccgcttcagccggcacccgctcctccgctctaccccagctggcccagcccgacccgcctctgccagatgcctccgcgcctccctaggccgtgagccccaccgcccgcccgttctcttgctcccctgggctctgtctgcgcgctgggcggcagctcgcgggatgtgcccttacatgttccgccgctcgcctcctgcgccgcccgcccgcagcgcattcctaccctggccggccctcccctccgcgccgcgcaccagctccggcagggccccgggggcggggccgcagcgggggctcagtcactcactggaggcgcagggcgcggggcggggagggccgggactgagagggggctgcttactcaacagcccaagccttctggctgccgtctgccgcttctcggaaccgcagctcccccaggccttgaatgaagggggagatggcggggaagggagggggaaggcgcatctcctcgattggagagcgcgctgctagcaagggggtgggcttgcttggcgaacgcgcagtggcaccagttgcatgttaggcgtcagacagctgctggttacttggcacgccatggggcccccagcctctgcatcaagcccatgttgggttcctcctccatcgcccgatttctctgtgcagcacccaagagaggctgtccatcgctgcctctgcttggacagttcacctgctcctactcctacccccatgcattgcgcggggaggcctgtagagagtagccagtgccaacaaaggagagctgaggcttgaggtcattcatgccctcctcgtagtgggggaggagggaccccctccgtgacctggggatgccactgtctgcagtcctctccaccgcacacttgcaggcgccgacgctggaccgatggcacagccagtcccaggtgtaagcgcagctccaaccttgctccttccgctccgcagattctgtcctccctcggccttccccaagaatggacttctcccgcatacagagctggaggggaacgcagagggagaggtctctttctgttctggctagaatattgtgtaaacacaagagctttgcagagttgagttcaaacctcttctcccttgttggctgtgtcctgcccacctggggcaactttactgacctccgtcaatttcctcatctgtcgaataggaggattaatttattctcatctcatggggttgtcctgatgaataagttggataacatttgtgaaagacccaagacaggacctgacaactcttgagtctcaagaaatgttcttcctcccctctccccactcttattccctttagagaatgatgggggccctgagattaagccaggcactggaagagggctctcttaggtcctcattctgtccccatcttgatcagttcctccaggcccacagtttcttaaaggtctattcatcaacatgttaataatagattcttacgggagtaatgatatataataatgacagtaataagacctctttgtacttacaccctgtgttgccatcctcctgcccaaagagcagagcctaacagatacagggaaggtcctgttgtggggataggagtgcgctcctctgcagtcccaaagttaggagatgagagaagggaactgtcagtgtctcatccataactctttatacacacacacacacacacacacacacacgtgtgacgacaactaactcctaactcccagaatgcccctccaggagagggaatagacagtggcattaaagaaaagacaaagacaggtgtctcctgaggcccagagagcagcagaagagggagctcgaggtggccacggccctacctgagggacccacaaggtctcagcctgcctgccagccctgccctcccatggctcctccccaccactccacaggggtctcctgggtgcaccaacctggcacagtcctgccatgatccaaagttctctctctgaggaaacagggccctagatcaggctctacccctaactcatttttttgttttgttttgtttttgtttttgagacggagttttgccctcgttgcccaggctggagtgcaacggtgcgatctcggctcactgcaacctctgcttcccaggttcaagcgattctcctgcctcagcctcccaagtagctgggattacaggcatctgccaccacacctggctaatt

SEQ ID NO: 1602 - DNA, 4001 bp, Homo sapiens
gactctgtctcaaaaacaaaacaaaacaaaaaaacaaacaaaaacacatactctaagccagtgattgaataaaatgggggaccataggctggattcaggccacaaatggattttatttggcttgcaaaggaggaggaggaagagaaggaagagtctcttaaaaatccgacacaaaatgcacaatatatttcatataaaaatgtgtatttccagcttctcttgaaaaatctgaaactctggcaatatttggacctgcactgccaagtggtaaaaactagccagagctaagtaaccccagccctatttatatgggacatttgctctctaattcatcatagaacaactcactcctttctgttttcctgatagtgaggccaaaaatcaagtgtcacttctcattatgcttgcactgcttttcttataaccttcaaagattaaagaatgccatactggtagttaaatgcagagtttaccaggtaagtacaattccactcttcatattaatgcagtgaaacataggcggaatcaaagaaatcaatttaccttaatctgagtctgttcgattgacttttcccatatctgctgatcgtaggctccaatctgaaagagggagtagtctattagttaaacgatgcaaaggaaatccttacattattaagtcaagcctcataaaagtcatgagcctattaagtatcaatatgctatgtggaaaatatgcttctcaaaagttagaataaatcaatacttcgaaggactgtttccttcaaaaatctaaaatagctggacctaaaagtaagttcaaaagcaatgcccaaaatatttcaaattaatattaccttaaaagatatttccacttcttgggcgggcatggtggctcacgcctgtagtttgagaccagcctgaccaacatggtgaaaccccgtccctactaaaaatacaaaaaattagccgggcgtggtggtgggcgcctgtgatcccagctactccagaggctgagcccgggaggcggagcttgcagtgagccgaggtcgcgccatcgccctccagcctgggcaacaagagcgaaactccgtctcaaaaaaaaaaaaaaaaaaaaaaaatccacttcttaaggaaaagagcactagaaaaactagagaggaataaaagataaggaacagctcaataagattgttgatagtatcaatctgagctgtgcacatacaggtttcatgtcttttttgtttttaagcagtttgatcagaagcaaactttcaaagcattgcggtggcattgtgtatgcagcctgaaggaggtggcttgtaaaccttattctgggacctggaaccgggtttaaaagacataatgaccttgtacatcttttttttttttttttcatttatgttgaagtatacatgaacacctggcactactaaactcgggggaaagtaacattatattatttgtgggagctttttgcaggaagaatgctttacaaataaaaaaaatatatatatgtattaccttcttttggtaccacgatatagcatctctctcatttgaggccatctgtgtctccagccagagaatgggatttcactgaaaatgaaggaaaaccaatcggtgagtccagctgctgaaggttactctcccagtttgggtaggacgcgaaaaccgcttctctcagcctctccatgagctgctctttctccagctgtttgccagggaaaacacaacaaacaaacaaaaaaaaactggcgcagcggcgaccggagaagcctctgcaatatatcgggcgagcgtgttcgtgggtgcgggggaggggcaggggccgccgctggagtcgcccggcacccgcctccttcgctcgcccgcgtccggctctcacctagtgcccgttgccccgcgggccggcgcccgggacctccgtcctcagtgcccggggtcccaccgtgaggccgggggcgaggcggcgggccaggcaggccgcatcttcccctccaggcggagacgccggagaggccgttaccatggagaccgcggaggccgccccagcttcggaggcagccggccgcccagcgccctgagggcggcaaatcgatcgccggtcagaggccgcctacagggtcacggactgaccagaaaataagcagagaatgaactggaaaatgagggggattaaaagtgaaggcctccagtcgccacggcgacagcaaaaggctttgtgcccagctggaaaagacaggtgcaaaggccccggaccccgagagcccgggagcccgggaggaggaggcggcggcagcggcgctcgtcttctgcgggccgcgccgggatgcagtgactcagccgtctgagatctgggctagagccgctcagccgaccaccgggcagcagccttcggcttccgctttccggctttcgccgccgaggtggctccgcccctggcccggggccttcccgcccagccttggtccaggctccgggtccgagggcctggggagtcgcgcggcatatcgatggccaagagcagctccctcagatcacccttcaggcctcagcttaaaagtcacttcctcacaaacgactctcccatccagcggtctaaaggaggtcggtcctgatactctagtagctcacgtctttgtggcactcattttcgtgtttcatggcttaatctctgttccccagtgggctgtgggctccatgaggtcagagactggggcctggcacaagcctggcacttaggttcccaatgtttgttgagcgaacgaatcaatgtttgcgtgaatttacgctgccctgggaggaagggccaggctgcggcttagtgactcccttcctctcccgcccctcagcagctctgggtctggagctttctagtgctcaaaggtgtagggggaaaagaggaacaagtattgggcagtcacagctttttccaaattagggtaaagttaggtggcggcaggaacaggttaattagggccgatagaggtcaggagaaaggaaagaaaggttgaaccctcaagtgaatatttaaggatacgttaaaaggatttttaggctgctttttttttttttttttttttggccattaatggaacactgtccccttacagccattctccccaccttatttgaagccgtgttcttgctagcccacagcgtgtagcatctgggtcagagaaagctaatgacagatgatagcttcacttaagaaagcctaagaggcgctgtactcaatgttttgcagacattatttcttcttatctattgagtgggcaccaggtggaagttatcccatttcacggatgaggaaaatcgactaagctaaaataactcccacaggactaagttttacaaattacttcacccagcctgggcgcagtggctcacgcctgcaatctgggcgctttgggaggcctgaggcggaaatgtagcttgagcacaggagtttgagaccagccttagcaacatggccagaccccgtctcttaaaaaaaaaaaattagccgggggtggtggcgcgcacctgtagtcccagctacttcgaagactgaggcaggaggatcgtctgagtccacgagttcgaggctgtagtgagctatgattgcaccactgcacttcggcctaggcaacagagacctgtctcaaataaagtaaaaattattttacccttatttttatattgcacacattggcagtggtttccttctgcttttgctccttgacagcttttcctttccttagtgctaaacattacaattctgttgagcttcaagacaaatggccaacttgaaaaaagagataaatgacaagtgaaaaacgtcgaattttgcacacgtaaatatttaacctcaattacattaatagcaaaagtactttacttcactgtttggcacacagattttcagggagtgtctggaggaactgaatcaggtaagaagtattagagaatagtggtaagtagtaaaccatttttcaggtgccctgttggaaactattcagtgcttcctgcggctacca

SEQ ID NO: 1603 - DNA, 4001 bp, Homo sapiens
gaccaaggtgaaggaaaattctcaggatgactaaaccactactaataaataccttttgcctgaggaacccaaaatgttttgtaaacaaataaaccaaatctgattttttcccccaacccacatcctgctaccaacttattactgcactgatgcctacagagagtgggcattttccaaaaggatcactctagaggtcaagtgaggaagtcacatgctgaacccaggagtcccgattctgaatgtacaagctctttccattgtctcatgttcctttttccagttatacccttaccccactccaggcctgaattcttatggaaccaaccaaaactattctagtaaaccacaagaataaactgattcctcatggatctggacaggggtgagaaggcactctattctgtgattcctttaacaaaagcctaaaattaaataatctgaaacaagttttctcacaatctcattcaatttccacgcaggcctgttcatccctcttagtggctgctccggagtagtcaaccaagtgtaatctgatagggacttcttcaaaacttgctccggccttcagaaacacccttctgtcctgaacggcctgaggcagctgaggctccccctgctcacaacacatttttcttcttagttcaaggtttagttgatcctgaaataagtggtatgtggagataaagagtgtaacagagaacacatgaagcccacgggaaaaacagaacaaatgtcacaaggatcagagaaatccctgaaactcgagggaggtgtcaaagttggaaatcctgaatgggaagggcactgtcaaatctctcccctacagacagaaacctctagaaagttgggggattgaggagggagaaagagaagctaaagaaagttatagggatcataatgcatcccagagaagagtgaggactaggttcaaagtaagaatgtaaatggtacttttggattgatgacaagggcccgagatcccttaaggagaagggaacaggcaattcttggaagccaggagctggctgggtaggtgggtgacagtgaggtaatggaatcagaagcagcacaggaagacagggatgcaatctttagctcagggaaatgggaacccagtgctggagttgcacagggacataggaggaaaagtgcaaactaggaaaagagataaaggtggagtccatggaaaaggtttggggcaggggcagagacgacgaggaaggacaaggatgggcattatgggagtcgtctgatatggaaagggttcatgacttaaaaaaaagaattattcgagacgtaggcaacagggatgagtgagggaggggggaatccccgaggcagagggaggagctaatagaagaggaagccaaaaagcggaggaggaccccaggcctgagaggaaagggtggagaaggaacccggggtgcagctgacaccaagagggcagtttcgtagtcgaactcaggtggggaagactgtgcgggacagggtgggagagggacccccccccccacccaacagggcaaaggtgactcatgaaggaggagtagcttacctctgggggacccccgcggagggggtgcgggcagtcgcggttggactgccgacactgccgcctcagcagcagcgaccgctcccgggttccattggccgcctgcgcttccctgacagcggccgcggaggctgcaccaggccccggctgcggggctgcccgcggcgccgcctgagggggccttcaggctgccacaagttcgaccgggccacacaacctcttcttcctccctcagtacaaccaagaccaaaaaaataataaaataaaataaaattccccagcaggtctcgatgtagtattcttctccggagtccaagccaagcctttcttcccaggatacgctttcctgcttccccagcggtcaggaccctaccgattccatagtaatctaaggagtcgggtgagctgcctggaacatgcctgttcagaaatagaaaagggggcggggaaaagatgtttggaagctctcgagggagagagggcgaagggaggagcttacgggtgggaggaggggccaatatttaagaagcggacctaagcgatagcgtttgcgaggctaaagaagccgagagagaagtaaaatttgctgcataagtagggtgagcaggcggccgtgggtgccctgttaaagaagtatggacatatgcatacttccagaagtatattaacatgcaagttatatgtaaacgaccgtttgagtaactaaccaaattaccgtaattgcaatcaatgacttttccccctcccgtatgctacaagactcccttagtaaatcaggccgtgggatggacgctgggttcctagaagggcgcgcaggaagacggcggacggggaagacgttctttctgactgcccttttcctacttatcttggaggacgatgcggagtttaagctccttaacatttcgggaatggcgcggtccaaccgcgtcagtcttttcgccgttagaggcccgactcgaggccgtggttctgcctccgaggtcaccaacctgcctgggcagcctgtgacctccagcatccatatgcccagccctccagggaggggctggacagggccaggttgggagaggtgagtgaaacgacaaaggcttggagggcacaatcccttcttccaaacaaaacgaaaccatattaggccaaacaaataaacaaaaacacgccatgcaaatgggcctctggtgttgcttttgtgtatttttcgtttgtttgtttgttttgtaaagacagggtcttgctatgttgcccaagcttgtctcgaactgttagcctcaagcaatctgccggcctcaggtaccaaagtgctgggattataggcccgacctcgcccagcaagttttttgtgtatttttcggttaagattgttgatttagagccctctttgtcctcagaacctctatctcaatgcctttcctagggctttacttaatatgcaatgcccctcattagtgccttacttaatacattgaggctagttatttgagcccgggtcttgaatgccatcttccctgccacttacaagccgtttgatttggaataactaatgtaacctctttaaacctcagtttctatgtctacaaagaagacatatggatgaagtaatattagcccattacagggttttgttaggatcaagagagtacaagttgctactatagtactttattattaattattgggacaatcatacaggatagatgatgaaagagtcactgctacaatgtttaattggaaggcagaataaagtgtaatagcttgaaaatgcctgtgtaaaacatgcagtatatacaacagtagaacaaatggggtacctaacctaattgctgaagggacatagtggagtttaagttaatttggaaggcctatatgtgtatggacacacacacatacacacacacacacacacacacacacacacacacacaccagtatatggtgaatgaatgaatggaaggcttcttagaaatattgtgagtcaggtcttagaatagatattggatataacccagcaaaataaaagacaagcgagcattctgaaagcaaaaaaattgtatgttgaagaatataaatgggaatttgctcatatcatgaggagagggcaagcagacaagctaggttaaagcaggagtacagtatgaaagatgaacaaagaatggggacaagagtgccaaagatagtttaaatttgtcagctgggcacagtggctcacacctgtaatcccagcactttgggaggctgaggtgggcagattgcttgagctcaggggtttgagaccagcctgggcaacatggtgaaaccacgtctcttcaaaaatacaaaaattagcctagctggcatggtggcatgcacctgtagtcccagctacttaggaggctgaggtaggaggatcacttgagcctgggagacagaggctgcagtgagccaagatcatgccactgcactccagcct

SEQ ID NO: 1604 - DNA, 4001 bp, Homo sapiens
gcttgtctttcaaaatgacttacacccctggttgtggactagaaacatctgacagaaagaccaaggtgaaggaaaattctcaggatgactaaaccactactaataaataccttttgcctgaggaacccaaaatgttttgtaaacaaataaaccaaatctgattttttcccccaacccacatcctgctaccaacttattactgcactgatgcctacagagagtgggcattttccaaaaggatcactctagaggtcaagtgaggaagtcacatgctgaacccaggagtcccgattctgaatgtacaagctctttccattgtctcatgttcctttttccagttatacccttaccccactccaggcctgaattcttatggaaccaaccaaaactattctagtaaaccacaagaataaactgattcctcatggatctggacaggggtgagaaggcactctattctgtgattcctttaacaaaagcctaaaattaaataatctgaaacaagttttctcacaatctcattcaatttccacgcaggcctgttcatccctcttagtggctgctccggagtagtcaaccaagtgtaatctgatagggacttcttcaaaacttgctccggccttcagaaacacccttctgtcctgaacggcctgaggcagctgaggctccccctgctcacaacacatttttcttcttagttcaaggtttagttgatcctgaaataagtggtatgtggagataaagagtgtaacagagaacacatgaagcccacgggaaaaacagaacaaatgtcacaaggatcagagaaatccctgaaactcgagggaggtgtcaaagttggaaatcctgaatgggaagggcactgtcaaatctctcccctacagacagaaacctctagaaagttgggggattgaggagggagaaagagaagctaaagaaagttatagggatcataatgcatcccagagaagagtgaggactaggttcaaagtaagaatgtaaatggtacttttggattgatgacaagggcccgagatcccttaaggagaagggaacaggcaattcttggaagccaggagctggctgggtaggtgggtgacagtgaggtaatggaatcagaagcagcacaggaagacagggatgcaatctttagctcagggaaatgggaacccagtgctggagttgcacagggacataggaggaaaagtgcaaactaggaaaagagataaaggtggagtccatggaaaaggtttggggcaggggcagagacgacgaggaaggacaaggatgggcattatgggagtcgtctgatatggaaagggttcatgacttaaaaaaaagaattattcgagacgtaggcaacagggatgagtgagggaggggggaatccccgaggcagagggaggagctaatagaagaggaagccaaaaagcggaggaggaccccaggcctgagaggaaagggtggagaaggaacccggggtgcagctgacaccaagagggcagtttcgtagtcgaactcaggtggggaagactgtgcgggacagggtgggagagggacccccccccccacccaacagggcaaaggtgactcatgaaggaggagtagcttacctctgggggacccccgcggagggggtgcgggcagtcgcggttggactgccgacactgccgcctcagcagcagcgaccgctcccgggttccattggccgcctgcgcttccctgacagcggccgcggaggctgcaccaggccccggctgcggggctgcccgcggcgccgcctgagggggccttcaggctgccacaagttcgaccgggccacacaacctcttcttcctccctcagtacaaccaagaccaaaaaaataataaaataaaataaaattccccagcaggtctcgatgtagtattcttctccggagtccaagccaagcctttcttcccaggatacgctttcctgcttccccagcggtcaggaccctaccgattccatagtaatctaaggagtcgggtgagctgcctggaacatgcctgttcagaaatagaaaagggggcggggaaaagatgtttggaagctctcgagggagagagggcgaagggaggagcttacgggtgggaggaggggccaatatttaagaagcggacctaagcgatagcgtttgcgaggctaaagaagccgagagagaagtaaaatttgctgcataagtagggtgagcaggcggccgtgggtgccctgttaaagaagtatggacatatgcatacttccagaagtatattaacatgcaagttatatgtaaacgaccgtttgagtaactaaccaaattaccgtaattgcaatcaatgacttttccccctcccgtatgctacaagactcccttagtaaatcaggccgtgggatggacgctgggttcctagaagggcgcgcaggaagacggcggacggggaagacgttctttctgactgcccttttcctacttatcttggaggacgatgcggagtttaagctccttaacatttcgggaatggcgcggtccaaccgcgtcagtcttttcgccgttagaggcccgactcgaggccgtggttctgcctccgaggtcaccaacctgcctgggcagcctgtgacctccagcatccatatgcccagccctccagggaggggctggacagggccaggttgggagaggtgagtgaaacgacaaaggcttggagggcacaatcccttcttccaaacaaaacgaaaccatattaggccaaacaaataaacaaaaacacgccatgcaaatgggcctctggtgttgcttttgtgtatttttcgtttgtttgtttgttttgtaaagacagggtcttgctatgttgcccaagcttgtctcgaactgttagcctcaagcaatctgccggcctcaggtaccaaagtgctgggattataggcccgacctcgcccagcaagttttttgtgtatttttcggttaagattgttgatttagagccctctttgtcctcagaacctctatctcaatgcctttcctagggctttacttaatatgcaatgcccctcattagtgccttacttaatacattgaggctagttatttgagcccgggtcttgaatgccatcttccctgccacttacaagccgtttgatttggaataactaatgtaacctctttaaacctcagtttctatgtctacaaagaagacatatggatgaagtaatattagcccattacagggttttgttaggatcaagagagtacaagttgctactatagtactttattattaattattgggacaatcatacaggatagatgatgaaagagtcactgctacaatgtttaattggaaggcagaataaagtgtaatagcttgaaaatgcctgtgtaaaacatgcagtatatacaacagtagaacaaatggggtacctaacctaattgctgaagggacatagtggagtttaagttaatttggaaggcctatatgtgtatggacacacacacatacacacacacacacacacacacacacacacacacacaccagtatatggtgaatgaatgaatggaaggcttcttagaaatattgtgagtcaggtcttagaatagatattggatataacccagcaaaataaaagacaagcgagcattctgaaagcaaaaaaattgtatgttgaagaatataaatgggaatttgctcatatcatgaggagagggcaagcagacaagctaggttaaagcaggagtacagtatgaaagatgaacaaagaatggggacaagagtgccaaagatagtttaaatttgtcagctgggcacagtggctcacacctgtaatcccagcactttgggaggctgaggtgggcagattgcttgagctcaggggtttgagaccagcctgggcaacatggtgaaaccacgtctcttcaaaaatacaaaaattagcctagctggcatggtggcatgcacctgtagtcccagctacttaggaggctgaggtaggaggatcac

SEQ ID NO: 1605 - DNA, 4001 bp, Homo sapiens
caggtgggcagtgcctttctctccagcactgatgggaaagatgatgcttcgcagctagtggattactgccaggtagtcgacctatccaaagggacatctcagtcccactttagcaaccatcaggtcagcatcatcaccaccacccccgagcttgagcaacactatttccccaggcctggaagcagccagagtggggcagggaatggcagacagcaagccaccctcagacacacctccgagtccatgcagcctcccgcctccatccctggactctgctttaagctgcttatctcctctcttgccctttctcagactctcaaacccatcccagcctcctgggaacaggataggagacagggagaaggagggagagacaagaggattcaagccagacagccccacgggaagaaaggggctaggtggctggaggattgtgcccttcagcccacccctcccaaccaccttaattcacctcagctatttcccccaagcctctgaagcttctgtggccagggttttcaggtcagggttcaatgctcataacttccccagatcctttcttggaatcgtttatataaccaccccctccccacaacttagtcctatttttctggaagggaaacaggaccaaaacttgggtcggggagattaacagtgaatcactgagtccaagtatcctgcctgtttactctatctgccaggaaccataatctggcatctctcctacacagagaaattaatactcctctacaacttacagcgcccccctataggggtggaagaggagagggcagagctctaaacagagaccctgggtggatgaaggaaaagcctctgagtcagggcacagaatcgcaaatcccctgaaggtagctgggcccagtggctagacctccagccttcccaggaccatagctcccatttcaaagggcagaagaaaaccaggaggcaggcggatgaactcggtagtttgaggttctatgagatgtcctcagatgtggtcaccctccaaactctatgtagcaggaggggagcgctctccttagaagactcccttctgtgaatctctaggagatcctgtcatgtgcagggcttgctagccctacacaattcttctcataggaggctttgtcttggaccccttttatggaatgtgatgagaaacttgctcctctttctccccatccttatctcctctgtcctgtctttttttctccattagcttcccctataacttcccacctttctatcccatagtttcacatgcctctgcctcttcccaaacaccgcgattcactacggcaggaccttcctctgagcctccaggatgcttctgccccacccctcgaggtatcggcccgcacagccccgccccctgcatctcagcagcctactggtatttcccaaagctcggatcccgagagtagccccaaagaccctatcctctcagctgcctttcccccggagcctcccctacgtctgccccgcggtcccatccctgcatgtgccccctactgttgcatctcttggccttgatcgactcgcccccagtgcctctacagcaccttttccccctggccctaccccaacaaccgcccctactactaaatccgacttctacccctcgtccccgccccctgcgcctcagcccccaacagctgcaattcccctcggccccacccctacatctgccccgcagccccgcccccggagccccgccgcagccccttcctcgctctcagctacttctctcccatcctcagcagctcgtgcctgccacgtcgtcggcgcccacccgagccccggcacccagtctcggtcgcttcccggacacggcgtaccgccgggctgagtccagatggggatggggggagggggccggtacctttaattcgcccagctccgccatcttgagacatcgcaggcgccccagccggagccggagctcaggcccagggaccggcgcacaactctccaccctggcgccggccgcaaatgccgcctgctccgcccagtccggccccctatacctccccttcccggccccgcccgcctggcttcggacaagccccagcctgagcccctccctccacagccgacccagcagctacacgtctgcggccggttggcaggacgcgtagccccggagggagtgtatggcccccaagatcgcggggtccctagggcaacggggaggaggcgggcccgaagtgcctggtggaggggggctttgccacggcagagttgggaggggacaagcttttagggagccaaagatacttgaaagatggagggaaagtatcgggaactgctagagctcagagaaatgggggagggggtagcgaagttggagcgcaaaccctcatctccatctctgcataagtttaatcaactaaaatcgagaggtcttccaactcgggaaatgggcgagcgctgatccgtcttagggaagccgtggagtcggcattcagtaattcaccctctcctcctcccccatacaccaactacagtgcagctcgtggtccgatcgtaggactcaaactcggcagcaaaaaaaagtttggtgcggggagcgggacttaccagcacaattgtgggaaatggagagagggctcgggaggctcagagggcgagctggagaggtgggggaatggggctcggcgctgctcctgctgtccgcacggcagaagttcggtccagcagccggacgcggcggccgcggctccgcccgggccggagctccgcccggcctagcgctcgggctggggccgccccctccaggggaagcccgccaggaccgccaagagggaaggggggcggagctcgggcgagagagggagggactcagagctcgacgttggagagattaactcctggtgtgagtggatctggagagacgagatccttggatcccatcattctcactacctctgtgacccctcaacgcttacgtatgggattggggtggtggcacactgctgctaagccggtgtgaaccaggtatctgacagtataaagcagtcttccttgaaatgacaactgtccctccctagggcaaagcctggggtactgaatccaaagtgtacctaacagtaactaccctagatacacgtgcagaatacctccaccagagcccccatacctttggtgtagctgaagatgaacagaggggttttcttacccacaaaagggatctttctgtccctctctgaactgcctacccactctccttcctccaaagccttggaccctccagaggccccatcccaaccaagctgatcactcacatgcaggcaccaaattaaatctgtttctgtatccatggaaatacctatttttttatttttttggggggggaccaagtctcactctgtcacccaggctggagtgcagtggcgcgacttggctcactgcaacctccgccccccgggttcaagcaattctcctacctcagcctcccgaatagctgagattacaggcctgcgtcaccacgcccggctaattttgtatttttagtggagacagggtttcaccatattggccaggctggtctcaaactcctgacctcgtgatgcgcccgcctcaccttggcctcccaaagtgctgggattacaggcgtgagccgccgcgcctgacccagaaaataccaacttaagggaaatgtacccgcactacatactgagaaactcacagcattttatagttggctgcaatttgttcaataaatatttgagtgcttatcagggatcattaggtgctgaggacataaaagccttgcaggagttcacagtctagcagcagagacaagacatgttaaacctataatcagcacaccaaaaaagggctttaataaataggaaaaatccttttatttagcttaagccttcagtataatcctcctcataagaccctacccaggccaaagattgaaggtgccagttgaactggaactaggcccagttactttgtggtttttgtccctagggaagatgccaccctct

SEQ ID NO: 1606 - DNA, 4001 bp, Homo sapiens
ctgaggacttactttctggtacctgcctgcatgaggtgtcatttcctgtttccaagaaaaagatcattatgttacagagtgatatgtatatatatacacataaagccttccaggtagaaaaaacagaatcatcctctttctgttcataaatcagctatggttcagccacctcaagctacagaaataagtcttcggtaggtagaaaaccgagatacgggtgtggttcagctacctagtgatacgtaatatataggttgtagaaataaatctaggatgggtagagaaccaaggcaacttatcacggccactatgcttaacacctcactgagagatttttagagatagtatctctgctccctaagctcaagtgtcaggaaaatgtcgtccaataagagattaggatcccctactgaactttagacttgcaacccaatcacacaaaagggtggaaaagttggaatttgttatttaactgacaagacaatataatgtatataaacacaagcttcgaatgtttaacctcaggcatctcaacactaaagccctgtgttgggaccatttcttcagtaaattgttttccactctccccggtacactcacacgcatatttgcaatgttaatgcccaagcttttcagataggcttcttaatagcttttgcttaaatgcctacttttctttaatttcagggcatattcttttagatcacccccctcttgctctctgccctttgcactcctgtgcaaatgcatgcaacaacgtggataacactaaaatcccagcacattaccttctgtattggcttaaacctcacagctgttctggctcccaaagtatatccttttatactggttgggatcttagataagtcgtatgccaagccatatccctttgggtggtatattaaaaaacaaacaaaaacaccaaaaaaaaaaaaaaagaaagaaaaaacaacgcatagtcagagaacatcagggccatcgaaatggagtgagcttagtgtgttcccatctgaaccttctctgcaagggattattctttattgtcttgactcctttgaggtcaagaccatagaattacacaagtaatacaggtaactttgtagaggggtgtggctggatacgtagactataggacattgccatatattcaaatgcatcagtcttcggagccccacagagctgaacttactctaatgcaactgtcagcctgaggtttggaggaatgggagggtaactggcactggctcagaggcctttggaagtgaggaaggagtagggattttatgaagctagggcttgcgtttaatggaggtgcaaggcggggagcaataatcctttaatctctggcattggctgaaacagctgcttgcagaagaacagagcgctttcttatgctgggactctggagatctcaagtcccacagaattttttcttttacgaaacttggaaacttggctatccctcaatagccggggaactgaggagcatctaaggggaggtgaatactcacatctgaaaaataacacccaggccctctgtggggtgatcccctaagagggacaaacttgttcccaatcaaattcgggggatggaagtgaggaaaaagtttcctctgttgacatgttccaaaagggtagttatccgcagcgtctaaaataaagaggagaggctccacgtgagggacggcacctgggtctacgtgagcgcgttccgggaggggaaggtcggggagactgagcagaggacagggcccaaccgtgcgcttacaaaaccacgccaaactcctggaggggggcgaactgcacttcctcccacttcgtctttcccagcttccccacccttccccctacctgccctctactctaggcttctcggcagccctcctcacctgctctgctgaagcacatcgcgagctgctagggctagcacttgtgtactgcgttgccaaggaaacgaaggctagtcccgtgattcccagctgcggagcgcggggagggggagagggcccgagcgcgcctgcgcggcaagttggggcgtccaccgagccactactggggcaggaacccgcaccttggagcccaaagcccaggggattgtaaactcagtagctgggctgcgggtagagggtttcctggattcgcggctgtaggggctgcagggttgacggggcggcaaatagctttggaagctgggccaagaggaatgcgctgttgtagagggaaggacagtgaggttcagaatgtcccgaagtctgggccaccagcaagtaaggtgaaagtagaaagacagccgctgcagcgtaccggggtggactccctgggcaacgccccagcagaggagtagggggcggagttgagctgacagctagttccatattaggcccttagaccatttttccttttcctcaagcccctccaatcaggttgcccattctatcccggggggccgtggggagggggcgcgaggttttaaaagaactggaggccttgcgtggaccgggtagaatgccacggaatcagagaagactctaatagttttttttttagaagttggggcagtcaaatttctaagccccagttttctcatctctaaattgggaataaaaattcctctatataggattgttgagaggatcaagatgacgggattaaaacagttcagaacgtggtacttggtgggtgacatacgacaggttattatcactgaagataataataaccgaagaaaaaaagatcagagtgtgttttgtcttttttgcctttgtcatggatattaacactagcttgttttcactcgatttttaggatggctttaggagttgtccaggtgttagaggttaacagaacacccagtgtgactggtccatactttgaccctttacaggtgatgaccctggaatccacacatactccgcgttaggacagccttcagggatgatttttatagatctaaggtagactttccaaaaaaggtgacagtgactcccagagggtgttttggaaatttgtggaagaatttttgcttgttaaaaattgttggggtgttgttcctggtcaacaggctagggaggctagacatcctacactgcattgcccaggcatacagtgagttgtcccatgtcccacatgacattcaaatatgtcctgttggactctacaaaaataattagtagtagttatatacattaacattgtgaagaaatttataggaaataatgcagaaagcccagtaatataaaaggttgttatgaggagccaagcttaaatggaataaagatagggtctgaaaattattgtataatttactccaagcattttgtctacttaaaatacaattgcaataatactgatagtaaataaaatgtaaagaaatgcaatcacccattacttagtgatgaggatgttttctaagaaatgtgtcattaggcaactttgttttgcgaacgtcatagactatatttaacacaaacctagatggtatagcctactacacacctaggcttatagtatggcctcttactcctaggctacaaacctgtacagcacattaccatattgaatactgtagacaattgtaacatgatattaagtatttatgtatctaaacttacctaaacatagaaaaggaacagtaaaactatggtttaaaattaaaaatggtacacctgtatagggctgctccattgtaattttagggagccaccattgtatatacagttcatcattgatcaaaatgtcttcatgtggtgtatgactgtattggtatggatttgatgatttttacttccattaataatttaggtaatattaacatttgtaggtattaatgtgctttttgaaaataatgtttacattatttgtgacatgaaatgtatttcgcaaagtttcttgaaaatgtggtaatccattcttactttggtagactggtttgcttcagactaattctccagctgagaacaggtgaattgaataagtaaaatatatatgtttgaagatatcaa

SEQ ID NO: 1607 - DNA, 4001 bp, Homo sapiens
atagtgtgctggatacaatggcagcattggcaccatagtcaaaaaagatgagatggcctaacagcatgaagactgacatggcatagatggtgtcagtgctgacagactctgtaagggtcttcagcactggtgaaaacccataagtgaaagtaatgaagactagggcactcttcaggtcagcccaccgggtctgcccactcttcttccgcccttcacctccatcaatgagatcaaacaaaacatacccaatcagtgaagaagccagaccagtccctaaaagccaatggggggccagaagaccctcatccatataccaccagataaccacaaaaacacaaacactgcacagctgctggatcaccacactggactcaaataccacagcccaatattggtatttccgagcatggatgtttttccggagctcttccaggaatcgccggtccacatagttatcaggaaagggctgtcgctcatacaagaccttctgccacttgacctccttggtgttagtcacaggttgagcatacattatcctttcattcaaactcaggccagtttaatcatcgccctcacagaagtccaggtggttcttgttctttatgaagttttgaaatgagacctccctggaaattccatgctgtgttgatgttctaccaacctttccttgttttcaaaggcaggggctaggcctacaatagatgaatttgtctctgaggcaggacaacacagccaagttcctagaaaaagagagactgtgaacctacgaaagttgtgaaaggtcaagagtagtactgagataaagtcaaatcaactcagtttactaaaagtctgagaaaaatgtatgtggtagtcaccttatgggacattaaaactgcatttcagatttgaaaattataattccttgaataataatagacatctgttagctatcgcttattgagtacctactatgtgctaagtgccttatgtatcttctttcacttaatcctcaccaccttgtaagttagtattagtcctgctttggtaaaaaagctgagattcaagatgcttaagtaactttgccctaaggtaacagagcagagccaggattcaaaccaaagtcttatcccaaagcctgtgtctcacattgtatctccctctaaagcagttcttaactcagtggttcacatatcccttaggtatatcacattgcatgcttatatctggatttgtgtaaatttatagggataatatccatagtttttattggttctcaaaggcatgttatttgtattttttaagttaccaatccaaagacaatagtaagctgcaccatacagaaaggtatgagctctatagtttaaccaaaatcaaagcctcaaagaaactagactcttcttccattagctgagcttagcatcctttaaagagctatcaatctactcaaaacaaggaaactcttgagaggatcgaagaagataatcattcctttttcacaatgagaaaactaagagtcagaaacaccacagccatccggcaaatttgagaaaaaaaaaattcatattgcccgactttatttcttccatgatagaccacaacaaatattgcttggcaagccagacaccgttaccccctctgcagcagggatcccagcccgggaatcttaaggccgccgccggggttggagggtctgcgacgcccaaaagggcagcgcccgcccgcagagtggggctgggaggggacggggtagggtagggtgaccccagggtgcgccttcactcttctggcaccccatttggctttttgggtgggcctcccacttccgccgccgcccctcactcagccttgggtctgcgggaggcagcagaggaaaaggagccccggaaacactgaccgttacacggaacccacctacccgagagttcctagggttgcgcagctgggggacggcggcacccagcctttttcccgcttcggggcgccggggctgcgactgtggccaagcacttccgggtccgccgcaatctccttagcgagggcacccttccccggctggaaccatcgcgacgtgactgctgccccctcctggctgctcgaaggacctccggtctcctctcctggagactggcccaaacccgaatgctctgagcctaggaaggcaaatccccagcaatcccctattgaaagatgggatgtgccatctgaaggactgggtaaggcaagagaggacaaggaaagaggctgggccagtaggtgagagataatggccgcttttgttgcgctcctttattaagtcaggccctcagctgggacttcccgtgcatccatgcgttcattccacagatactgattgaatgcctgcatgtaacaagccatgcttggggtgctcatgatacagccgtgaatgaaacacacaaaaattgctgctctcatgaaactctcttttttggtgcattgacctttacactgattatatcatctcccccctcaaagaggacaaatctaaggctcagataagttgtatttgtccaaagacaggcacctgggaagtagatgaacagagatcaatatccagttgtctatagcttcaaagcttggtttttttcctctttacctcctaaaagaagtgaggacaagattgctaattaaactgagttcatggaaatattaaaggatatataaacagaaggaagtaataaagaaacaaagggatgtagtaaaacacaggatacagtggaaataaaagtcagaaaacatgacccatttactagctcagtgactcaaggcaaatcacactacctgagctttgatttcttcatcagtaaaatggagatgacattatttgcacttggctactttataggatggttaaagagttaaatataaaaatggtttgtaaagtgttcactatatggctgctattagctgactttggccatcgtaatgatagcaatgtttaagtgtgatatattctgtaaaatgttctctatttccctctaggcttctgttccaaaatttgacaagattccttggcttagtgaggccagccttgtaaacaagccattagtgctcagccttcccagaaggtaacctctcagccaccgagggcaaaagttttacgaaacatctcacagaagatgatttcttcttaagggatggggacaattatcagagggcacatttgatccattgagaaactcaagtcaagtgctttaaaaatagaaataatccgggtttctcagaaaaaaatgatcactgagtataggcctggctagaggagatgagatctcaaaatttttccctctccaccactaccactcaacagtataagataatttttcccctagacactgtctctcaaaacacttccatcctctttctcaccccacattttctccactgctgtagtctgaaattttcacatttttaccatcaaaagtctagaacagtaagttcccatctttatagaatagtaactctgtatgtaactttgaggcaccctcctacattcctgttagtcctactccttccaaacaaactactatatgacacataaatctatttttcaaaattgcaggaattacatatctagggagcatttcaactgtctcttgaaataattgggttaccgtgtcccttctccatttttgatgaaatggttcctaagtgtagtgataaaccccactctgggaaggggacatggacagaagggtaggtgtgaggtagtgttggggtgaatgagagaaaccagaaagagggcagagagaaagagaaagggcaggcatagaggccattccaaaggcacacgacagactaaaaaggaatgactccttggcattcgaaacagctcgttagaaaagccagactccccaaaaagagtttctcctcctgttgataactaccatgtaccctcctgcccatggataagtgacttcataagcaaattcccatcactgtctccacatccccactttagtaacatgtacctttgctttgtctactgtacattaaaaaaaaat

SEQ ID NO: 1608 - DNA, 4001 bp, Homo sapiens
agaaagaaaaaatttgaagtgtagtcagggcccaaaaaatatgcagggtttttgtttgtgggtcatggtggagagtttagagcaacattaaggtgatcttttgagcaacatcaaggtccctgggtgacatgattggaactgcatttttaaaagttactctggcttcaatttggagaacagattgaaaggaaaaaacaacgactcaaggcaaaacatttaggaaactgttgctcctatctctaagtgagatatgatggaataacagtacaaaccatacacgggttatagtaaatgagtgctgtatcaagtgtacaaattacaagagtaaaggcaaaggtaagagatagggaaacgttctacagaggttatgcctttactgtatcttagcacatgaacagaggaaacacaatgtataaaatattgtaatgtgaaaaagcacagcaattatgtaactacaaaaaacagtaatagtatccaagatgaagcagtcaaagttagaataaaggagggaaacagaacttctatttactcatatttatgttctctaaaaattatgctatataaacatcaaatatataaattaacagtaattcataaatatatatgaagttcatgctcaatatctttttttaactgatagggtgtgtattcaaaaagtttggagtccactggtctaagctcaaggtgcccaggtggtggggagaagaggttccaatatggaacactggaaaagtaggcaagcaccaggtcataacgtttagactttattctgtatgcaattaataaatatttaaaagatttcatcagaagaataacctgatcaggcttacatttcgtgtagacgaatctagcaccaaactcagggagtatggaggcctatggaaaacaagataaagtaatcgcaagagtctagacaagaagtgatcacagcctgaattaagtcagtggaactggagaggtgagggcaattttaagaactcagatcacaaaatttagtgataattagaatatgggataaagagattaagactctcaggtttctagcttaggagcagcacatctggttgagaaatggaggagaaaaggggtgcttagtttttcagtgtctttttaagaggaggtaggataagcagaagataaaactttgcacacggattttcaaatgtctcctgactatcccggattcttagtcagctggatatgcaggcctgaaaaagataccagacatctagattgtagaccgggactgaggaatcatcagagtatggtgaatagtaaaagcattatagagcaccagaacatcctgtgtccacgtttaaaaatgggaagctggaggagcccaggataaaactaagcaccccttttctcttccatttcttaacccagacgtgttgcccctaagccagaaacttgagagttttaataaacacttatatttatcccatgttctaattatcactaaattctattatctggattcttaaaattgccctcatctctccagttccgtctgactcctatcaaaacagagggctgcagttgagtagtaggaaagcagttgctgcacactgacatttcacgagcctcttgctcgtatttcacctaagaactgcacacatgtaggagcaaaggatcaggtcctcctctgtctccgagggtttgattatttcaattcatcgttttaaaacgctgaaacagaccaacagtgtcctaacccgtgcccagtgataccctcctcaaacccagcctgggtcaggggctgattgactccaggaggcgtccctcagctactgtgtatcggacatctgctggagggctcacagccggcctcccggctgtggtcaaatgagcctgactcctacctcgatatgactagcggccacgctgccgaaggacaagagcaacacagttgccaagacagtcgcagcccggctgaggctgtcggtgacggccatgtttaccggcttcagacttcccgcacctgaaggggcggaggcagtgccgtaaagtagcgctgcgggtttttgcgacaccatccgcgcctcttcgaggtggccctctggtccggctttagaactctgcggttttgtggagctcgagagtccgggacaaggtagacgcaggatattgacctttttatttttaactgcattttcagtttggaggttgtaaaataggtataacatttaagaaaaaaaattgaaaggtgagtggagggaaaacccgtaactccttaaactttaaaaacttatttctctgttcccttatttattttatttatttatttatttatttatttatttattttgccgagtgctgccaattctttgaaaatatgaagctggatgtggtgggaagaacaagcgttttggcacaaaaagatgattaattggataaactataaatggaaaatgtgggtgggcgctgcaatttagaggcttggggtctactacctggtgaaaggattaacatgggaagctagttacgtttttgtttcttgagtatcttctgtaattatggaactaaagcctatctggaagagacacagctggtgtatatgtatggtccaccattctctttattatgtgagttcagttttaatttatgcatttcatctagtatgacataaacgtttccacgctgcttcctcacaattttaacatttaatggtgagataaaattccatccattattgatgcctcagccaaagtaattgtccctctgctgcacaatgcaaagtttttaagttttactatgaaaataatattgtaaagagtatcttttgtgtgtttggctttttaaatctgttgaattattttgtttgtataattttcctgaactaggaatttggggtcaaaatattccaaaacattttaataactataaatgatgttgctttccaaaatgaacaagcttacagcactatcagaatacacaacaccaaaccataccattttttttcctttaaattctttggtatgaaatgttacccctaggtaactatacttataattctttggttactatcaagatctgatgtctttcttgtgtttctaaactatctctgtgtcctctgatgtaaattctttgtttatatatttatgttttgcatatgaatttgaataatatatttataaataagtaacattagcctttgccatattttatgctattgcttttcccattctcttgtctctcttttccttttatttgtttcttttgctattgcactttgtgagaggtttcatgctatttagtcaaatttaggttttccgttacgtgaatcctagaaagtaaatacactgccagaatatcttccatgtattcattaattcaacagatatctattggatgctgatgattatgaaacaaagtagcaaagataagaagccatttgctcattctgctcctttgccagcaatatttcacaaagcccctgactcattgactgtgagcagccttgtggaagaatgccttgaagaccataagcaggatagggaataggtttgcacatctcttgcctgaatcactgaatttttacaaaaggtaagtttggtgatcctagcccttgcctcttcctgtacataagataatgtctgacaagattaatgattatgcctcaaattcatgaccagatgtaacttcatacccacactttgatgagactttacttgtattaacccattttcatactgctatgaagaaatacccaagactgcataatttctaaagaaaaaggcttagtggactcacagttccacatggctggggaagcctcacaatcatggtagaagatgaagaaggagcaaaggcacatcttacatggcagcaggtgagagagcatgtgcagaggaactaccctttataaaaccatcagaggccaggtgcagtggctcacacctgtaatcctagcactttgggaggccgaggcaggcagatcatctgaggtcaggcattcaagaccagcctggccaacatggcaaaaccccatgtttcaaaat

SEQ ID NO: 1609 - DNA, 4001 bp, Homo sapiens
tgagactacaggcaagggccaccatacacagtttaagaatattttttggattttcacagctgtcaggaaagctttagaaagaaaagatgggtgttaaaagttaagacacagcttaagacagaagcattgtaaaacaggaacaaatactggcttaaacctgatgtctctaactatattcctctattttaagaatgttttagtatctgatagtttcatcagcctttccattttccaatatgtgacctttattcccaccatgtcccaaataaacgagtcctaggatttcctagaaggtggacctcaattattgtgtcccttttatatataaggcaaacattgcttttaagttctgttggaacatgggaactttcactagaatgcttagaatgttcagaaaaaatgtcccaaagctctcttctggtccatacaagacaatcagaatgtaacacagtagcagagggtgtggaacatacactagtcatatttgattctctctgtcaggggttcttctttgtaatgggaaataatttgaatcaggatggaacaattgataagaagaaagaacaaaccagctaaccaaataaacagaaaggtgttctttccttgaaactctagaacataggcaggagccagccacatggcctgccctataaaccataacattaggagaactacagctcttttccaaggcattctgactagtggcatcacaagaggcagtaagcagaggtaccaaagaaagtactgggaggtgcagactttgttaaaagtcacaaaaatggacgtatgaagaaaacaacaaaaaacgaggtctctgtaataggcgaaagacacagctgaaagcaagatgagctgtggcaggaatgcagcaattcccagggaaaaactccacttgctctctgcagtcaaatacagcatgtagaagtacggagaaaagttgtgacggatatcccgcctagtcaggtgataaaagtaggtgtgttccaaaaattcccagccgtactcatagtaaaaaccaaagctcagggcaaaaaacgtgagtccagcaactgctacaaacagcagcacagcccgattacacagccttttcaggagctcgtacaaacaagcctggaaagtgtaccggaattgacggaggcttttgtcattgtcgcgatctggaagcaggtggagggttatgggaaggatgtaagtcactggatatatcttcatatgcaccgcgaaaccatagaatacagctgcacacgcgacgagtcttttctttatcaagtagaggaccatcaggaccagggaggcgacaatagagtccgcattaccgcggctggatactgccataggcagggggttaagaagccaaaagacacagtagccacaagcctggcggcgccccagccccttcagcagcagcaggcggtataagaggaaagcggtgaggaggtcgcagctgatgaagagaaactttccaaagagctcgctgaggtagatgttgggagtgaggagccaacccagcagcggggtgtaacggtacgtggctctcaggtaaggcgagcgcccctccgtgacgaagcgcgcggcgtcggtgaagacctggtagtcgatgtccgtatacctcacgtgcagggtccggtcctggaagacgccatagaaaaccagggcgactctggctagaaaggccacaccaaagacgccggctggagccaccttcaagttcaggagccattcgccccagtgcttggtggagcccatgatctgaccgtgcgacagctgcttagccccagctccaaactgccttcgtacttctaaccttcccttcggttctttgcagcaggtggccgccgcatctcccacccgccaggctgccaaccgaaacgactgcagactatcacatccggcatgaagccccgcccccgtactgctacctgtctccagccccgcgcggtcttctcagccgcccgagccaaaaacttgccttcctctggatggacggtctcgcttccgcttcttcttccagcggaggcgggatttccggtccgtgggaggggagacgtccgcttgccgggaaatccggcactggcttgaggattttatggagtggagtgagatttctttgtaagtgacagcccgccgccccccgccctcttcccgcgccccatttccagtcctcagaggaaaaccctccgacgagcagcgagctgcgggctgcgcgctacatccttcagtcctgggctggagatccgagagtgaaaaatgtaggagtgaaaggaagataagccttctcatgctttactccactagctcgccggtattcaccggggatttgtgggccccggacaggacaggatgagttgaagggggctgagtgtgtatgttccatgcaatattggaggcatacttatatttttaaattactagttggtaatcagagattcagatttaagtgggcagcttgtattttatccggcaaccctaggtgaaggtgatgggaaagaagacaggaaagcgtcacaaaattccttaacttgtcagccccttatgcctcagtatctctgtatttgctatttcttctgtcaaagttgccatccgctctccaatcactctggcaaatacctactcaacccttcaggcatcagtgcaagtgttagctcccagctcccactcacttcctcatcacgcagaatgaatgacttagatgccagtcccctcccctgtccgaggataggtagactggggcggacgggatctaagttccagaaaatcactcacacagaagaccctgccatgctactaaaagttctcccagtgctccagaactccctggtcattcctttgttacagcatttgtcacactgctttgtaataactgtttttgtttgttttgctctcctagttttccatcaggacactttcaattcttcggtatcagagattatcttgttcttttctctacctcaacatctaacacagtactagtagccattcagtaaagttgaattgattttagaggttcctcctaccagaatatttctagagtggcatctttggattgctcccaactcccagttattttcccttttaaatatcctttatgtatgtcaaggtcccctgctccccccaccccactccaaccctacttccatgaatttcttgccaaggactgtaacccattagctcttccctttccgtggttacttagtgcacttacatagtccgcattgtagaatttgatactttattttagattgtattcatagccctcacaagagattatagggttcttgggggtagaaattatatcttatccttaatttttttcaattatgtgtaatttattgtagtcttaggcacatggtaaatgcttagtaaatactgactaattggattttatagaataagcctgcttcctaggggaagtcttctagactagaataaggaaaaggaggtgacttcatgcagtctgaacatgcagctcccagaactacctgctgctcatccatcctacacttcaatttatcccttggagatgaactgtgttaatcttatatattccatattcatattgtgatagctctatgtccttttatatgccttggtatcattacatgccttagattgataattctaaccatttttttgcagtatattagccatatatatagtggcagcacatcaccactcatataatgatgattatgatgatgatgattactattatttataatagctggatttgttgaggactcatttgcaatgtaccaggcattatgctaagtacttttcatgtaaggtagatattcccacctttacaaatgaagaaaaccaaggcttatggagattaagtaattttcccaagtcacatagctaactagtgacagtgctagaactcaaaacccagtctgtctgacctagaatatcttaatcattatgtggctgacttgccaataaaatgttgatcacaaattctaattttcctatgttttctcttattgatctctcatcttgat

SEQ ID NO: 1610 - DNA, 4001 bp, Homo sapiens
catctcaaaaaaataaaaaattaaaaaatgaagagacacctggacccagaggtaggtgccaacagagaaatttcttcctggaaaatattagctgctatttatttagcacctaccatgtgtaggatatgttacataaccatgggtataaccaggcatgttgacgccaaagcctctttccactccaccatactgtgtcgatgccagtgacattgggactccagccccagcccctccagagagagggcaagacatagatgaaggtctctgctgagcacaatgcataggtatttttttttaagttggatagtttgctttttaggtgacatcaaaatgtcctcatgaccatatcaaaatggctgtaccaaaacctcatcgttcaaacttgctggtgacttcacaccactcacatagactcacggtgtcttggtttcctcaactagggaatgacatcacaaaaccaaccctgcctacctcctcgttggtatcaagggagaatgagacgaaggtgtgaaagcccagggcaagtgggtttactaaatggaagcctgtgtgaccccattttttatcacctaaagccacagaggtctagcggcactaggagataagcagagagagttgctttcctgactcctggctcagtgttctttctgctactttagcacatccaggggcgggacaaggatggagagagaattccagatctggctctgggaagacctatgtccaggcaccagacagctgccttctacctaaacccctgaaattggcatctcctctccagatgttaaaggatctataattcccctagtgaagggggaaagtgatggcacaaaataggagcagcttcaatggccccaggcactgtggcaattgcacaaagggaactgggggtcagggatggagcttgacccgctgctgcccttgtgccggacggtcccactgctggcttgggctgctgtcaggatgggcaaagggaggggaagcccatgtctgagatctgctggctgcagagccaggaggaacagcaggagttgatcatgctgcctgtggggctcagctccacctcactcagtgatcccgtgaggacctctttttttctacctctaggaagggcaggatgatgcgatgacacacatttatgtctcccatggcaggaatctgctagagcaaagcgaggtggaattgcaaaggatttcagaggttcttggaagcccagaaaaaaggagctgaacatgcctttgccagaaagccacaagtgggaaacctcaaagaatggaagaggacttgctaggtgccatactttatgcgcactatctaattccaggtctgttggtgttcaataaatccttgattaattaaactaaactgaaaaatatgaaacaattcctatttcattctagaggttacaaagctatttcacctgtgttttctcatttgaacccacattgaccctgaatgataggtgttatttctatctttgttttacagattaagaaactgaggatcagagaggttaggtggcttgtctaaggccacacagttaatcaactatgaggagttaggaaatccaggcacagaccaagctgaaagagtagaattacatatgctgaccacagaggtcccttcccacctgctgatatttctcagaaaaggatggggggcttccacacacgtgcatccctactcgtcccactgcgatatgcacgcttactccccagccacacacagtcacacagtctgcctccttgtccttgtcaccccactatctaggagactgggagttgggaatggagggggttacctgagccatcgtcccgagccctttccagatagcatcccgtctggggatcccagagcagtaacacttacttttagccacttccttctctcccgttgatctgacttcagggacacagcctgctggccagttggtaacccctgcctctctaggagctactggcagggcactggacgctgctgccaaaactgaaactctgctcagtgtttgacccacacctgggctcttaaagggccactctcccacaggcaccgtggccagccagggtcatgtgactctcacagatcccttgctttcctttcattttggccttcctggctggctccatttggtttcctttgaccttggggagactctgttacttgggaatcctccatcgttgcagcttcaggatgagggacagaatgtcaagcgtgaagatgctgttctgtcgctttctagctgcaagacctttggcaagtcaccttcctatttcttttcatctggaaaagagggatggtaataccaaatctacaggtagaggatatagcccggtattagctctaaaatacctggcccaatgcttgatttgaagttgacatcatctgatggggcacaggtggcaggagtggctgtcgtagtccttggtctcatatccccagttgctctggaatcccctccgactccctaggttacttagcctggacaaaaatgccccttatacacctcctgccaagccccttttaccagtcccagagctccaggaactggcaggactgtggcccttcctgtttcactccccagagtcatgaaagactcgctgcttctgggctcccctgaacatggctgacctcagagtcttgttaggacccgggctcggctccatagcaaggacggtgctgacctgctgagctgaagtagcacctccttccctatctgttagtccatgccaaaacatgacctggttgggactcccaggtgttccccaaatgatcgtggcagtcctgtgacaaaagtgaagcccactccccaacacacacgtgtatggccccccgacccctcactgcaaacccccacagaaatgctgcccatcctacctgtgcagggctgacccaggctctccctacagagtcctataggccaaacaccagaaggggaaggaaaaatagagaaatagagccctggagaaacacaaggcagccagagccctgggtcttattttagctaaccactggctcacttgtgggtgttaacacacaatcacagatttcaatggcaagcaaaaaaaccccataatttctttatgtagcttaatttctctctttttttgtggtttgcaaacttagattttctttttttattttgttttaggttccaggattacatgtgcagaacgtgcaggtttgtgacacaggtaaacgtgtgccatgatggtttcctgcacccgtcaacccaccacctaggtattaagccccacatgcattagctattagttctaatgctctccctccccccaccccccccaacaggcccggatgtgtaatgttcccctccctgtgtccgtgtgttctcattgttcagctcccatttatgagtgagaacatgtggtgtttggttttctgttcctgtgttagtttgatgaggatgatggcttccagatgtagcttaatttcaaaccctaaacccataatctgactgataaaagaaaacaagttacctagtcacttctaggcaagctcagcccaattcagtgatctctcagtcacttcactccagatttaaaatttagcctcattatggagttcccttcctttttgtctcccttctctcccctggggtccagtctggagagagcggtcttgggtgagggggtggtcaatgttactgctgaggcagtgaaaaggggtggcccattattattttggtcttgctttgtcacgatgctgtgctggccttgggctccagaaggaaatagttttgtctactgagatgtgacttcccctgcttggtcagtgggctttgtccctgctcatcctgagggttctgtggtccacactgtgccctcctagtccatacactgagctccctggggtgggtcttccaggccctcagcctctccttgcccaccttgtgggtgcagggtgagtttggctgatcacagactcctgaggcctttgggagatcctgtgcagcagagtcacattttcccccaacactcttgtaa

SEQ ID NO: 1611 - DNA, 4001 bp, Homo sapiens
ctctagcttagctctctgatgtgtgttcagctggtctgttaaattaagtggggaaggaaaagaaaaccaccactcagcaggacctcagccagctcacactgctgaaacaaactgagggtgaagacagagtagactaccagggatggagaaaactgttatttgccatctctttgttgggatggtagcaacgtataaacaatcgcaaagccactccgaggcagggaatgcaccttaaggcatcttttataattccttgagctaaaaggagtcataaaggctcctcaagaactttcaaacaccagcctgggaaatttgaaaggaaagcaaaagcatcagaggcagctcatcaatttgggatgaagaactatgcctaaaaggaaaaaaaaaatttgaactgagaaatttaaggaggacggctggaagactctttttcttctcttatctggcgaatacctaaaaaacctgtatcacttgtttctggaattctctgatcctcactagacagtgtgctatgccctcattacattctgccctattgccgttattgctattgcttatttaagttgctaagggcaggggctttacatcacaactatatcccagggcctagaacacaaataggcatcttaaacctgtgttctgaatgaatggaagtggtagggacaggatacagcatcagcagttcactgactctagatatgaaatcagtgccccaagtattcttcccatcatatctcatgtcaagagcaagacgacaaagtcacagaagccacaggaaaataaaatttccccagaaagggagccaagttggccaatggcaacagtactctttccttggcacaagggggcgcctgctgcttactccatcgccaggaggcctggaggaagggaggggcccccaattccacaccggttggctcacgaaaattcggttcaaaggcaagcttctgaaagccccagacagtaacgatagtttgtgaatctaaacgtttccaacgtatgactcgctgaatcgagagaaatcacggaaatgggcatactcaacctcacgcggctactccttccctatcctagggcgaattcactcttttttcctcttccttggcttcccacgcgcatgcagaagagaagctgggatcagaaaagcacctaacccacctctgccacttgaccatgcttgcattcttcctttcctctctcgagtcaagctctagcctcagcgactacagatgtgtgtagcccacactttgcttacaggtaaaccaagtaaaaacaaagctagtcaattctccctctcagctaattgcccacctcacttcccaacaacccctttgccaaatcacagactcttaactggcaggacacttacagatcaactagtttcactcttcaaaaattttcccgtgagataaataggctccagagatctcatcagacactgtgaggctagtataattaccatcgccattttatggatatggaaactgaggctcactggggtcaagtgacgtacccagggctacttaaagaggctgtcatgttttctgcttcttaaacctcacggtaccagcccgcatccctcgccaaagggtacgcgccctttccgagccaggattatgacccaggtcacccaaacgcctagcccagtacttccatgccgcagcctgcccttgctaggtatgcttagggtagttgggccctatctgagaatctgggacatcctgttgaacggcagctctggaccctctgggtaagactaacaccccctgcgcaggctggagaagtcgctctgacccagggtcctcagagccaaaggcctcgtgggggctgccttctgtcagcccagccgtgtccgcaacccgtttctggccggctccttttggacacagtcccttctgggtactaatcatccacgctcaccccagaggggccacggcccaaggaccactcccgagggagcctgcagagccccaccaggccacagggccggaagcagacgagggcgggaggctggaaaggaagaggcggcgcccgaggctgctatggcggaggggcggggctccccgcttctccgggcgtctgtctcatttctaccggcttccatttgacagcttccctcccgccagaactccagggctcccaagctggcgcggggtcctcagcccctgcccgtcccgacctccccggcggggaccgaacctcagctcctccatccggggcccacgcggcccgcgcctgcgcgctggctccgccgacggcgtccccgccccgctcctgcccggacttggagcagccccgcctccctgcgcggcggccatgttgactccgggcgagcgggatgggggtcgccgctcggcgcctcgcctcgtagcaccttcccaccttggtgacacctgaagagttctctcgcacttcgctctccttcaaggccccccgccaccccgccttcaaatagtgagcggaggctgctgtctcagagtcagtgctcttgccccagctcccgctgacgttcactgagttcccggtgtgggccgaggctcttgtagtcggaggctgacccgcagcctcttcacagaaaccagagccgcgctcttcctgctgtcaggcaacaacagctcagcacagggcctgacacacaatagatgtcctctgaatagccaaagaaaaacattcttggggtttctgtggccggcagcggcaccctgcgtcctgggtgtgaagaaagtgggggatccccctgattttcccctcctctatctaccagagaccttctgtcctactttagtcctcagccccacctcaggtggctaatgaggatggtgaagaaaacctcagagaacaccctccagggctcctttcacctccctcacccaagcagtttctctcataggaagtggggccaaaaaaagaagaaaaaaaaagaggcgaactcaacaaaaccgtctattggggggagcggccagtttgtacccttgtaacggaaactgttagaacaactttgcaccctccttaaaggaaacagatgataaatccttctccgttggtggatttcttgtttctcaggattccaaagccttatgtggtttcagttatctgccctccaaacgaagccaggggccgggttagcctctggccacagcctggctcagggaggggtttatcttctgcaacggctactcatgtgggtgggaacaaagagatggttgctacctctccaggcgaagaccagcccacatcagtctgtgggggcctgggactgtatctcttgactctgtaactcatttcaggccctgagacctaaattgccttcagatatctgttgtgtgcaaggtggagaaaaggcaaatcatatttagtcgttgtgtgttggagaagggggaaaaaatggagtttcatggcccttcccccaggtttttcagtgccacgcacttgttctcagctccagaggcctgtgagtaacgtggcaaagcctggggacacacttgtgactggggcctaaggctgtgacttgaatctctagaagtccaccatgaggctccaagcagcactctctctgcaaagacaaaactgagaaatgaactgtccttgctctgtaaattcacaaggggaaaaaagacatgcattctcagggttccctctgtccacatcaaattctctcaaaaatctatttgtaaaaaggccaggggtctctcaagacaagtcagaatgttttttaaaagctcagctgtcaccctgtagaggtagaactttatccagattttcagctgtactttcctgcaatttctcttttccttctctgctacccaaccccctcctcttccgctctgtttcctgtttcattttctgacttctgctctgacaggaaaacaaggaagctgaatcttgtgctctcaaagccctgactccctggtttcagattggaagaaggctaggtgggataggaggggattctgggactccaaggctttgagtagtgacggaggcagcctctcagtgttctt

SEQ ID NO: 1612 - DNA, 4001 bp, Homo sapiens
tgcaccttaaggcatcttttataattccttgagctaaaaggagtcataaaggctcctcaagaactttcaaacaccagcctgggaaatttgaaaggaaagcaaaagcatcagaggcagctcatcaatttgggatgaagaactatgcctaaaaggaaaaaaaaaatttgaactgagaaatttaaggaggacggctggaagactctttttcttctcttatctggcgaatacctaaaaaacctgtatcacttgtttctggaattctctgatcctcactagacagtgtgctatgccctcattacattctgccctattgccgttattgctattgcttatttaagttgctaagggcaggggctttacatcacaactatatcccagggcctagaacacaaataggcatcttaaacctgtgttctgaatgaatggaagtggtagggacaggatacagcatcagcagttcactgactctagatatgaaatcagtgccccaagtattcttcccatcatatctcatgtcaagagcaagacgacaaagtcacagaagccacaggaaaataaaatttccccagaaagggagccaagttggccaatggcaacagtactctttccttggcacaagggggcgcctgctgcttactccatcgccaggaggcctggaggaagggaggggcccccaattccacaccggttggctcacgaaaattcggttcaaaggcaagcttctgaaagccccagacagtaacgatagtttgtgaatctaaacgtttccaacgtatgactcgctgaatcgagagaaatcacggaaatgggcatactcaacctcacgcggctactccttccctatcctagggcgaattcactcttttttcctcttccttggcttcccacgcgcatgcagaagagaagctgggatcagaaaagcacctaacccacctctgccacttgaccatgcttgcattcttcctttcctctctcgagtcaagctctagcctcagcgactacagatgtgtgtagcccacactttgcttacaggtaaaccaagtaaaaacaaagctagtcaattctccctctcagctaattgcccacctcacttcccaacaacccctttgccaaatcacagactcttaactggcaggacacttacagatcaactagtttcactcttcaaaaattttcccgtgagataaataggctccagagatctcatcagacactgtgaggctagtataattaccatcgccattttatggatatggaaactgaggctcactggggtcaagtgacgtacccagggctacttaaagaggctgtcatgttttctgcttcttaaacctcacggtaccagcccgcatccctcgccaaagggtacgcgccctttccgagccaggattatgacccaggtcacccaaacgcctagcccagtacttccatgccgcagcctgcccttgctaggtatgcttagggtagttgggccctatctgagaatctgggacatcctgttgaacggcagctctggaccctctgggtaagactaacaccccctgcgcaggctggagaagtcgctctgacccagggtcctcagagccaaaggcctcgtgggggctgccttctgtcagcccagccgtgtccgcaacccgtttctggccggctccttttggacacagtcccttctgggtactaatcatccacgctcaccccagaggggccacggcccaaggaccactcccgagggagcctgcagagccccaccaggccacagggccggaagcagacgagggcgggaggctggaaaggaagaggcggcgcccgaggctgctatggcggaggggcggggctccccgcttctccgggcgtctgtctcatttctaccggcttccatttgacagcttccctcccgccagaactccagggctcccaagctggcgcggggtcctcagcccctgcccgtcccgacctccccggcggggaccgaacctcagctcctccatccggggcccacgcggcccgcgcctgcgcgctggctccgccgacggcgtccccgccccgctcctgcccggacttggagcagccccgcctccctgcgcggcggccatgttgactccgggcgagcgggatgggggtcgccgctcggcgcctcgcctcgtagcaccttcccaccttggtgacacctgaagagttctctcgcacttcgctctccttcaaggccccccgccaccccgccttcaaatagtgagcggaggctgctgtctcagagtcagtgctcttgccccagctcccgctgacgttcactgagttcccggtgtgggccgaggctcttgtagtcggaggctgacccgcagcctcttcacagaaaccagagccgcgctcttcctgctgtcaggcaacaacagctcagcacagggcctgacacacaatagatgtcctctgaatagccaaagaaaaacattcttggggtttctgtggccggcagcggcaccctgcgtcctgggtgtgaagaaagtgggggatccccctgattttcccctcctctatctaccagagaccttctgtcctactttagtcctcagccccacctcaggtggctaatgaggatggtgaagaaaacctcagagaacaccctccagggctcctttcacctccctcacccaagcagtttctctcataggaagtggggccaaaaaaagaagaaaaaaaaagaggcgaactcaacaaaaccgtctattggggggagcggccagtttgtacccttgtaacggaaactgttagaacaactttgcaccctccttaaaggaaacagatgataaatccttctccgttggtggatttcttgtttctcaggattccaaagccttatgtggtttcagttatctgccctccaaacgaagccaggggccgggttagcctctggccacagcctggctcagggaggggtttatcttctgcaacggctactcatgtgggtgggaacaaagagatggttgctacctctccaggcgaagaccagcccacatcagtctgtgggggcctgggactgtatctcttgactctgtaactcatttcaggccctgagacctaaattgccttcagatatctgttgtgtgcaaggtggagaaaaggcaaatcatatttagtcgttgtgtgttggagaagggggaaaaaatggagtttcatggcccttcccccaggtttttcagtgccacgcacttgttctcagctccagaggcctgtgagtaacgtggcaaagcctggggacacacttgtgactggggcctaaggctgtgacttgaatctctagaagtccaccatgaggctccaagcagcactctctctgcaaagacaaaactgagaaatgaactgtccttgctctgtaaattcacaaggggaaaaaagacatgcattctcagggttccctctgtccacatcaaattctctcaaaaatctatttgtaaaaaggccaggggtctctcaagacaagtcagaatgttttttaaaagctcagctgtcaccctgtagaggtagaactttatccagattttcagctgtactttcctgcaatttctcttttccttctctgctacccaaccccctcctcttccgctctgtttcctgtttcattttctgacttctgctctgacaggaaaacaaggaagctgaatcttgtgctctcaaagccctgactccctggtttcagattggaagaaggctaggtgggataggaggggattctgggactccaaggctttgagtagtgacggaggcagcctctcagtgttcttgtagagtctgcagctaagatggagcctgcatctacccagggagccagctgagctaccagaactgtggaaagcaagtgagaaagagccatatcccaggctccagaaagactccacacttcccagccatttccattaagaagcacatatcccacatcaccaagaaacaatatcacatacaaatccctaaccagaacaatgcaagcaatgcattactattctagaagc

SEQ ID NO: 1613 - DNA, 4001 bp, Homo sapiens
ggattatcatgagagtccttctcaaactttccttgcattcaactagagaatctctccaagtaattccctatctatcagtatagaattcctgtcagtaacattaaaaagcttggtttaattcttagtgaactactcttagtggactaagaactatgagtgaactaagttttctcagaacaccaagcactaggcaagggttttacctgtcctcttcactgctgtgcacgtagaagagtgtcagtgcacattcaatgtacaatggtggaatgaatgcccaaaagataaaatgcaaactccttcagtggctctggcgagattaaactgctttcagttcacctcattcaccacactccattccccatcctgccccaattcctactcattgttcagatctctgcaaacacttaatttcctccaagaagtctgaccatcaaaaaggccccactgatgagttcacaaggcaacccatatttcccccactcaatgacttaaaagtacctaaagtcactagtaaacaatcaagatgttagtcaaattaatgaataaatgaatgagttcctttttaacatgatctgatagacttaaacccttgtgatcctattgtcttccagaaatgactttaagaaccacttgtgtcattactggctcttggggaagctccatctcattcaggactcgagcctcatgaacattttttttctcacagtccccttcagcatagcacagaaggaacacaggttctagaggtttcctgacctagactcaaattttggctcctctcaagttaattgtacaagctctttattattattattattttcagagacagggtctcactctgtcacccaggctacagtgaaacctggatgcaatcagagtggtgcaattatagctcactgcagcctcaaactcctgggctcaaaagatcctcccacttcagcctcctgagtagctgagaccacaagtgtgcgccatcacaccctaattgtttttatttttatttttagtagagacaaggtcttgctatgttgcccaggctggtctcaaactccttggctcaagtgatcatcccatgtcagtctcccaagtgctgagattacagcataagccactattcctggcccctatcttttaatttaaaaaaaaaaaaaaatctgcctccttaaagtctagagtgaaaatctaatatctctggctacaatgttcctctcccaggatcccaaaacaacccatttgcaaaccacctcccttttcttggtgagaattaaatccactctactggtgctcgcagtcacagcaatttctttcactctctgggagacacacagcatggcgagtcaggaatgggacaaacactctgctttcagaaaatgagggctcttagggagacgtcaatagttgaagggctccatcattactactatctgggctttgcttagtttattacctgagacaaaaagaactcatacctgattcttctacctggcaaggcaaactgtagtttttcctcaaaatggaatccttttggccctctactcttcttccctcatccttataacttacggtttgctgcaaaggacgccatctagtatgagagaaagagagaaagatgtggctggagagaatgcttccactcaagcttcttcctggtgggcttggcttagcgaggcttgaggaatgagccacgtgtgtgaaacaactctctaatattaggcacccacctctatggtggaacagtggcaggagtgacacagtcatgatggaaggataacagtttccaaagaggcaaacaatctttggcttctctgaaatactgtgaagcctctgctaggtgagacttcctacagagagttctcaggaagaggaaggagtgaattgctaaggcttccttcagccacaggtcttatttctgcttcaggactacagtgaacctctctcttcttccttctctataccctgagggcctctgctccccaaagcacaaatgtcttctgattctttagtctccttaaccagggtgatgatttggggtgagtgaattccatcccaatgtcccagtgttttggggaagtaaatttcccaaagacaaagccactaattgggtcggcacgaaactccaaagtgttgcaggataggtcctttcacgggtcatgttgtgatctgcggggtaggcgttcagttccagcattgctactaactgcatgaccttgagaaagtcactttttctcagggaagtgatggcccaggtcctttccagttttgatactctatgtgatcttacaaaatgcaagaacaagctgggagaggtggctcatgcccgtaatcccaacactttgggaggccgaggtgggaggatcacttgagaccagaagttcgagatcagtctaggcaacatagtgaaatcctgtctcaacagaaaaagaaaaaaaaaaaaggcaagaatagtccctcaagtttcattttataaaacagatgcaaaataaagcagatatgaaaataccaaaacaagaaatctgccttaatttccccaggatcctccaagtcccaaaccttctattagtgttgctcagaaggcagcaatatgacttgatcagattatcccacatctcttccttccttggaaggtagacatagaaataaaaatgcatagaaaagcagatgaggcccagaaaaatttattatgcctacatgcccatgagatgtcccaggctggtgacgtctcatgggcattcaaggaatccattaagaatgaattctgaggctggacatggtgactcacacctgtaatcctggccctttgggaggctgaggcaggtggatcacctgaggtcaggagttcgagaccagcctggccaacatggtgaaaccctgtctctactaaaaatacaaaaaattagccaggcatggtggcacacgcctataatcccagctactcgggaggctgaagcacaagaatcccttgaacctgggagacggaggttgcagggagctgagatgacaccactgcactccagtctgggtgacagggtgagactctgtctcaaaaaaaaaaaatgaattctgaggctggacatagtggctcatgcctataatcctaaccctttgggaggccaaggcaggaggttcctttgaggccaggagtttgagaccagcctgggcaacatactgagaccccatctctacaaaaacttaaaaaattagccacatgtagtggtgcatgcctatagtccaagctactcagggtggggactgaggtcgaaggatcacttgagcccactgcactccagcctaggcaacagggagagaccctgtctcaagaacaaacaaaaagaatgaactccacaattttgctgtccctttctgttctcccaagacccaatatctctctgagtagcactgaggctatgaacacagggtaaggagtgagactgcttgcttcaaatcccacctctatcatttactagctggctgacatcagtgagtgttagtgattacattacttgccagctcagcattatcctctctataggcagtagccagcctttggaaggtgtttatccctcctcaattcctacaaatatcatgaggcatcctttccttctctcccagttcccatcctgccaacactatttaaagaaaaatacccaaggaatacagcagttaccttggtattgtcacactactctttccttagcaagaaagaaaaggtcccaaaacattccctactccatgtggccctcagatcccaccctatccccatccctcacagatctccctcccttatgtgggaggctaaacccagtaagaataatcatttgtaaagtactctgtagttttcagggtacttttgcacacatgattctgtttagttcttggtaagcagcatttcattattaatcctgtgagccatggctactcccccacctccattttacaaatatacaaactaaatcttaggtccacaaattgtctgtgctcacatagctaaaaagaaagtcaca

SEQ ID NO: 1614 - DNA, 4001 bp, Homo sapiens
tagagagagccaaagagaaagctctatttatatctccttgcgtttggtcgcagcctcatcaaccaaaagaaccttccgccccactcaacacatcaatcaaattggggagggggtgtgaacagcagcagcgggtgttacagaggagtctcaagggtatcttagagggtgcctctctgaacagtcgtcccctccaaatcccccccaagagaattactaggacattctccttcccccgcaagcaacggcacccccagatgattaaacgcgctggcgtcggaaagagctgggatcctggagaaactacttgtaaactgtgtgggttggtgagttatttaacttttctgagccttcgtttccttaactgtaaaatgaagacaacaccactcagctcctacagttgtccagctgaaatcacctaggtaagaacgaccagttctttggggagtaatgtcccgatggtaccattcaattgtcaagaacaccaaggcaccgtcaggcacccgggcggtatcccactctcctggaagagagcagggggttagcccttggtttcaaagtccctagggagcagtaaaccttcccctccgagagccctgagagaggaataattgccccttcccactccaacccacggcacacccgcccacatccacgtgcggctgtgcccagcatctcagaggtaggacttctcaggaatcggcgggaagaagcccccttgatggagtctggtggggttcaagatctgcaggtcccaccttccagggaacacctgcacaagtgagacctgcccgatcagccccgcgctccatccgcaaactgggcagatcccaagggtgccacgcgaggaccctgcaccttggccgctccagggcgccccccacccgcgaccccggaaatctcgcccctacctgcttcaccctcgccccacccacagcgcacttttcgggacctcccagcggcccttccccggttctctggacccccgtctccccgccctgcaacgcccccatcctggtgcccacgaaaggtcgtcccagttcccctcttctctacctcaaaggaggaggtgcaaatgaggaagcctaaataaaaacaggaaactcgatttttttaaaaagcctcattcaggctgaattacgggtaagagtatttttttaaaaagtccggaaatgcaaagctgggggcggttttgccggcgtaaccccggctcggccgcagatccggagctgatctcgcctgcgccgctgcagcaaacgcggcgagcaacgcgggaggcccgggactgggaggcggggcgcgggtccacgagccgggaggaagccccgaaaacttccaccccggcccctctgcagccccgctccccacttgcccaggctgggaagggcgcacaggacccgggcgccggcgaactgtgcgcagccctctctccgcgccagggcactcgggcgacatcaccagcgcgctctctgtggaccccgctgccgtacagaggaggcccctggtcctctagtcagcgctcggagcgggcgcacgcgctgagcgcttccagtatcctcgcgcctcagccggcgcaccggaggccgcaccgccgctgtgagcgcagctgaaaccccgctgccgggccaggcgggcaaggcgcgcagtgcaggcgccggggagctgcgcacgcccctctcggcgggcccacgggggacggccccgggcctctagggcagcccccgcccaggtcccagcagcccggcccccggggctcccaggacccggctcgctagactcggggaggcgcccagggccagggcgcacgggctgtgtgtgccggagagacgcccgccagccagccccgcgcccccgagcgcagccgcagctcccaaagcccctggccgcggtcctcttcccacctcccctgacgcagccagcggcgatcgcttaccgtcccggcgcagctggcagggctgggcggctctgctcgcggccgctcggagcgactgcgctgggcgcgagtgagcctcgagggagggaggcggggcgcgccggggcgccccgcctgccgccaacccgcacactccacttcccactttgtttccttttcacttgcaacaggaaaaacaacaggtcctccagggcctcgccttcccccgccgcccacactccccagttcgcctaccgctagaggggcatcatcccaggtgcctctggaagctgcaccttgcttgcccttctacaaaacaagttttctttttatgcaaaggaaaacaacgaaataaaggtcctaggcgcctttaagcgctccgccttcacgcaggaaagaatttcagcaggagcgggagaaaggctgagagcaggagaagaagagggggtaacctgcagctctaggcacccagggaccccaagcgccattgcgaggtgaccagtgttggggctcaggacacacacccaaaatgtgactatgggagaccagcgtgtgccaccccaaaatatacttcttcgccatattttgaagggattattcttagaaactgcaggcacaggagtagatctgaaaagctgtccttttgtaaaatgatttctatctataaagaaaatctccaggcctggcactgtggctcactcctgcaatcccagcaatttgggaggccgaggcgggaggatcacttgagcccaggaattcaagccagcctgggcaacatagggaaacccccgtctctacaaaaaaattaaaaattagccagtcgtggtggtgcacaccttgtagtcccagctactcgggaggctgaggtgggaggatggcttgagccagggaaatggaggctgcagtgatccatgatggcaccactgcactccagcctgggaaacaaagtgagaccctgtctcaaaaacagaaaagaaaaggaaaatctccattggtaaagtattagtatcaggcggagggctgctcagagctaacttttcttacctgagaaattttatccgcataagaagacaagcttcattcaccttaccctctctcccctcactctcccttaacttgtgtaccacctccccaggatcccaagcctctattcctttttttcttttcttttctttctttttcttttttcttttcttttttttgagacagtcttgctctgttgtccaggctggaatgcagtggtgccatctcggctcactgcaatctctgcatcctgggttcaagcaattctcctacctcagcctcccaagtagctgggattacaggcacacgccacgacacccagctgattttcatgtttttttgtttgttttttgttgttttgtttctttgttttgtttattttgaggaatcttgttctgttgcccaggctggagtgcagtggcgtgatcttggctcaccacagcctcagcctcctgggttcaagcaattctcctgcctcagcctcctgagtagctgggactataggtgcacaccaccgtgcctggctaatttttgtatttttagtagaggtggggtttcgccatgttcaccaggctggtcttgaactcctgacctcatgatccacccgcctcaggctcccaaagtgctgggattacaggcgtgaaccaccacacctgacccaagccctattcctttctgaaggaatgtttcctgtcccttgtaggatgttatatgagctttattcatctgagccttcatccagtcttgtattttgtgggattcccatgcataggtcttagttacacatggtttttctcttgttaatctgccttatgtaaatttaatgtggagcccagccaaggaatttagagggtagagggaggccactctctcctcccctacagcaggcatgactgagaggctcggggagacagcccagggcctaagtccctccttgctcagccctgggttgacagcagcgacctccaggctttggtggaccaagagtatgggggtggtgggtgagcccacccctgagattacaacagtggcttcatgccctcccaggatagggtgaagggtgagccag

SEQ ID NO: 1615 - DNA, 4001 bp, Homo sapiens
cattacgtgtataggaacacatatgtatatatcacacgttcacaggaaacagaaaggttccctcgtttttgtttttgctttttctttattctaggaattgaagttacattaaaccctatcccataaattaagttaaatcatcattaaattaaagagtaataaaatattgcacgtagatttctctgagcgactatcttctgagaaggaaaacctcagactaagaccatggctgaatacgaacgcccaatccctaaaaaaaatcactaaccggcatttgtttctgcaagagaaaaagggagtcttacaatgaataatcacataactcagtttcagaagttaaccggggtaaaacacaacgaaccaaattagacaaatgtatgaaaggacaagctttcaagaattcgcccaaagtgaaagactggttttaaccccgggatataaaacatcctttgcaggtagaagagtctttaattgaaaaagaaaaaaataaaataaagtggcgggcacaagaaaaacctgaacgacacgcaaaggcaaagtaaaaaataatgataattttaaaaaggggtctctcctcccacccccacttccagcccccacccccaccttcgcaggacaataggatcagggtcctaactgcaaactttaaacgtgtaaaccagaagcagttttaccgcagctgtaactgcaaatctcctcatcccgaacctagcgcacccaggaatacttctgccctgaaaacatcagcaagctcttggtaaatacaaatcagacccatcacgagattctttttttttttctcccaagtacctggaggatccatttcaatataaaatatcagttctgtcgaatagggcatcatcacctccctccagtctgcgtcatcgcggtccatactccacaccgtattgtacatcgcgctgtcaggggcaggtcgccaggagatatatagaaggcatatattttttatctggtatttaaaaatctaaaaatatatatctgcaaaagttccacacggaaatgtacttcgggttttccaacggccagtaccagtccggccaaactacccgaacagggtcctccccctctctcctacagaacacaacaaaatgcccccgaactttcaagctatgggcttttctcctcagaggattacacagaggcttgggggacggagagcagaggtgttaaaaagcggcttcccaaaaatcctttctacacagtcgctctccggggagaaaagctcccaccgcctccaaatctttccgcggaagccacttttgtgtccttcgaaggagggagaatgaagaggaaaaaaaagaacacgttgggagaaacccgggcaagtgacaaaggaaggcaaaaaagggggctggagattgcgttcaagtttcggggtcccactggtctgcagagagcgaatcccccagaggccgggactcgggctcctctccggtcggtctcggaaccgaagctgccgcagcctcgggaatggggccggccggagaagtccagtcagctcggcttgtctgggcgctcccgccggggtgtaagaaccaacccgaccgcaccaactgccctcaagctctgcccggactccagccactagagtttcattttaacggcgcggaggggacaccctccccgccccatgctgcccacccgctgaggcgccacccaaccgcgccgggaggggggacagcaggcatcaccaccgccccttccacgccgtcccgcctcgatgtaccgggattctgtcaagtgcctgagaacatgttcaaaaagctgctctccatctcgactttcacgtctccccaccgctctctaggcttcggctccccaatcagccatccgcgctctcccccagcctcaatcagaatggtacgatccgggcgctggccgcactccaggagtcagtgccgggagcacgcgagccaggcgaggagggagtggggcgagggaagagaggcaaggtgggtggtgattggctgaggccggttgccggagcctggagcctgcgtcttttgtctgccttgctcctgcgaaggagcgggagacggctgcgcgccccaagcgggccaatcaggagacagccggcgccggccggtaaggcggcgattggtcagagcccagttactaagcgggacaaaggcagaaggggaaaagaaaagaggaggaaaaaaaagaaagaaagaaaggaagaaaacgcaaacggcggttactgacaggctgggcgagcgctcgggggctcaaactgcctggagacaggcggggctcctgctgaggcttggtccgcccggacgagtaaggagaggagccagggaggacctgctggcgtgagacgcctctgcccggtgattggccgcgggggaagggagcggacacagagggggcacgttctgtcacttggcggggtgcgcgctcttctggtccttaggaggtctctggggagactcctttcctacagacctcttcaccttgctgggacagccctctccgcacccttgacaagttgtcaaagcaatggtccccaaacccacttgccaccttaccactcagggagaggatgtgcccgtggcccctgcaaccttcctggctgctacctgaccccactccctgcttctccccttgagcaattggacatttctgagggaggcatttcgcagttcctctgtgcttcccacccaaagacttttgaacccagaggtaactccccacgcctaaaatagtgagaggtctcagcaagccctcctgctcgagtgctcaaaccaattaaaaaaaaaaaaagtcttggaattacagtgcatgtgtaatttctaagataagtcacaggtgttggaatctctcaccaaaagggctctattctgtttccctgacagaccctcttcctcacatactcattcccacccccaaagcttaaatctgggagattggcttcactatgaaaatgctgaatatttccatgcatttcagaaacagctaattaacttgctggggaacactgaatagctaaaagcagatttgtgtctcctgaagattgtgcctggaattgccatcctgtataccctacaatacagtctgaggaggccaaaaactgctccatttcctctttacacaggagtaacaaagcccattgtgtttgagttgacagcctgatttaagccctagcaaaacctcctaccttgagcatgtctgctatattgattcgcctatggaagagttgccacgtttcaccctctacctcctaaggtggttctgccttccttaaagatgccctgagttgagacagttcctgagggcagacagtcaaaatgtatatggactgggtatagagtaactggtttaaaagggccagaaagtatggatggacatggttgagctaagaaaagacaccaggattcttatatgctttcttattatttctgaaatccaaatatgatttcaactttggggcaggactcattaattataatttcctgaaccattccttacaggtagaagatactggaagatcaactctaatttgtggctgccttcccagcagtctctacttcagcatatctgggagccagaagcactcaagtttgataactcaaaagacagaacaatcagtcaagggtgggttggtttatttttgttcacgggtgttcatgtgcattcccaaacaaaatgagggtgaagagagaggaagtgtggaaaagataatggctttcagatttccacagcaccttttgcctggaccacttttcagcatttagtggtggggtttcagtttctaatacacagagcaatcacccaggcttttcccacagctaaggctttgagagatgaagtgacgtccaagcacagtatataatcaagtggtcaaggctgacacatggagtaaagctgtgattcagtctttccacctaaaattgtatgacccaactctccaacttaaatagacctttgaatatatctccagagaataagtgatgcaagaggcaatgatgaatcaaggg

SEQ ID NO: 1616 - DNA, 4001 bp, Homo sapiens
ggttccccaatgacacacattttattctgtagacttagccataacacgttttaaaatacataaagaattcatcctcgacagaaacaaggagtcacaaaggctctctacttattcagaatcattacataaaacaccatctgtaactgcaaacagggtttgagaaaatctgacagctaataatcataaaatggggtagactttaaaggaaaaaaaagccaacttttccattttgctttccttttcctttcctaccagatacacaaaatgtctgtaatagcgtcagacagagctttaaaataaaaatatagtgctatatatgtatactttacattacgtgtataggaacacatatgtatatatcacacgttcacaggaaacagaaaggttccctcgtttttgtttttgctttttctttattctaggaattgaagttacattaaaccctatcccataaattaagttaaatcatcattaaattaaagagtaataaaatattgcacgtagatttctctgagcgactatcttctgagaaggaaaacctcagactaagaccatggctgaatacgaacgcccaatccctaaaaaaaatcactaaccggcatttgtttctgcaagagaaaaagggagtcttacaatgaataatcacataactcagtttcagaagttaaccggggtaaaacacaacgaaccaaattagacaaatgtatgaaaggacaagctttcaagaattcgcccaaagtgaaagactggttttaaccccgggatataaaacatcctttgcaggtagaagagtctttaattgaaaaagaaaaaaataaaataaagtggcgggcacaagaaaaacctgaacgacacgcaaaggcaaagtaaaaaataatgataattttaaaaaggggtctctcctcccacccccacttccagcccccacccccaccttcgcaggacaataggatcagggtcctaactgcaaactttaaacgtgtaaaccagaagcagttttaccgcagctgtaactgcaaatctcctcatcccgaacctagcgcacccaggaatacttctgccctgaaaacatcagcaagctcttggtaaatacaaatcagacccatcacgagattctttttttttttctcccaagtacctggaggatccatttcaatataaaatatcagttctgtcgaatagggcatcatcacctccctccagtctgcgtcatcgcggtccatactccacaccgtattgtacatcgcgctgtcaggggcaggtcgccaggagatatatagaaggcatatattttttatctggtatttaaaaatctaaaaatatatatctgcaaaagttccacacggaaatgtacttcgggttttccaacggccagtaccagtccggccaaactacccgaacagggtcctccccctctctcctacagaacacaacaaaatgcccccgaactttcaagctatgggcttttctcctcagaggattacacagaggcttgggggacggagagcagaggtgttaaaaagcggcttcccaaaaatcctttctacacagtcgctctccggggagaaaagctcccaccgcctccaaatctttccgcggaagccacttttgtgtccttcgaaggagggagaatgaagaggaaaaaaaagaacacgttgggagaaacccgggcaagtgacaaaggaaggcaaaaaagggggctggagattgcgttcaagtttcggggtcccactggtctgcagagagcgaatcccccagaggccgggactcgggctcctctccggtcggtctcggaaccgaagctgccgcagcctcgggaatggggccggccggagaagtccagtcagctcggcttgtctgggcgctcccgccggggtgtaagaaccaacccgaccgcaccaactgccctcaagctctgcccggactccagccactagagtttcattttaacggcgcggaggggacaccctccccgccccatgctgcccacccgctgaggcgccacccaaccgcgccgggaggggggacagcaggcatcaccaccgccccttccacgccgtcccgcctcgatgtaccgggattctgtcaagtgcctgagaacatgttcaaaaagctgctctccatctcgactttcacgtctccccaccgctctctaggcttcggctccccaatcagccatccgcgctctcccccagcctcaatcagaatggtacgatccgggcgctggccgcactccaggagtcagtgccgggagcacgcgagccaggcgaggagggagtggggcgagggaagagaggcaaggtgggtggtgattggctgaggccggttgccggagcctggagcctgcgtcttttgtctgccttgctcctgcgaaggagcgggagacggctgcgcgccccaagcgggccaatcaggagacagccggcgccggccggtaaggcggcgattggtcagagcccagttactaagcgggacaaaggcagaaggggaaaagaaaagaggaggaaaaaaaagaaagaaagaaaggaagaaaacgcaaacggcggttactgacaggctgggcgagcgctcgggggctcaaactgcctggagacaggcggggctcctgctgaggcttggtccgcccggacgagtaaggagaggagccagggaggacctgctggcgtgagacgcctctgcccggtgattggccgcgggggaagggagcggacacagagggggcacgttctgtcacttggcggggtgcgcgctcttctggtccttaggaggtctctggggagactcctttcctacagacctcttcaccttgctgggacagccctctccgcacccttgacaagttgtcaaagcaatggtccccaaacccacttgccaccttaccactcagggagaggatgtgcccgtggcccctgcaaccttcctggctgctacctgaccccactccctgcttctccccttgagcaattggacatttctgagggaggcatttcgcagttcctctgtgcttcccacccaaagacttttgaacccagaggtaactccccacgcctaaaatagtgagaggtctcagcaagccctcctgctcgagtgctcaaaccaattaaaaaaaaaaaaagtcttggaattacagtgcatgtgtaatttctaagataagtcacaggtgttggaatctctcaccaaaagggctctattctgtttccctgacagaccctcttcctcacatactcattcccacccccaaagcttaaatctgggagattggcttcactatgaaaatgctgaatatttccatgcatttcagaaacagctaattaacttgctggggaacactgaatagctaaaagcagatttgtgtctcctgaagattgtgcctggaattgccatcctgtataccctacaatacagtctgaggaggccaaaaactgctccatttcctctttacacaggagtaacaaagcccattgtgtttgagttgacagcctgatttaagccctagcaaaacctcctaccttgagcatgtctgctatattgattcgcctatggaagagttgccacgtttcaccctctacctcctaaggtggttctgccttccttaaagatgccctgagttgagacagttcctgagggcagacagtcaaaatgtatatggactgggtatagagtaactggtttaaaagggccagaaagtatggatggacatggttgagctaagaaaagacaccaggattcttatatgctttcttattatttctgaaatccaaatatgatttcaactttggggcaggactcattaattataatttcctgaaccattccttacaggtagaagatactggaagatcaactctaatttgtggctgccttcccagcagtctctacttcagcatatctgggagccagaagcactcaagtttgataactcaaaagacagaacaatcagtcaagggtgggttggtttatttttgttcacgggtgttcatgtgcattcccaaacaaaatga

SEQ ID NO: 1617 - DNA, 4001 bp, Homo sapiens
gatctcagctcactgcaacctccgcctcccgggttcaaggaattctcctgcctcagtctcccaagtagctgggattacaggcgcccaccactgcgcccgggtaatttttgtatttttagtagagacagggttccaccatgttggccaggctggtctcaaactcctgacctcgtgatccgcccgcctcagcctcccaaagtgctgggattacaggcatgagccacagtgcctgaccaaaaaaaatttttttaatgtgaaattaattgataactaataacattttcaggcataggagggtgaagtgtgcgaagaaggtgtgtgtgaatggtaagtttaggaggatcaatctcctcagttaaaaaagcctctttagttttaagcaggattagtcaaatttcccatccttagcttctgccagttaagctgtggcaaaagacaaggtcaggggctggggactaggccagatgtcacctgtcaccccaaactggccagagctcaaacatgagacagtggtgatgagcaataagaactgggatggaaaccaggaaacccaggagccactgcttggccctaacagctgtgtccttgggcaagtcactccctcttccaccacctcagccctaacctgtaaaatgcaggggctatgctaatttagtgagtggttctacacccccaggaagaagagtgacctccctggaagaagatggaattctgccagcggccaggcttcaaacctgaactgcaccgctggctcctccctggctctccagcctgcccgcctactctgcggcttttaagactttgccaatccccatagggagccaggtcctcaaaataaacctgcctctatatagacacatcctattgattccatttggagaaccctaatacagactttggttgggcaaaaagagaagtcttgtgctattttaagcattaaaaaaccctaagaacccttgtgtatccagtcagcagggataactctacacaggtaactaaaatgttaggactgtttttctcgccgttcatagtttttactgcggtttcagctctgtcactactaatcctttggttaaacggcggaggcagcctggctcagtggttaagggcactgcattttattagctgtgtgacttcgagcaagtcccttcacctgaggactttccttctccataaattagggacggcaactacctcaaagggataggaatgttatgatttagttgtccgtacattttagaaaatttacacaaagccttttgctgtgctgcgacaggagctgtaatcggcaacatgtcttcatttgaggaagggaaacattaaaacaaatgggaggtgctggctttatttatagcagccgatcagtaatggtgaaatagatgagctttaaggaccctcgcctcggccctcgatctgctcagagccccgcctccacacctagccccgcccccacccagctgaggacccgcccccgcgcttagctccgtcctccgctcggcttaggacccggccccgctcacctggatctcctgacaggccgagaccgcccgccggctctccgcctgtttttcctcgatgaggcccagccctagcccgaaggccagaaagactgcccggccgcaagggcccgcgcagccccaggcccgcaccacgaactgccgctgcaaccgcgccgccagcccggccaccgactggcggaagaagcggagacggttagggagcccgagcccgaccctgcgaggctccgcgcccggtcctgcggcccagcctggacgctccccgcggacacagcccgccgccgggcccggccgccccaagccgtaggcccggccgggcttgcccgtgaagcgcagcagcagcgctcgacccagctgcaggccgcggcccagcgcctgtcgcaccgccatggtggcgccgcggcccggtgcccccgcagccgccgctgccgccaccaccggcgtcccccgccggtcacaacaaacttggggcggtgcctctgcgcaggcgcaggcgctggtgggcggggccggcccccgcggcagttccccgactcggcgcgtgggggcgctatgctggtactggcgcctctagcagtgactttccctttgcactttggacccacgtggagggcttgccggttcaggcaggtcctgaatgtgaacatcactggtcctgggcaaaatcgagaagtcgagaagggaaactgatattttttgccaaccatggtgccagaccctttacgtcttttaatttatttaacagctccaccaacaagataaaaatgccgtttttatagataagaaaaccgaggcatagtaaggggcagcattcgaggtcttgtgaaggtacctagcagagctgagctacagttcacattgtcctaactgttgaatgcttgccctcctcaatgccgttaggctgctgtatgtgtccacagtctcaggggttttgaagaccccaagacaaatctcacccaaaagacacaatttatgaatgagtgtgctgaggtcccaagatagcagcttgcccaaagccacaccgtttgtttaatggcataggcctgctcaccacagaacacacacacgcacgacacgcacattactgaaacagtttgctgtctcctggccaggggtccaccccatagccaagtaagcccaggggacagaactcttcagacaaaaaatcccttcttcagcagcagctcctatctacatgacctttgacttcatatttaaggagaaagggatttatgaacagaagccatagtctctggcttcagcggcagggagacaagatggtggatccccatgccattacccccaagacccagggcctatatgctataggaaaggaatgtgacggacatttgaagtcagtcccccagggaaaggcaagaatgctgtgtgaatctgcctaagggcaggatttatggtaagtacatacttttacacaaggaacaatagataaactggaaatcttagaggccttccctaaaagctggttaatcagaagtcaacttggttggccgggtgtggtagctcacagcctgtaatcccagcattttgggagactgaggcaggtggatcacttgagtccggaagttcatgaccagcctggccaacaaaacaccatctctactaaaaatacaaaaactagctgggcgtggtggcacacgcctgtaatcccagctactcaggtggctaaggcaggagaatcgcttgaacccaggaggtggaagttgtagtgagcaaagatcacaccactgcactctatcctgggcgacagagtgagactctgtctcaaaacaaaaccaaaaaaccaacaaaacacatcaacttggtggattagcatccaagacggggttgctttagcttgcactgtgtgtgtgtgtgctggtctctctcataatcttccttaagggaggaattttatggttcttgtgatatccaatcatatttatttgggagaggcatagatgaatttcccatttgtatagaggcacatgaatatcagatatttaattttttggatcaacctcagggaatttttaattataattttaaatgctccactgaagttgtaatttgaagaatgataagggaaagaaagttggagaaatctcacattccagtaaccacaggctcactcatggaaacttagttggggcacagatgagtggatttaaagtttaaatccactcgtctgaagccaggtttgcagtggttcactccagcacgtggggaggctgaggtgggaggatcgcttgaggccaggagttcaagaccagcctgggcaacatagggagaccctgtcactacagataataataatttaaaagaccccagcgaggcatggtggcaagtgcctgaggtcccagctacttgggagtctgaggcaggaggattgcttgagtccagggggttggggctgcagtgggctgtgattgtgccactccactctccactccagcctgggtgacagagtgagactctgtcttaaaa

SEQ ID NO: 1618 - DNA, 4001 bp, Homo sapiens
aaaatctcaagcaaagcatccaacatctggcagcgtctattccagtgtagaagcagcagttactgtgaaacaccagacacttctgatggaagcgctcagtttctgactcacctcccgcccccccacccgacacacatacacacactttctcccctacacacaatctactgcttttcttgtgagcctcctcagccctccctcaatcttcattcgtttttaactattaatacgctgagctctctacattaacctggctccattctccaaattccaatctcctgatacagcgtaagcattcttccagtccatttttctattatgcaatactcccccacaacacttacagtcacccccccacccatctttcttcttctcaggcctaatttccaaaacatcacttctcgcagtctctactgcaattcaagactccattccatctttcccatctgtttttaaggtctttgaccttaatttcctacattccttagactctcttcaaaatttccattccttcccaaagttgggcagtttagagttgggaatcaccaaaggaattagtctgagaaagtatgtatgtgtgtctgtgtgcctgtgcggccctaagggtgggggtgcgaagtgagaaggggtgacacattaggggggagtatctgagggaaaagatggcttcaacaactcccgcccacccaacaaaattcacgattccctacctctccagaaatcgaaagcgtccaataacttttcgatatcttttaagtcccatggcttctcttcaacattttcatccaattagcccacaatcaacttagattccacctgcctctcacactaagtagttctctctacttcttaggcctccatttactttcttagtttctctactcccttccgtttctcttgtttcctaccgcaacttctttttttttttttttgagacagggtctcactctctcgcccagactggagagcagtggcccaatctcggctcaccgcaagctctgcctcccaggctcaagggattatcctgcctcagcctcccaagtagctgggattacagatgcacgccactactgtccggataatttttgtatttttagtagggacgagatttctctatgttggccaggctcgtctcgaacttctgacctcaaatgatccgcccgccaaggcctcccaaagtgctgagattacaggcgtgagccaccgcgccgggccaccctacccccaccttcaatctccatccgtcctcctcaaagacaaccaaagttttcgacaacttcttaatcaaacttatcctttcctcaaactcctgcccgctcataaatccctatttgaaagcccagctcgcgcccacttaccggtaacacgtaggacattcccagctacaggtaccctcttaggtctcgctcttcctcccatcgcatattcctcaccagctccctacccacgccctgccgggcttacctgaggacaaggtacaggaagggaccgcgggatcaaaggatgaaaaaccgaccgaagacgacggcccggaggaggccgacgccatcttagcagccccctccccctcagcggcctggctctctttcaatccggttcttcctcttctcggaatcgaatcttcccaacgtctctttacagaacccgcgttctgtgggccacctccccgccccctccggggcctccctcagacacgtcgagccggctcctggaccagctcaaggccacaccattcgcctggcatggggaagaactcacgtcccgcaccccctccacaagtttaaccgctttccacaggggatactttcccctttcacagaagagtaagcttaagctggctgctgggaccttgcgcccagaccaagccacatctgaaaaaaaaacgaggcatgaaaagtcccaaaggagcgaacgccccttctccgtccttcctaaccacggcctgttaatcgcccaacccggccgcttcactccgggtagccaagcaaaaaatccgagcactgcgcatgcgcccgaccttctcggggcatcagcccactcattggggagaaaaaaggagcaaaaccaatcgggaggctgctaatggtcacgtgaggtgggtcctcacgccctgacgagtccacgggtggaagatgtgcgcgcgcgggttggccgacagtccctacggtggctcggcaggtcctcttaggttcagttctttgctaggactgggtcgagtgatctgaactcgggacaagagtcggtccgccaagtcctctgaaattcctaacccaggaaagaactctctgcgggagtactggtgtcaagtcagagacgttaaggtgtcgaatatcacaaaacatttaataccaccaagaactcttcttagtctttttcctgttttactactcttgtttactatttgattaaacgtgcgtgcatgtcttaccttcctcggaatggcattcgaaatagatctgtgttttgtttgcctcaagcacaaagttaggcactgcacagtgacggagttcagtaaatatttgatgcatgaatcagtgaagacctgtcaaaaaagggcacgggaggctatcagggacttatcacaaccttcccgcgacccaacccctttagcctccaactgtcaattatctgtgctccaaagggcatggagatacacagaaaaatttctcccattgtagtcttcgtagtaactgctcgtttttaacaaagtaccccgtaggctatgaaccctggtgggaagaccagtctctctgagcagactgtaaaacttctggggagcaaggactgtgtttggttcactcttgtatctccagctcctccagtgacttcgtacatagtaggggctccataattatctgtggaatgaataaataaagaggaatggtaaaacattcggggtaagagtcggtcagatagatcctctcaaactcatggcccatgaaataactccattaaaacaggttttgtggccgggcgcggtggctcacgcctgtaatcccagcactctgggaggccgaggcgggtggatcacgaggccaggagatcgagaccatcctggctaacacggtgaaaccccgtctctactaaaaatacaaaaaattagccgggcgtggtggcgggcgcctgtagtcccaggctactcgggagcctggggcaggagaatggcatgaacctgggaggcggagcttgcagtgagcggagatcgcgccactgcactctagcctggacgacagagcgaaactgtctcaaaacaaaacaaaacaaacaaacaaaaaaaacaggttttgtaacccccagaatgacctggttatcctctttccagatgtcttgtgggtcctcataaagtaacctaggacccgaacatccatagaatatccccatgcaggccgggcgccgtggctcacgcctgaaattccagcactttgggaggccgaggtaggtggatcatctgagctcaggagtacgagacaagcctggccaacatagtgaaaccgcgtctctactaaaaatacaaaaaattagctgggcgtggtggcgggtgcctgtaatccctgctactcgggaggctgaggcaggagaatcgcttgaacccaggaggcagaggttgcagtgagccaagatcgcgccattgcactccagcctgggcaacgagagcgaaactcagtctcaaaaaaaaaaaaaaaaaggccgggcgcagtggctcacgcctgtaagcccagcactttgggaggccgaggcgggcggatcacctgaggtcgggagttcaagaccagcctgaccaacatggagaaacgccgtctctactaaaaatacaaaattacccaggcgtagtggagcattcctgtaatcccagctactcgctacgccggaggctgaggcaggagaattgattgaacctgggaggcagacgtttcggtgagccgagatggcgcctttgcactccagcctgggcaacaagagcgaaactccaactcaaaaaaaaaaaaaaaaaaaaatcccca

SEQ ID NO: 1619 - DNA, 4001 bp, Homo sapiens
ctaactaaatgccacgcaaagtcaggtggagcaattccatgtcaacaaaacacataagatcattactgtatgaaatagcaaggaaaaatgttgaagctaacccctagaatccataaagatcatatgagatctgcagctagttattaagaaaactgcagagtcatcaacaagtgacatttacacaatgctctctgaatgaatcatgtcatagtaagcactttgaaatatgagacacgctgttgggcctaaagatgcttaatctaaaaaagtcattaattcaggaagaaatatatgtattccaatgcagaatgagaacaggaccaagatattttaaaaggggaaatattaaacccggtaagaagaaaatgatactattctggaataaaatgttaccagaaaaagagaattaggagctcctttgagggcctaagcctttgccacttacagtctcatctcagaggggtgtgagtcatcatcctctcccattataatgatgcctttgagcttgacattgcccgtaaatctgccagaatgcaaaagagaaggttgtcaaacctgagtttgaatacctgtttagttgtgtgaccctgggcaagacccttcccctgtatgggcttcagtttactcatctgtcaacttgtactagataatttctaagatcctgtctacctctagcattctacaattctaagaaatctacctcaatttctcagttattgttctacaaatacatctgtttccagtctgcaccaagaaagctatgatgctttcctcctcaaacccaccaaagtaatttatcccatttctagaagcaaatgtgtgctcttgacaccagtgaatgaatccatctgaggcaactgggtacagcctatttagcctgaggtaggcaccaaggagatacttacggaatattaaacagaagctcttcatctgcatcactttcaacaaactggaggggatggggaggggggaggagaaagcaacaaatatttgctgagagcctacaatttcaggcatctcccaccctgctctacaactggggtgcaatgggaagagtcactctcccttggttttccaagacttattaacttgaagctaaccagtcttatccagtgtcataacagccacaggccacccaactggaaggttcttaacaaaaagcccatgaatgaatttccagggtcgaagagccttctgaagtgtgaactgaaaggcaggtgtttatgtgcatttttctgagaagaaggtccactgctttcaaacagatagcaaaggggcctgcgaccccacaatgtaaagaacatttgctctatatgggaaccacctttcatctccctaggctcatcttcaccaggtaatatgatgaggcagccattagcaccaatggtccaacggccctcacgaccatcctctctagcccacacagccctggaatagagcgttaggctgtgtagcttgacaaaactgtccccgttccctctaggcctcagtttccctatatgcaaaatggggagacaacgctgctcgcctcccaaagagctggcaggagacaggcacggaaaagcgcttggcaaccaggctgtcgttattcttaacatcagaaatgagtagaccgacggcccgaggccccacacgcaccctgccccgcccgccccaagccccaggcggcccaccttggagcggtcggtccgctcctcccacggcttgaagacgccgcggccgctgccctcgcggctctcgttaaggcattgcagccgctccaggtcgatgcgcaggtacaggccgtaggccaggccgcgctgctcgggcggctcctcccgttcggcggcgcagcggcagccacccccgccgtggctgtgaccgtgcgacatggcaacgccgccacctgcgcgtcctctcggccccaccgccgcgctcgctcggctcggctcgcctcagaccagctccgcgccgttcagctccggcaactaagcgcgccgcgcctgccgcgtcgtaaaaagcgccgctgcgcggcgcatgcgcgtggggagaaggcgggggggcggggggggtggggtcgagcggaactgacgtaggacgcgcgcctcccaggtgccagagttcgtatatgactccagtcctggcgctggatgctgctgctgttccagcttcctaggtgtggaaactgaaggaccaagagattaaacaggtgtgctgagtaaactcacaggctgagattcgaattatcctcccccgacgaggatggagccttcgctgtcttccttgatcgccacgtttctttgcgagccgatgaaggaaagcgtgaggaatgataaggccctggagactggagaacgcgagcttatcgctgtctcacatgcgcacggcttagacgttgagagctcacaggcccacttgcataaccactttcttgatagcggggttacagcttgagagcatggggctttgtgcacggccagacctaaagactactcctgggtctgctactggccattgtgacaccttaagtcatttcccctattctgagactccgtttccccgtctgtaaggtggaaagaatagtatctgtttcataggatcacagtgagtattaaatgaaataatgcaattaaagaactcagcaggccgggcgcggtggctcacgcctgtaatcccagcactttgggaggccgaggcgggcggatcacgaggtcaaaagatcgagaccatcctagccaacatgatgaaaccccgtctctactaaaaatacaaaaattagctaggcgtggtggcgcgagcctgtagtcccagctactcgggaggctgaagcaggagaatcgcttgaacccgggaggcagaggttgcagtgagccgacatcgcgccactgcactccagcctggcgacagagcaagactctgtctcaaaaagaaaaaaaaagaaaaaactcagcaaatggctgacacatgatgggcattcagtagccgatggttattacggtcaaatccaaccacagcaacttactagctgcgtggccttgggcaagtgacttgatcttctgagactcagtttaccccctgtgaagtgaagggattggactagatgatctctgcgtttcctcccccatgtgatatttcaaagtactttttttcgaacagctggttgtggcctgtcaataggttttaaaatccgtttatagagaattgtgatcaacatttaaaaaaaaaatagaatacaaaaaaaaaaaaacccagaatgtatcacacatttcaagtctcaattgatgaaacttttgtttcagttttgagtttgtattcagacacaatatgatgtgtttttcatattgtgggttgagatcaaaataattaaaagtcactgtttagaggtgaaataatcttgttttcaggatagaatgttttcctactccctggtggggaaaagacaggatacagaaagagagttatgggataccctggctaccctcttcccttcacatctggctctggagtgctcagtggggctggtgaagtatagaccaaaatatccattttttcaagttccattcagaaatattttctgggccacatgcagtgcctcatgcctgtaatctcagcacttttgggaggccaaggtgggaggatcacttgagcccaggagtttgagactagcctgggcaacatagggagaccccatctttacaaaaataattaaaaatattagcccagcatggtggctcatgcctgtggtcccagctatttgggaggctgaagtggaaggatctcctgagcctgggagggtgaggctgtagtgagctgtaatcataccactgcactccaacctgggtgtcagagcaagactgtctcaaaaaaataaaaacaagaaaaatattttgatgtcctattttagttacttgtgcaataagcaagcttggttctgtttcaaaatagctcagtgccgtgaattattcctgcttttaggtcacagtttcaggtaagggacctggaatgtggcaaacagtaaatgt

SEQ ID NO: 1620 - DNA, 4001 bp, Homo sapiens
aaccttggcctcctaaagtgctgggattacaggcatgagccactgagcccagcccacttttttttttttttttttttttttttttttgtgagatggagtttttctcctgttgcccaggctggaatgcaatggtgtgatctcggctcaccacagtctccgcctcctgggttcaagcgattctcctgcctcagcctcctgagtagctgggattgcaggcacgcaccaccatgcccggctaattttgtatttttagtagagacggggtttctccatgttggtcaggctagtctcgaactcctgacctcaagtgatctgcccacctgggcctcccaacatgctgcgattacaggcatgagccaccatgcccggcctcactttctaacggaataaataatttacttattttaaataatttattgtgcttactatttattgtcatactcagctagactgtcagctccccaagggtagggatttttgtctgtttttttcactgatctactcccagggcccaaaatcttgtctactatatgctcaacaaatttttgttaaatgaatgactgtgtcaaacatggagaagtctcaaaggagacaaaagatgaagaagcacctcaagaaataccaataggccctgtgtggctgcagggggatgggagtgcttaccgatggtggcaatgatgctggtactgcgagcagccacgggctcggagtcaatgtccagtaggcagaggtgttccaggaaggtgtctgccatagcagctggcagctgctgctgctggaagaaggcagtgcccagctcctgggtcagttgggccacactggcccgccgcagataccccgctggccctgtggtagaagggggctcagggactgcatgtcacctgcccttcctccccatgccttcgtctctcagcataccctctgttccttcccttcttatgagctgggcatcatgcatatattattttattatgtcacaaggatcctataaagcaggtactgttaaatgttctataattatccaattttatggataaagaaacagaggctgagaaacaggaaataaatggtccaatattatacagcttctaagtatggatcagctaggattcaaatctaggtctgactaactctagcccaagttcttgaccactcagttatactgaccccgcacaacccaggaccccccgacctgcagctactgatgaccctcaaccccaccaccccttgatgtctagtccccagcagcctcaccctatgcagacccagaatcacccagttcctgctccaaaggtctctgttttctcccttccaacccctggctactggctggcttccccaccccatcctctgagtctccccaggcttctcaaagctgctacagacacagaggtccctgtagcttgacccatcccagttcagaggagcccccgattccagccgcaccttccatgccactgcacacctctctgggtctccctctctgtgggtctgctccacactgttgggttgtcagaggcatgaggcccagctgggctggggatcagttctgcagactggttaaagtgtcaccactgtctcctgttccattggaagccctgtatgccaggggccagagtccaggaaccacgggagtgccccgtggcttacatgctgtggctctggcctgcctatagggcctggaaaagacccaggccagggtccataatttaacacacgggaggctctgaagaacgtacgttcctctccaaaacccacctagccagtggctgatgtggatcatttatgccctccaccctggctcctagttttcaccctcattttcctcctatgttccatggcttctgtctccccttcttacctcctggagccccaatcaggatggactttgctaagtctctttgggacttagagacccatgaccgaagctgcagggatgatatgttctcctggatcgacatgctttcagtgtgggcctggggctgcgggaccatggaatgagagggagaggatgacaaaactgctggtcttatctaagggagacagagaagagaaaaggggcacacccagtaggccaccctgtccccacagaatccctcccccagaacggcctgctctctgccctcatctcctggcatttcctctcatccttttttcctgataaattttcaatccattcatactatctggtcatccacgtgaatagatattttttttttggccagtcatatggccccattttctttgtactttactgaagttagctctagtgaatccagggagcaggggctgtagggtggggctggagcctgaagaaagacaaaagggatcactgtgataatatggtggggggagggttacccagttctgaccactttttttctctgtctcaaccaagaaatgcagagtgccttcaccactctgtaacctggccagctgcatgttttcgcctacatgtttgaacccaagatggtaccttgaacattctcagacactgataaacttgattaggttgttgctggaaacactgaaagatcgactattttgctaaacttatagactcctacccccagggaaattttctttcctccctcccttccttccttttttctttttcttttttcttttttttcttttttttttcacagagtctcactctgtcgcccaggctggagtgcagtggcgcaatctcagttcattgcaacctctgcgatcctcctgcctcagcctaccgagtagctgggattacagacgtgcaccaccacacccagctaattttgtttttcttttttcttttcttttctttttttttttttttttgagactgagtctgactctgttgcccaggttggagtgcagtggcgtgatcttggctcactgcaacttctgcctcctgggttcaagcgattatcctgtctcagcctcctgagtagctgggattacaggcatgcaccaccacgcctggctaatttttgtatttttagtagagacggggtttcaccatgttggtcaggctggtctcgaactcctgacctcaggtgatctgcccgccacagcttcccaaagtgctgggattacaggtgtgagccactgtgcctggcctaatttttgtatttttagtaaagatggggtttcaccatgttgtccaggctggtctccaactcctggcctcaagtatccaccagcctcggcctctcaaactggtgggattacaggtgtgagccatcatgcccagccttgttttctttcttttttttttaaagggtctcactctgtcaccctggctggagtgcactcgtgtgatcatggctcactgtagccttgacttcctgggctccaacgatcctcccacctcagcctcccaagtagccagtactacaggtgtgcaccaccatgcctggctactttttaaatttttatttattaaaaatatttttttcctttctttccacaggtgctgactttttatttttgtagagactggtgtcactctgttgcccaggttggtcttgaacacctatgctcaagtggtcctcctgccttggtctcccaaaatgccaggattacaagtgtgagccatagtactggcttcaaatttcttaaacactcctataaacaccataccccgaacccctccttgagaacatacctgggtagaacaccctttgtcccattgtccacagcaaggatgtgcagtagctgttctgtaggtaagttcccctaatgtatgctttggcctgattgccctggcatttagtgcttcattcactggaatcccaaccagccccatcttgggatggtttggggcatcctttgtgagtgctgccctgatgccacttttggtgtgacactagctgtgggttcagctgatactaactggtgggattctctggaagggctttgatagcatcatcatcatcatagcattcattagttaccatttgcccattccccactgtccaatctttatcgagcacctacgctgtatcaggccctaagga

SEQ ID NO: 1621 - DNA, 4001 bp, Homo sapiens
ctttctttctttctttctttctttctttctttctctttctttctttctttccttccttccttccttccttctttcttttctttctttctttcttgcctgcttgctttctttccttccttccttccctccctccctccctccttccttccttccttctttctctctctctttctttctttctttccttctttctttctttctctctttctctctagggtctcgtctgtcacctaggctggagtacagtggctcgatcatgactcactgcagccgtgacctcctgggcttaagtgatcctcccacctcagcctcctgagtagctgggactacaggcatgcaccaccacactcaactaagttttgtattttttgtagagatgggttttgccatttacccagactggtctcaaactcctgggctcaagcgatctgccaaccttggcctcctaaagtgctgggattacaggcatgagccactgagcccagcccacttttttttttttttttttttttttttttttgtgagatggagtttttctcctgttgcccaggctggaatgcaatggtgtgatctcggctcaccacagtctccgcctcctgggttcaagcgattctcctgcctcagcctcctgagtagctgggattgcaggcacgcaccaccatgcccggctaattttgtatttttagtagagacggggtttctccatgttggtcaggctagtctcgaactcctgacctcaagtgatctgcccacctgggcctcccaacatgctgcgattacaggcatgagccaccatgcccggcctcactttctaacggaataaataatttacttattttaaataatttattgtgcttactatttattgtcatactcagctagactgtcagctccccaagggtagggatttttgtctgtttttttcactgatctactcccagggcccaaaatcttgtctactatatgctcaacaaatttttgttaaatgaatgactgtgtcaaacatggagaagtctcaaaggagacaaaagatgaagaagcacctcaagaaataccaataggccctgtgtggctgcagggggatgggagtgcttaccgatggtggcaatgatgctggtactgcgagcagccacgggctcggagtcaatgtccagtaggcagaggtgttccaggaaggtgtctgccatagcagctggcagctgctgctgctggaagaaggcagtgcccagctcctgggtcagttgggccacactggcccgccgcagataccccgctggccctgtggtagaagggggctcagggactgcatgtcacctgcccttcctccccatgccttcgtctctcagcataccctctgttccttcccttcttatgagctgggcatcatgcatatattattttattatgtcacaaggatcctataaagcaggtactgttaaatgttctataattatccaattttatggataaagaaacagaggctgagaaacaggaaataaatggtccaatattatacagcttctaagtatggatcagctaggattcaaatctaggtctgactaactctagcccaagttcttgaccactcagttatactgaccccgcacaacccaggaccccccgacctgcagctactgatgaccctcaaccccaccaccccttgatgtctagtccccagcagcctcaccctatgcagacccagaatcacccagttcctgctccaaaggtctctgttttctcccttccaacccctggctactggctggcttccccaccccatcctctgagtctccccaggcttctcaaagctgctacagacacagaggtccctgtagcttgacccatcccagttcagaggagcccccgattccagccgcaccttccatgccactgcacacctctctgggtctccctctctgtgggtctgctccacactgttgggttgtcagaggcatgaggcccagctgggctggggatcagttctgcagactggttaaagtgtcaccactgtctcctgttccattggaagccctgtatgccaggggccagagtccaggaaccacgggagtgccccgtggcttacatgctgtggctctggcctgcctatagggcctggaaaagacccaggccagggtccataatttaacacacgggaggctctgaagaacgtacgttcctctccaaaacccacctagccagtggctgatgtggatcatttatgccctccaccctggctcctagttttcaccctcattttcctcctatgttccatggcttctgtctccccttcttacctcctggagccccaatcaggatggactttgctaagtctctttgggacttagagacccatgaccgaagctgcagggatgatatgttctcctggatcgacatgctttcagtgtgggcctggggctgcgggaccatggaatgagagggagaggatgacaaaactgctggtcttatctaagggagacagagaagagaaaaggggcacacccagtaggccaccctgtccccacagaatccctcccccagaacggcctgctctctgccctcatctcctggcatttcctctcatccttttttcctgataaattttcaatccattcatactatctggtcatccacgtgaatagatattttttttttggccagtcatatggccccattttctttgtactttactgaagttagctctagtgaatccagggagcaggggctgtagggtggggctggagcctgaagaaagacaaaagggatcactgtgataatatggtggggggagggttacccagttctgaccactttttttctctgtctcaaccaagaaatgcagagtgccttcaccactctgtaacctggccagctgcatgttttcgcctacatgtttgaacccaagatggtaccttgaacattctcagacactgataaacttgattaggttgttgctggaaacactgaaagatcgactattttgctaaacttatagactcctacccccagggaaattttctttcctccctcccttccttccttttttctttttcttttttcttttttttcttttttttttcacagagtctcactctgtcgcccaggctggagtgcagtggcgcaatctcagttcattgcaacctctgcgatcctcctgcctcagcctaccgagtagctgggattacagacgtgcaccaccacacccagctaattttgtttttcttttttcttttcttttctttttttttttttttttgagactgagtctgactctgttgcccaggttggagtgcagtggcgtgatcttggctcactgcaacttctgcctcctgggttcaagcgattatcctgtctcagcctcctgagtagctgggattacaggcatgcaccaccacgcctggctaatttttgtatttttagtagagacggggtttcaccatgttggtcaggctggtctcgaactcctgacctcaggtgatctgcccgccacagcttcccaaagtgctgggattacaggtgtgagccactgtgcctggcctaatttttgtatttttagtaaagatggggtttcaccatgttgtccaggctggtctccaactcctggcctcaagtatccaccagcctcggcctctcaaactggtgggattacaggtgtgagccatcatgcccagccttgttttctttcttttttttttaaagggtctcactctgtcaccctggctggagtgcactcgtgtgatcatggctcactgtagccttgacttcctgggctccaacgatcctcccacctcagcctcccaagtagccagtactacaggtgtgcaccaccatgcctggctactttttaaatttttatttattaaaaatatttttttcctttctttccacaggtgctgactttttatttttgtagagactggtgtcactctgttgcccaggttggtcttgaacacctatgctcaagtggtcctcctgccttggtctcccaaaatgccaggattaca

SEQ ID NO: 1622 - DNA, 4001 bp, Homo sapiens
aatcaaaaccaaagtatgtttttcatggttcaagaccaggcaatgtaaagtatttctgacttgcctcacatcatcttcattttaaaagctcatgtaaattatttactattaataaaatagtaaattccattcatttagcaaatgtggtatgctgtaagatctgcttataaaaggctaactgtaattaaaatactacatagcaacattttcaattatatgaaattcagctttgcattaccaaaggattctaaatgtgcaacactgcattgatatacattgttaaagtctctatttttgtggaggaaatatcaaccattataccaaagttttcaagcttacgtctgactgcacaagaaaccaaacttataaagagatttcttaaaaagtatatttaaacaagaaatttagatgcagttgcaatacttaattttgacatcaactcttcagaatttcttgatttagtcttttttttaaaaaaaattaactgtccaacacacaaaaagaaatgcaggcatgctatttttttctcctaattcccatctacaatctttgagtagctaaaagataactatattaaaataaagcaaaataacttttaagtcaaaaaacaaacatctctggaacactcccaagtaatgaaaaacccgacagggtagcttaagtccccatgtacaccatagagatctaaagaaaatcgtgcctacattatcaaatatttatctggaaatgggaaataacattgctactcgacatgacttaactaagcgatctactttgctctcatcttttgcagacatgtggtgcccaatgttttcccttagtcgactgctttctcattagtaaacaacttattagctctttctctggtgctcaaatgagagggaaaatgaaagtctgaaaagcatcagcatctgagctcccggatctgggcaggggtagcagagaaaggcaccctgtatttatcactcggttaaaaaaaaaaaaagaaaggaaaagaaaagaaaaagataaccctcaaaatagaggaaagaaactctgtcacctgaagagggctgctgaagtgaagcaaacatttggtgagactcgttttttaaaaaaacttgtctaggggctggaagttatgggggcgctctttgtgcggagtctgaggggagggggagggacaagaaaacagcttgggagtcattcaaaggagtttaaggagcggtgtacggaggaaaggcggggcggggcccggccgcgcgaagggagggggcaacaggggcgttcgcgggtagctctgacaccgagggagggggcgacgggccggcctctccggggaccaggcgagagcaggctcccgctgcagcagggctgcagagatggggtcccctctggtaggcagaatcaaaccaaagcggtggcaggccagggctttggcgggggagagggtccggctccccagggaagcggttccccgagggaagcatttcccgagtgacatcccggagtttccgcacttagcgggctaggggcgcggcggccgcagggctttcctcggtccccgacgccgcgcggggctctctccctgtctcctccgccagcgcctctcaccagggccgcggcccttacctgcagttccgtgagcagaatctccccccgttcggggttggacgccattgcgctccggtatggactccgcacctggacgcggccgcctctggcgaagggagaaggcgggacggggctcggggtgggggtgaggagaggggagagaaagaaaaaaaaaaaaacaactagggattcatggaggcgcagcccctgctggaggcgcggcttattccgtccggttcatcgagagcggcggggagctagggcactcgtagcgggcttcctctcgccgccctcaccggactgttcgtctagtcgctccctctgggcgacgccaggagccgcctcaagcctctccgtgcgggcgctgcggccgcggctgcagctcctcctgtcgcaccatttggctgtcaccgcgtcgcaaaagcggcctcacttggcggctgccagcacacgtgacggcggcagccactgcccctcatcgggcagggaaggtggggcggaggggttccctagggcgaacgcggcgagggggcggggcgtcttccgacccgactccgcggcgagggcagccattggactcggctggggtgaaaatgaggggaaaggactgggctcgagtctctggggaggcgggaagaggaagaaaacacacgcctactttcctgctgcgtttaacggcttcactgtgaacgctagaactcgggagcctgctcgctgttgttttttcgggtttcgttttttttttctttcttttttttttttcccagttccaccttgccgaaacttgggcctaactttaacaggcccttttctaacctccataacccaaagagcttcgggactcagatcttacagattattcctctgctctccccttgacccccacgtcaacccaaactaataatcttgccttttgctcaccctcaaacccagcccccagcgcgccttctcgaccagttaaggtgcacagctagctaaacgggtatggtctgtacttttcatgaaatgtaagcggctggatccctggcaacttttaatgtacggcctttaagatgtctttttcttgaggttgaactactgttgcttgtactggagaactgtacagagctgagaattagctgggtttttttgggttgttttaactttatttaagggagggggaggtgggacgggattaccctcgggaaaggaaaaaagccacctttccttggcgtggtaagcattaaagctaacctgactacttagtaaaatatagctaagtaaagtaaatctaggtgtttgtttttaatgacactatggtattaaggaatttcgaagtctcctacaggtagcttttgtttttgttttgtctgagcagtgaatggataggtaaacgcgtaacttttgattttttgaagctgcggtacaatacctttgttaaaactacctggagagagtggtaagggttatttaggtacgttgctacttagaaagggcattcgttgacatatttcttaggaagtgtaacattatgtacttctcacacgctccatgtaactctgttggcctgatgccaggacttaacgtctatccttttgccttctcaagtctcatacatcaattcagcaaacatgtattgaagatctggagttctgtggccacagtttctgaactctaacttatcatatgtgtgataaagaatttttctggtgtgtacttcacaagtcttacaactatttatgtgtctagtatattgccttggttgaagatgataattaaatacatgaaagaacacttggaaaggccgggatatgattacctttactggtaactaaaagccagatggtttcctaggctttggagttacagaaaggattaggagttcttatccggccaggcgcagtggttcacgcctttaatcccagcactttggaaggccaaggctggccgatcatctgaggtcgggagttcgagaccagcctggccaacttggtgaaactgtctctactaagaatacaaaaactagctgggcgtggtggtgtgcgcctgtaatcccagctactcgggaggctgaggcaggggaattgcttgaacccaggaggtagaggttgcagtaagagtgagacactgcctcaaaaaaaaaaaaaaaaaggtacttatccttggggtgactggagaattctttggggaagccaacttatgtccgaacaacaataatgccattttaagtaatagatacagtgttaggggagcactgcatgcatttgtgtgtgtgtgtgtataatgttttattatggtaaaatgcataatcaaatttattataaccataagtgtacaattcaggggcattgaatgcacacagatttatttatttatttatttttgagacagagtctcgctgtgtcaccaggctggagtgcagtggtgcc

SEQ ID NO: 1623 - DNA, 4001 bp, Homo sapiens
tgacgagaggagcctggagcccacacaaaggcaaagagcacacagagaagcaaaggcctttaggtctggggcccaggaagtcctctgccggccattttccttccctcggctctacaaggggccactcaggaatgggggctagggagtaggtggggggacagaagccacaggtagaaggaagtgtgaggtgtgtgtgtgtgtgtgtgtgtgtgtgtgtgtgtgtgtgtgtgtggtggaagggccagggtcggtttcttttgtctccttccaccttattaccccctgcccctcactctctcctaaggcctgtcttaatacataagtcttggttgacctgtactgtttggtaatgggtaaagtcttattagcattttactaaacttagctaaataaaataagtaaataaataaacaagtggaatctttgctcacttgtgtgtaattcttaccaggcatcctttgtatcaaagtgtttacttggtctataagctctcccctgtcaggtactgccccttcctccttgagtttcctgggtgctgcccctttctcccaggttcccccagtcatgggatctggcctctcagaggctggaggagggggtgccaggcccgggatccagcttggaaaagtgcccgtgagggttcagctggaggtctccctggggcccggggggatttccaacctgccattccgtactctccccatgagacacttgtttctacctaagctgggtggggtaagaagaatccagtgggaaagaggatttctgcattggctattcgggaaagaaagcatccctgacccccttccctgtcgtcaagggacccactggccctggggcggccttccaactaggctagcctctttcaggaggctctcgataaagtgccctggagttccaggccctcgtccctgctccctgtgccactttcccgtcccgcagcgcctctcctgagctgcactcctgtctcagcgactccctcaccccgctcgcggatactcatgcgcggccccacagggactggggttccccttggcctggacgctgggcatcggcctccagctgaaggccaggagatcaagcccaggaagggtgaagggtggcccacaaccgtttgcgagcgcggggaccatgggccccaggacagccggggccagacaggatgcagggcagatccctagagcagcatccgaaagagaaagccgtccagacccagggctcagggacaggagaaccgctcgcgggggatcctcaacctcctggcacgctgggacatgctcctggctgtgtcccggtgaatcacccatccttgcccactagcgcgccatcgagctcgcggggccgtcgagccagcctcgggtcgcgtttacaccagctcagaaccggctgggagctcggctgctcgcactaggtgcgtagaccctgcctggggccggcagcccctcgcctcccctcatccccggggatgcgtgcgtctcttggtccccgccactgggccagggtgctctggaaaggggcgcacggaccacgcgggggccgagcctttacctcgattggagtggctcagggtggacgactgggaagacttggacttctgccgcttgacggtcatcatcacctgctcctgcacgcgctgcctgccagacgtgcctgttttcatcttttggtccgacggcaaagccaacgtggagttgtcctggtcctggaagcattcgtacgccaaggcggtcttgagcggcgagtggttcatggtggcgggaggcgggtggcgcgcggccggggcctaggagagcagagaggcgaggcgaggtgcggtgcagcgggcgggcaggagcgtgctcttctcgctctcagcggctccctacggccatagagtgcgtggtccgcgtgagggctccctgcagctgctcctggcgcttccaccctggttcgtccctctctggcactggcgaggcccgccctccgtcagacaggatataccacccctgccctgcaccacccactccaccgggccgcgcgctgctgctgctcagacgcggagctgcagggcactgctgctgcggagccagcgctcttgggggcagggctgcgagtcccctgtgtgggacgctgggcgccttcctgctcgctcttttttttctctcccttccctctccccatgagcaagaaacgtcgcaagccttgaggccccagggagacgcccctctgtcctgttctgccggctcactgagaaagcatgtgctcagctcaggaaccgagggagacctctctctaggaaagaaaggagtctttcttgaccaggctgcccaggagagccaggcgtccatctccctctgtactgaggtcatagcagagaccaaccccggcggtggaggctcccgggctgatggcagaaccatagctcttgctccaaaggagtgctccatcttatgggggtaacccagtctactctaaaggagcttcctctgaagaaagtggggtaggggcagtaaggccacatcaaggagcagacttgggatatcagaccacacagtgggtatgccttggtaaaaccggtggttatttgttgttcatgagtataccccggtaaaacaccacgtgaacagcggatcctctctgaaactccactataacctctaaaacaatgcctggcacacataatattaggcgcttaataaaaaatattttaaataggtgaatacgtgaatgctagttaatttaaggtaaattaaatctaactcggatcctaaccagatcctcactgaaaaattgaaaagctgctttaccctgaaatttcactctggacttattattctgggaccactgtgtgcattcccctatatacactcacccctggggacacatgtgcagtgaagctttattcatgtagcatcctctccaggcgtggagggagcccacatcagtgaatttggtgtgtaacaggagctgagtgtttttttttttttttaagtatttactttgatggaaatctttctaaaaggtatcgcattctgtttgcctcctaaagcaaacaacactgaacatatttgctgtacttcttgatgccctgggtttctcattctggacatccattactgaactgtgtagtcgtgctgtccggtcagtttcttagttttggggcctccaccagtgtgtgacactatcacagccgtcactcttgctgtcatttgaggctgccgctcacagctcacatattttacttttagtttgctcttctaatctacagaggaaaggacaatcagaaatctattctttttgggaattttatgtcgaggaaggatcaagaagactgaatgactgtctcagggaccatgtacatgaaggtcactcacgcaactcctgagatgtgggtgttacatgcggggagccccagctttcccaaggaaggtattcctagtagcaatttgcagagcagattattgtaaagcagattatagtttccaatagaaacagttttattattgagggcgctgttcctaagaacttaacctcaagtaaaccagagatgtgataaaaaatatgtcatagatgtgtacaaaatacctgtaaacctctattatcacttcatattgtaagattctgcctctagccatagaccgccaggactggacagagccttggacttcatccagccaagcactgcatttcactgattaggagaggaggtagcttgcttgcaatgccccagttaatatgtggcaaagcctgcatcctaaccaggccttgtgactcctggcacagtgctcattccaccacatcatccagcttcccttataaaagtcctataaaatggacattaaagtacagtgcacaccgattatataagggccccaatgtactgtaaagtatacacagcagcatataaaaatacaattctattgtatcacacatttggcctatctaaaacctaatatgctagccataataaatgttaattacatctttaaataacgataattttcctattctaggatatagaa

SEQ ID NO: 1624 - DNA, 4001 bp, Homo sapiens
ccataactgagtgcggcttcctttcctgtcgtcaacttgatcattctgtggaaattcaccaaattcccatgggcctgcagtaggcctggaaggaaatttgggagttgtctggtgatggggcatggggttctgcgccctccctctctgcccctctctgctactctccttcctcccaaatggcttcttttttccccctgagagaggatcactgcaatgggagagaaaactaagggacaagagtgcttcccttctggggctgtccccccatgctcagaggtcagggtcagctcttaccaaagatcatgatcactgccaacagtaggagggtcttcatggtaagagttcttgggtgacaaatgcagatggactggcctagctcctctgctgggtggtctcaacttctgccccggccgtcgctcccctgctcctccttggtggctctgagacacacagacatgctctcccatccaacctaagtccagggtgacttcctctgtcacactcagagcacacaaggagtgccctccagcaatgcacacacacacacacacacacacacacaaccacctcctgacccgttcccagctctgcagaatggtttcacacacatcaggccctcagacctgtggagaaccccatgatacactaatgagacctcccctgtacctcatcagactgagagttcttgggaggttggaaccaggttcctcccaactacctgggaggttcctgaggtcagaggatgtgtccctcgctagacatagcttgcatatccccacactggattcaaggcttggagtctccaaggcacccatggaggctcggcctcagtattttcctccagaatgaaagcatcaacctctctcttctaggccttctaaccccttccacatacacaagttcccaaacacatacatgttaacacacctatgcccacatacacacactctcgtacttacctgatagtgccaacatcctctcttacactacactcacatactcactcaacacactcatgcacacacaccctctcatacatatcaaatcatgcacatgcatgcacaacacagccactctcaaaggcagcgaatgagcaggaattctgctcttgacaggacatcagcttcgctggctctttacctctcagaggactccagagttgtatccccaggccgtcttgtttgttctgcactcctgctccccttaaatagctgctccctctgggaggttgggggtaggtgaggcacaaggctggggatgggcgtggtcagttggtggactcaggattggtcgcccatacccctaggtaatccctttccttcccctcatcagctggcaggacagagttgaggattgggaaaccttacgtgtcagtagctgatgccaaaacacatttcaggcagttttgcagtctttccatggagtaaattcccataaccagctctgggtgtgatcaacggtcagccacctccctgcaatcgcctctaaggggggcagagactgtctgctgttgcaggctgtggactcatttgcacacccaaagggactaccaattgctgagcaaggattgctcccttctgctcaatgtggcatttgggaatagaaaagagggcttttagtggtactcattcattcagccgctcaatcattcattcacaggaagtatgtcctgggcctctaccatgttccagcacctgtgcaggcctcacgtgtgcaccccacagtccaccagggagagagtttaatgggggtggatttcccttcccactaacttgggccagggcctcaactttctcttcttattcttctttcttcttttcctccacccctgtctcatatgagcttctaaacctggaaaaagccagaggctatccttgaagttcccaccaaagcactgccttcactttattccccatcctcacctgtttggagacagggcaggtgaatgctccctggatctgttgctctttttccttcagccttcgggctgacactgactccagctttaattcataaagtaaatatctttttcattgctctccagcacatgctaagaatttagcttccaccgccttaagtaaacactctgcgataccagtcctaaaaaagtcactgtggcaggggctgtggtgcttgtgaacattccatctgttccctacactctagagccccttgcagggatggagacctagggccctgctgctgactggtaaaacatgagcactggtatgaagggtcacttccaggtttctccagcaaggggactatgagatgcaactccccagcccttccctgccccactggtagaaccagaagatgaaagcaatctggggtgtaagaatcatggcacggaagacagttgtcctagaaagtcctgcagctcacaggggtcttagtgtgagtgagaaatagacttttgttgtattaagctgatgataattgagatgggcagttgctggagcataacctaatctatcccaagagccatcaaacagctttcctctcgagaataccatttacctccagtgctcgactgtgtaaggggttggactgtggtcctccttcctgctctcagttcctgtgttggagtcccggtaccttagaatgtgatcttatttaaaaatagggtcattgcagatataattagttaagaggagatcactagggcagctaggatgggccctaatccaagatgacagatgtcattacaaaaatgggaaatttggagacaggcaggcacactgggagaaggccatacaaagatgaaggcagagatcagggtgaagcttctacaagccaaggaatggcaaagattaccagaaaacactggaagctaggagagagggatggagcagattctccctcacagccctcagaaggaatcaaccctgttgggccctttgatttctgccactggaactgttagacaataaaatgtctgttgtgtaagccacaaagtacctaatacaaagccgaagcaaactaacacaacctccagggatctctgttggcttccttcactcttcttattctgggttgccagtcctatagcagttggctttatggccacgtcagggttcagaggtctcaaccccccggggtagaccactgcctttgttaaacattgcactttcggaaacagtagttcctccaataggcagaaccgcctccctctctgtatatctggatagccctggtccaggcttcagttgaaagaaatactccaacgctcaaggactctggtgacgtcggatagagcctctccttttcccatcatttcaggctgttttacaggaattcaaagtccatgaattggcctcttgttcatcttccatcccagacctaatccaagcccttggactcagtaagccaaacagaaacctctactttcacagggcttccgcttaagcagaaagagacagacaatcagcaaaagacatactagtaaatgacatcatgtgataggtggtgacactgcaatggggagagaggcagtaggtgacagggcaggagcaccgtcatctcggacaaacaccaccactttaagttccagctccctttctagcctcatgcatttcaaggaaatcatttctcttctcactacaaacagccagaaagagtagacagtaaaacacagataaaacacagataaaacacagataagacagctcgggcagagagggaggtgttcggaaagtttctctggcaactgccaaacttcaccctcataaaatgggccccagtaaaacagtgagccttaataagcacattcttttcccttcaggtgcactaagataggaaagctaaaagcagacttggggagtatgcctgaggctgcagaaagatgtatgggaacagacacagaaactctcccttccagataggcacaacaaaaagacacagaagcagtccaagcctctgttaaactctcccaccctgaatccttaaaaactcttagtctgtaagtgtgtgcctctgacctaactcagacagctgcccct

SEQ ID NO: 1625 - DNA, 4001 bp, Homo sapiens
gggcagtacagaatggcttacagtgccctttagtgcctttgaccatgctgtgtcctcttctgggaatgctccctcctcttccctgactctctgcacagcctttcagactcagcttaggggtcaccccttccaggagccttcctcaagcctcaggctgtgttaatgccttatctgtttgtttacttcccactggagtctttactacattggattttcactttcctggcttcccactcaaccgtgagcttcctgaagcaggaactgtgtccctctgtgtctatctttggtgcccagcacagtccccagcactgtctaaacaaatgagggccactcgatggtgaggtaggactcttaccacaggtgattctgctccccgagttgctaaacttgtagctcagaaatttggtgccacatccacgtttctccagacgtttgtagcaacagtcatgagtgacacagcagctgtgaggagacaccctgttggggctcttgtcccacagctccaggaggcctggtgcctgtggtctcacccccttggaccctgggcagagacccagtgactttgcaacagtctagagcagaagttccaacatgccggctgcttttccagccaggccatcctgagacctctgcgcccatcaggaaccggcactgtctttgcagctcccagccctgcctgggccagagtctaggagggtagggagggataggtggcctcaccgatccgttgcatccttgggggatcctctgccacccacgccacagtggcagccgtagaagccataactgagtgcggcttcctttcctgtcgtcaacttgatcattctgtggaaattcaccaaattcccatgggcctgcagtaggcctggaaggaaatttgggagttgtctggtgatggggcatggggttctgcgccctccctctctgcccctctctgctactctccttcctcccaaatggcttcttttttccccctgagagaggatcactgcaatgggagagaaaactaagggacaagagtgcttcccttctggggctgtccccccatgctcagaggtcagggtcagctcttaccaaagatcatgatcactgccaacagtaggagggtcttcatggtaagagttcttgggtgacaaatgcagatggactggcctagctcctctgctgggtggtctcaacttctgccccggccgtcgctcccctgctcctccttggtggctctgagacacacagacatgctctcccatccaacctaagtccagggtgacttcctctgtcacactcagagcacacaaggagtgccctccagcaatgcacacacacacacacacacacacacacaaccacctcctgacccgttcccagctctgcagaatggtttcacacacatcaggccctcagacctgtggagaaccccatgatacactaatgagacctcccctgtacctcatcagactgagagttcttgggaggttggaaccaggttcctcccaactacctgggaggttcctgaggtcagaggatgtgtccctcgctagacatagcttgcatatccccacactggattcaaggcttggagtctccaaggcacccatggaggctcggcctcagtattttcctccagaatgaaagcatcaacctctctcttctaggccttctaaccccttccacatacacaagttcccaaacacatacatgttaacacacctatgcccacatacacacactctcgtacttacctgatagtgccaacatcctctcttacactacactcacatactcactcaacacactcatgcacacacaccctctcatacatatcaaatcatgcacatgcatgcacaacacagccactctcaaaggcagcgaatgagcaggaattctgctcttgacaggacatcagcttcgctggctctttacctctcagaggactccagagttgtatccccaggccgtcttgtttgttctgcactcctgctccccttaaatagctgctccctctgggaggttgggggtaggtgaggcacaaggctggggatgggcgtggtcagttggtggactcaggattggtcgcccatacccctaggtaatccctttccttcccctcatcagctggcaggacagagttgaggattgggaaaccttacgtgtcagtagctgatgccaaaacacatttcaggcagttttgcagtctttccatggagtaaattcccataaccagctctgggtgtgatcaacggtcagccacctccctgcaatcgcctctaaggggggcagagactgtctgctgttgcaggctgtggactcatttgcacacccaaagggactaccaattgctgagcaaggattgctcccttctgctcaatgtggcatttgggaatagaaaagagggcttttagtggtactcattcattcagccgctcaatcattcattcacaggaagtatgtcctgggcctctaccatgttccagcacctgtgcaggcctcacgtgtgcaccccacagtccaccagggagagagtttaatgggggtggatttcccttcccactaacttgggccagggcctcaactttctcttcttattcttctttcttcttttcctccacccctgtctcatatgagcttctaaacctggaaaaagccagaggctatccttgaagttcccaccaaagcactgccttcactttattccccatcctcacctgtttggagacagggcaggtgaatgctccctggatctgttgctctttttccttcagccttcgggctgacactgactccagctttaattcataaagtaaatatctttttcattgctctccagcacatgctaagaatttagcttccaccgccttaagtaaacactctgcgataccagtcctaaaaaagtcactgtggcaggggctgtggtgcttgtgaacattccatctgttccctacactctagagccccttgcagggatggagacctagggccctgctgctgactggtaaaacatgagcactggtatgaagggtcacttccaggtttctccagcaaggggactatgagatgcaactccccagcccttccctgccccactggtagaaccagaagatgaaagcaatctggggtgtaagaatcatggcacggaagacagttgtcctagaaagtcctgcagctcacaggggtcttagtgtgagtgagaaatagacttttgttgtattaagctgatgataattgagatgggcagttgctggagcataacctaatctatcccaagagccatcaaacagctttcctctcgagaataccatttacctccagtgctcgactgtgtaaggggttggactgtggtcctccttcctgctctcagttcctgtgttggagtcccggtaccttagaatgtgatcttatttaaaaatagggtcattgcagatataattagttaagaggagatcactagggcagctaggatgggccctaatccaagatgacagatgtcattacaaaaatgggaaatttggagacaggcaggcacactgggagaaggccatacaaagatgaaggcagagatcagggtgaagcttctacaagccaaggaatggcaaagattaccagaaaacactggaagctaggagagagggatggagcagattctccctcacagccctcagaaggaatcaaccctgttgggccctttgatttctgccactggaactgttagacaataaaatgtctgttgtgtaagccacaaagtacctaatacaaagccgaagcaaactaacacaacctccagggatctctgttggcttccttcactcttcttattctgggttgccagtcctatagcagttggctttatggccacgtcagggttcagaggtctcaaccccccggggtagaccactgcctttgttaaacattgcactttcggaaacagtagttcctccaataggcagaaccgcctccctctctgtatatctggatagccctggtccaggcttcagttgaaagaaata

SEQ ID NO: 1626 - DNA, 4001 bp, Homo sapiens
ggtcccagctactcaggaggctgaagtgggtggattgcttgagctcaggtgacggaggctgcagtgagctctgattgagcctctccaccccagcctggataatagagcaagaccccgtctcccaaaaaataaataaaataaaaaataataataataaccagtagcatttcctgagccctctctagtatctgttgctatctcattagctactcatagaaacctataaagtacaatcattgctgcccttttgtaggggagggactgagattccaagaggccaatttcccaaacttaggcagctggagaatgatagacccaggacacaaacctaggcccattcattcatttaacactttttactgagcacctactgtgagtcaggcactgtaacggtctctgaggagacaactgtctgtaaaagccgacgtagtcccattcatggcacccagagttggctgggggctggatgggagagcactggaggagaaataccatctggagcatgggctcagtccatgtcctcaaccactacacaagggacaggaaggcagaaacttaagcttggattctaaggcctgaaaggccaagaaaaatgtttcagtctccctctctcaccattcccatctgcaagtgggggctctgctgttgatcagctttggctaatgatgttcaatttctaatcagcctttggactttgacaggggaggcacagaccatcaaggagaggggacaaactttgaaataggcaaattctcgttcaatcctaactctgccacttagaagctgcattgcctttaggaggtggtttagcaactcactgtcctcacctgtcaaatgggctggtatcactgtctcgtgcattccctgcgagaattaaattaggtttgtatgccaatcgccagtcccagtgcttggcacataagggcatttcataagcgtcagttgcccttccaaggctctgaggtcctcccatggttccatgagccccacccacaagactcgagctccaggagtgatatttaaggccccactgtggggacatgtttctccatactaggttaaatgtggcaaggaacattttgctttcttatgtcttcaaatgaattgacacgcaaactgtcccgtttcttacctccccacacgtacattcaccagatgacacccacctctactttttctaggaactcacactcccccacccccatcctttggagtaggcctgaagccaggtttgtgccatgcaacctcacccagatggacaacttctccaaactgggccacttggattccctctcctagaatatggaattaggactagtgagtcagttgtgctgtgcctatagtcctaaaagctggagagctgaaagcacagcacttttactatgaggatgaaacagcttctagagctctgggcaggaccaacggcataattgcagagactaaagcaaaatgaaaacatgaggccctttattaagaatttcaagatggtggcagcagagcagtaaaccatgtttaggcccttatgagtgccaggccctgtgaaactttacagatcacacgctcaagaagctggccctgacccttatgagtgttgggccctgtgaaacttcacaggtcacacactcaagaagctggccccgaccctgggtttctcaagacccatcctccaaatcccgttcagttcttccttccattagcctgagttgttttctgttatttgccaggcaagaatcctaacaccctctctctggctttgagcatgaactttaatgcaaaacaaatgataagtggccttagagcctctgcacccacctgtcagtgtcatccacggggatccctttatccccaagcccacagtagcagccatatccgtaatatgagaagaaggcacttcgccccgtgatgtgtttgaccctcctctgaaactgccagaaactgctgtgggtgggggctgccaccaccgatgagaaaaaaaggaagaaggaagttgcaatgagcatgatgctgccttgatgtcccctccccttactagagtgctgagcattcgaaatatcaccagatccccaaagcgaagtgcaaggggcatggctggaatcaccagcctctttcctggggaataaaataggttcagatttgcccctgtaacacagctagttttttgctaacccagatgaatacccagtttccatgaggttcagaacaaggctttcccatcaaccatagtcttccccctcaaagcaagaaaccacagttctaggcagaacaccctcgggtctgatgcaacatgaatggcaaaagttcaaagccagaaacgccagtccctccagatgtcatcaggcctttactatctcacaggagaaacaaaatacttaagaggcaggaaaggtatcctcaattattatttttttaaatgacaagtacacatgaactcagctgtttttgcttctacaagatgcttatgagagtgggcacaaatgcatacacaaaatggtttcctgaagcattatctgtgatatcaaaaaattggaaaccacccacatgtccaccgacagggggataataacaaaattatgtgtctcaaaaataaactacatttgatagcactatctctaggcaattgggattgaagagagagaaagaaacaggcaacattcattttatacacgtctccgctgtctcatgtcttttcataataagcgtgtgttccctttccttcttttttttttttttttgagacggagtttcgctgttgttacccaggctggagtgcaatggtgtgatctcggctcactgcaacctccgcctcccgggttcaggcaattctcctgcctcagcctcctgagtagctgggattacaggtgcccactgccatgcttgactaattttttgtatttttaatagagacggggtttcaccatcttggccagctggccaggctggtctcgaactcctgacctcaggtgatccgcccgcctcggcctcccaaagtgctgggattatagtcatgaacaaccgcgcccggcccagcatgtgttcccttcctattatggtgttttgaatgtgtgtgggtaaacgctgtatagaggatgtatatcaaactcttaagagtggtcacatctggatgtagggaaaaaactggggtctggggaggatgaggaggagctttaccttgttgctatatactcatttattttactttttaactataagcatgtagtaaatttgcaataaaaatacaacaaagacatgaacttgaagaagagaaacagaaatagagtttgggggagttttctcaggtgccttcgatctcactatcgtgttcagtctaaacgggggtgtggcggaagaaacccatgggcggtcactgctgcccaagcagtccctggagccgcactgaggggctgcagaggcggtcatccctgcgtacaggtatcctcctgcactatcaccttgcaaagtgtaaattccaccactcactgtggggaaaggaagtctgtttttgacatctttgacttagggactcaaaagttattgtgactcaattgaaagagacaggaaaatggatctggacaaacctccactcaacgaatccagcaaaagagtctatcagtctccagtagaccccaaactgtttcccagtaggtctttcttcactttgcagaggtaagcaatcggatctcccggcagcaatgacttataactaccaattatcccataagtcaccataaaaatgtctttctgataagcattaatcattcttaaattagctggatatatgtctgcatttttgttctgaatccaaatggccttaaataaaggctactagcatccaaaggaaaaaagactcttgagggtgaggggggtaaaatagtagtcaaactccctttctagcaaatggttggcaacctctgatttcctagacactttataagatcccaacactgggatcagcccattttatagcagaaacagaagcaagaggacgttggtgggagcccgtt

SEQ ID NO: 1627 - DNA, 4001 bp, Homo sapiens
agttaggagaaataaaatatattaagtccatgaattcaagtgggaggttgggagaaacagatggcagaagggaatggagctgtgcctgtgtgcaactcctagagatgattagagaatgcagggagcacacgtcccgatggagcccagagtctcagggagactgggctgggcagcccctcttcgagtgagtttacttatggaacccgcacccaacctcaggcaaatgaagtcaatagtacacagtgggtgagccacacattggggaccgttgggctgggaagggtggttgggagaaactcatgcagtggacaaagagtgagaccacacacaggtggccttgggttgcaactcaaagtgactgggccatcatgtccccagtacgtcccctcaatgtgtgggagtccatgttgccacgcctgtttgacatggtgcctctagctgttaagacatgtacaagagaagacttgctaagctttggctgcactggtgaaggatcccgggccctctggaatcatacacaatccatcagagattcctagattccatgataaggaacccaactgcaaacggagagtccaccttgcagatcaaccagagccccgcgttcagaatcttgcctttcttagggtaccccggtcctcttttttttgccctaaatatagccctttcaatctgggctcagaaatacataaactgaactcacacctgaatgatgcagctctttcttgccatgtgaaaaatacattcagctttgattcagaatgctttcgggtggtcttacttgccataattttaaggtgaggaggacccagcctgagaaacggagctggagctgtggctggggaggtgttgatgaactggcttagcttgtcagccgttcttgcctgggtaacttttcctacccttggctgccactgacaggggtgaagctccttctcccaagggatggacacagtgggtgggaggaggtgccactgccatctttcatgcatgtgccatgtgtgaagctattatttaagtttactcaacacttagtgtctgttttcccattagagtccctctaacagccctgtgaagggggttgtacccattttacagatgaggatattgaaaggtttggtgatttggctaaagtcatactgctaagagatggcggggcctgcatttgactgcaggttcatctgtgtatttgatctctacagtgtcttccctctttacatctgagagatgaatttttgcagctcaattgcaaatttcctaatggtttttgctgtaatcctggagacatgttcctctagagaatttcagagtcccaagataacataaaactacattttaaaatgcaagtcttttccaaaatcacaattttgagatggattgaggacaaaaaggccaatttgctagcaactgcactttatatttggtctgcttaagatcaaatggaaattgccccctcttcaccgaaagtcaagggaaccctcttcccaggttcaaggcagatcatgaacatgaaacggctctaaaaatatggagtgctatgcattcgtacgggttgctcctattcagtgggagaggtaggggtgaagtgacctgtgtccaaagcgtcatcatcatgggcccagcagaccctggtgctggacttctagtttgaactttcacagcagtccagagatgtgcagcacagcttggccagccagagctctctggctgaagctaccatgctaggagactgacggccactgaaggctctttgcagaggggcagaaggattggggagtgggggccaggctcctggggatcagagcagcagccccctaatctgggaaagagagcacaggggtacactggcctccctccttcccttcccagcctgggtcccgtccccgactcaccagccatcaccaccagcccacacagcagtgcaagttccatgatcccagcacagagcagtggaggcagatgctggcagtccctttccatgcaggctgcccccttatatcagatgcaccccacccagccttgcccagccctccctcccagcccccactctcatggaggcaacacatgcttctttcacttccacttttctggcactggggagttttgttttgtttttgttttgttttaaacacattttttttctatttatttaatgtatttatttatttatattcatatatatatatatattttgagatagggtcttactctgtcactcaggctggagtgcagtagaatgatcatagctcactgtaacctcgacctcctgggctcaggcaatcctcctgcctcagctttccaagaagctgagaccacaggcatgagccactatgcctggcaatttttttttaagacaagactatgttgcccaggctgctctcgaactcctggcctcaaacaatcatctcgcctcaacctcccaaagtgctggggttgcaggtgtgagcaccatgccttagcttccccaccatgccctttttgataaaagaaacatacactcagtgtagaagatttggaaaacctaaacaataaacttaaaatcacctgcaaacctattaagcaccattgacattttggtgtacgtccctctgtggtcccgttgctgcctgtctctctttctgtctctctctctctccatacttttccccaaccaaattaggaaaatgttatatatgcagagcttcgtagcctattttttcatttgctgatataacttgcacatatttctatgtcactaaatattcctctctagtaacattgtgaaaggcaggttcctggctgggcacggtggctcgtgatggtaatcctagcactttgggagcccgaggcgggtggatcacgaagtcaggagtttaagaccagcctggccaagatggtgaaaccccatctctactaaaactacaaaaattagccggcctggtggcaggcacctctaatcccagctactcgggaggctgaggcagagacttgcttgaactcaggaggcagaggttgcagtgagctgagattgtgccactgcactgcagcctgggcgacagagcaagactccgtctcaaaaagaaaaaggcaggttcctatttcattatactattatatatattattatactgctataccatttatctaatgaagccccattgatggatatatgggtggcttctgatatttttttactaatctagactgtagagtgaaagaaggccaaatttcagtcagttcatgtccagaattgcttccataggatctactcctaatgtagacttgctgaatcaaagcacacacacaatttgaaggcaggcaattgatatgtgttgacaacttaccctacagaaggtctgccctagtttacatgtgagaatcctaatgaggcaaatggggtgaagccggcccaacttgggtggaggagctgacgggaggacacacatggccacgacacagagaaggtcagccactggggctccaccgagaaccttgttcccacagctttgatgcctgttagatggctgtctaaggacagaatgcccaggctgacctctgttaccagcaaatcagctcatccaaaagaatatgccagcagcagccactgctaggagcttccctctctctgtcttctcttccctcccttttaaatctgattattgcctttgttccttgactcagtcaaccaactgaccagctcatatgtgtgtcaacaatctacatacaaagtaattcaacagcaagcaaagcagatgcctctggcacattttttgatgcaccccctcccatgtaggctcaatagtcttgtgcacttaccagtgtggtaccttaccctatagacaatcctccagacagggactcttggcgggccacgtggctacctgtcagaactcacgccaccctccatctggtatggagggatgggagcaaaagtagccacaagccctttgttgattccagaagacttttccctaaagggagagaaggcaccatattggtgctacaaagcgtcctcaaaagcc

SEQ ID NO: 1628 - DNA, 4001 bp, Homo sapiens
agacctgagtctgccgcgacctcccgaatccttccgcgctgcagcatccgcccaccaggccctgcccttctttcaggctgctcctggctttgtggcagggagagagcttggctctctcatgtggggtccctcgacagtctcacttggttgaggctgcttgcctgggcctgggactgaaggaaagctaattggtccaaatgggcactggacatggcacagctgagcaaatgggtccagcctgacagtcccattgaggagtcagcctttggaaacagcatctgctgtccccagtcaaagccccagctcgttctgtccgaaggacttcacctttagctcctgttgaggccttgggagggtgcctgagtccagctcctctgggccctggctcagctcagacccctctgctcctctttccagaggctggagctgggaggtgtctgtgggtagggagatacctggggctgagggctgcactgatggggtacgggcttctctggcctgggtgcctggtgaacatctgggtctccactgttacgtggtaacgggaaaccccatgcctccagcccagggtctggctctgataaggcccaaggtcaccatcaggaggggcttcctgtcttaagctgcctccacccacctcaccgcagggtgtctaggtcacttcagggctctccacctaccgcagaaaatgccacgttcgctgacagagaaaagatacttttccagtttgggctcacagcccagcttctccagacgcccgtagcagcagtcgtgggcgtggcagcacctgtaagggtcatggttgacctggagggacctgtgagccaggctgggctggaccaggggctgctcggggcccccgagcccaaagcagcccagaggagagatcagcctgaattttccaggtgcccccaggcttccctccttctcccaggatcctcccaggatcccccagctcctccatccccatggaggtccccctgcaggctgcttcctcaccagtcagtctggtccaccggccagtgggagccaccgatgccgcagtaacagccatagtcgttgtactgcagggcggacttgcctgtcatcttctcgatcatcaccccaaactgaaccaggttcccggtgaccagagccactgcagagagggagagggagagggagagggagggccccaccctctgcagccaacttcccctgatgtcccctcaaatctgatcacaggcatctctccagttgtccagttaagctcacctccccaaagcaacccactctcaacaacaaccgtggtaataagtaataatattgccagtgacatccgttgcaccttcatcccctagtcctctcctccagtgtgtcagcgcccccagtgtcccctcccactcttctatctactacagtgtcactcattcaccccttccaggggctccccaccagccaccagtcctccccaggtgtcagcccttatctcacccaggaacactctgtccccccaggtctcatcagatggcactggacctgtctcctgaccacctcagctgacctccccaaattcttcccggtgctcctgactcagccatgggactgaatcctgcccaccttggcaggttggagccaaacatggaagctaggataggagaaggagcctagggtgtgccatccgggaagcgccagcccctggcccatgcccctcacccctcccagcctgcattctcctcccctctgctccagccaccgctggctcaggcaaaactggcctcagggtcaccctggtggcaggaagggggcagcctccagtgtttggcatccaccacaccctcggtagggccaggctcaggggcatccagggagcttggggttgccagatggggcagaaggctgaaggtcacaaagatcacttacccaggaggcaaaggaacaccagcacgtggggagatttcatcccaggttggggggaagggaggtgcacaaggagcataaaaggcagcagaagaaagcagcagggccacctctgatctcagggagcctcctaattagttaaatacccaggtcctgtccactccctgtcattaacccgtgagtgcccagtgatgcaacgattcttccaggtctgacactttggccaagtccccggggaggggccagctggggcctgtgggctctgcttccaggcagtgtgggggatggcgggcaatctcgtggctctttctactcacacccttcccatcacccaccctttccaaaaaatcatccattgaccacgctgtgaggcgcgggctgtgccaggtgcttgtcattcttggtatcttttcctcatctccacttgactgagactcagagagactgaaaaacctcagttctcacagcctggaggtgcccagggccaagtccgtcctgtttcagagtttccacccgggcagaaccggaggcaggaggccctggcctggcctggcgcttcccctccccgaccctcctgctctggtctgtgactgggatcactgaccctgcacctccgtcaccgttcagggcctgggagtcgctgggtctgtggccttggagtcctggttccactgcgtattaggcggccgtgggcaggtcctttcccttgcttggaacctcagttttcctgcctgtattatgaggatagaaggtgtccctcttgcctcccgcacaggaggatggaaaactcacacgcaaccaggcagccagccctcaccaagtacttgctatgcaccaggcgctgtgccaagcccctttcaagcaggaccacagccccatcacgtgggtgctgcagtcatccccatcttacagaggagggaaactgaggcacatgcataagtgatgagctagaatttaaacccaggcaacataaagggcttcacctgggccaactcatccagcacgaagtggaggtggtgcctagcagccatactacttttaaccccaacagaatgtgttactttcttataaaagtaggagaaaaaccagtaccatcccacctggattatatttgtcttcaaaccaagacagtcataacatttaatatatggaggaagagcccacaaaggctgatgtgcccagggcccgtgacaaccggtgtactgcagccctcggcctaaccagcgggctccaggcttcaggagctggtctagggcctggtgccagcctccgttccaggagaggagactaaacccactgagtctgggtctcaccctacaggctggaaggaatcccgacacaaattccctgaccccaaccagccggaggatagaggcccggggaggtttcgccttggagtaaggagaggagggctgagtgttcatactcttacgttaaaaaccttttatcggccgggcacggtggctcacacctgttatcacagcactttaagaggccaaggcaggtggatcacttgaggtcaggagttcgagaccagcttggcttacatggtgaaaccccatctctactgaaaatacaaaaattagccaggtgtggtggtatgcgcctgtaatcccagctactcaggaggctgaggcaggagaatcgcttgaacctgggaggagcaggttgcagtgagccgagatcacgccactttactccagcctgggtaacaagagtgagactcagtctcagaaaaaaataaataaataaaataagagtaaagcccaggaaacccttttctccctgcccctcccattcatttcctgctaataactcctcctgggactctcttcatgctgggctcttctcaccctgtttcagagaagacttgcggggagaaggggtcagagaggtgagtccacctgcccaggatcacctagcagctgtgagtcatggtctcctgaaaagagagacctttgttcacgatttccttttgatctcctggcagcccctgcctctcctggcctgggttacgagagcccaaacagtgaatcactgaggagttaccttctaaacaactgaaaattagcgtcgattccctagtaggtttggcccacagc

SEQ ID NO: 1629 - DNA, 4001 bp, Homo sapiens
tgatatacacccacacatacctgatacacacacttgcacactcgccctcgtgcattacagatgcactcacatacacaacgcatccaggggagaatcaggggcctggcccaaggccacatccacactgaccgtccaagcgaaggaatccaagtccgcattcagttgggttgaaggctctgcccctaaccagtggcttggactgaactcaagcagtcgtcttctcaataacaagtcactttgcctgaatgcaaccagccctctctcacgtctggccacgtggaaccttattttggtttttgtcatttatttcttttcctcaagccaggctgtgttctggcgaggtttaacaggctgcatgcaaggccagtgagaggcccagccaatggtccatggagctgggacacctgccacataaatgatgccgggacgagtggcagggtcaggtctgtgtcaagagcctcacgcaacaatcctatggggcggctgcccagagccatgatgccctgggtaccaaccccagaaagaagcccctgacctcccaccactatgcagtacacagacacccatcctacacacacacaccctcctgcagatctatgcacccttcatccataagcatgctctgaagacacacaccccaattaacacacactcacacaaagagacacaaatgggctcgcactcaggtgcctacactgtcacatactttatggatgcatgttgcacacatagacatcatcacatgctcagacacacctacacacacatagatgcctgtgcctgtctgcacacaaaatcattaactccagtctgatggacacacactagtacacattcaggtacacaaatgcccagccaacaccagcattttacgatgcttgctcagccctgcgccctgccccccagggctcataaatgcatgtttacaggtggctggaggggtaaacagccccagaattgggtgcagcctgctgggctgagacaagaagcagaagcccagagacaggaaggaacctaggctggtcagtggaaccataactcaggcgcccaaggtcacgggagacaagctgggagtgggagagaaggaggagccctctggagtctttactcaccgctgccagcaaggatggccacggtgaagaacttcttcatacccaggctagacctgagggaggacgaaacccggagcttgagtccatcccctccacccttggcagtgttggacctgctgctcccttcctgagcctcaggacaggtgtcatcaatgctgtcccttgatgtcctagttgctgctcctagcgctgtcatcagtacctgcccagcccctcctggaggagcgcaccccagatggcagagccaggaggcacgaacacctccttgccccccactctggcaggaaccccctccacgcatcagccttcaggacaggaagcctgctgtctcaggccagacctcccatgcacacactagggagtccgggaaggaagtcatatgacccagcctagcagctgggtcttgaacccaaagccaggagtcctaggtccctggattccagtcccagcaccgcttccaaaatgtgtggcctcagcctccctgggccacatgagggttgtgtggcctcactctccctgggccacatgagtgccacgtgaaggttgactaaatgatccctttggggttctgcccaccacgtggactcttaggagaaagggattctaggagccagtccctcacgcctgtccctgcccctccctggaggattccatctcagggcaacaggcacctacctggaggttcttgaaggacaggaggccccgaagcgtgggcccctccacccagagaagcatctatccagcaccttctttttgaaccctttggggttggcctttgccccatctgccatgttgcgggttctggggggccagcaacataggtctcagaaggtctgagatgcgctccagaggctgcggggagcaggccccagcttcacgctgcctcgcacactggcaggggagtggcaggtgacacatgccctagaaaaaggaggctccacctcctcctccctcccccacagccctgcccacagccagctggtacagtccccaccgctgggtgctctggtctgcctgacttgggggtttacatacctgataggagagtcagtctttccccatgcatctgaaaggaaattagcccaaaggcctctctttccccatctgaaagatgttaaagataaaacatcactcagtgacacttgttgaaacacagtaaggcaggctttgttcaaaggggccatggggacaggtgtagggccatggcagtggcttccgcagtggggaagagagactggactcaacagcagatacaataagaaaaagcgggaattcatagccaaggagcagggtggggtctgaggttggaaagttaaccagaagaaacatcaggggtcatggggggttgggagactctggctaaaccgatccaccaggattcctgctgaaggcaggtgggttgctcagacatcacctgggggccacggaggacaagaaacccaatcagatatggaggacaaaattgaggattctacctaaaccaacttagcagcgttgtgacattgccaaatttgcccttgaagggggcacaattatctgacggagatcctggggggcctggttgtcagcaccatttgccttttttgaaggggggtggtatgtatgagaaagatgggactggagagaatccaaggcagtgtgagctctgggagcccctctcagggctgggtcacctgggctgagcttgggggtttgagcagtcgcactgatagaagatcccatgccagtaccaccacttcccagccgtgaggccttggtaggagagctcccttccctggtctctgagttctcagctgtaagtgcacataacaaggcctcaccgaatgagggtgatgctcatacaagtcgggtgtcatgtggtgggttggggcaggtgtaagtgcccagttaaagatctgattgttacaaagtagagggctgggcacagcgtgatcactcacacctgcaatcccagcactgtgggaggccaagacggaaggattgcatgaggccaggaatttgagaccggcctgggaaacatagtgagaccccatgtctacaaacaatagcaaagtaggggctgatctccagccttggggagaattgagatactgggaggggatggtaagggaggcaggagaaggtgactcttggaagttgacactgcaaataatcccctcaccttcaagttgatccatctctctcaatgtcctcaaacctgccaacaaggggcagaagagacccctggggcttcccttcctgcccctagctttgccagcctcctcttctggctataccaaaccacagtccacatgtcatccccctcacccagcccccacccttcctctgcccagctgcctctctgtggatccaagtccatctcctctccaggaagttatcccggaaaaaccccactgcatccagtcacaggtccttgcatgggagggtgtttgtttgcatttggtgatgcattccaaaacatatacaggtgatgttacctgtatatgttttggtttatgaatcttgacacttccttcaaactggggatcctggaaggaaggggcctttgtttcttccaaaagcctagggcttcccccttgggacaaggctgcatctgcttcatcagactgggagtgattggaaaacaagactagtctctgtcttcacttgtctgcacaaagtttggcttctatctttgcctccattttctcaaacaccacttaatgatgtcaccacactccaaagaaggaagaatcgagaagtaaggcccagtatgtccaaatcctgaagatacagcctccaacctgcagataactagagccactccaacgtaggtcgaggaggccaaggctggggccggggacccctgagagcctctgagcagcatcactgctactttctcaactggaa

SEQ ID NO: 1630 - DNA, 4001 bp, Homo sapiens
ggtaaataaaagcaaacaagatgaatgggaaccacaactaattctgtcttcctcttttttattcctggaacataattttaatatgtagatgattcgattttatgactgctttctaagtaccagcactagaaaagataatgggttaaaaacataagccaaataacctctatggaatgaacattttcagttgctaaaaatctatttaataatttttcttttcctaattaaatgtaaatgcaaaaatgcaaaacacttcagaataacttacttttttttttttttttttttttttgagacagagcttcgctgttttcgctcaggcaggagtgcaatggcgcgatcttggctcactgcaacctccacctcctgggttcaagcgattctcatgcctcagcctcccaagtagctgggattacaggcacctgccaccacgtccggctagtttttctatttttagtagagatggggtttcaccacgttggccaggctggtctcgaactcctgccctcaagtgatccacccgcctcggcctcccaaagtgctggtattacgggcatgagccactgcgcccagccagaataacttactttttaaaaatatgttaaaaagatgcaatgtcttatctcaaaaaatatgcttcccctaagggaagtttgtaaaactcctttgagcaaatgcacattaaacacttctctatgcatttcacaattattgcttaatttaaaatttaactcttccggagctaatgaaagaagtaaatacctgtttcttatcccaacctctaacttgattggcaaggtgtaggaacctgtagaatgtaactttaaaattcttaacagagcttgtttcactacagtcctctacaaatatcccttgagccacaattctaaatttaaacaacaaagagaaacaaaaatacaaatcttctttgaactcaaattatattggcaaatataactttagaattgacacccattcagacagtacgcctctaatactctccatctgccttagctgaataaatgctgacatcatcaacccatatgaggagtatttcttgttctggttttggaggtgaatttatttttaagactaaaatgattataaattgtaggagacagatacattcatccactgatactttaaaatcaaataccttttttttctgttttttttggaaacaaaattactgaaatatccacactcaaaatttaactatgtaatttgatcaaatcttttctagtatctagttttgagattttttttttctcttggcaagccaagtaacttaggggaagggtggatcatcagaacaccagtccgtttacagttaatttttcaataatcctctttctttcgcataattctgcaaaatattgactagccaggaaagcgtcccataagtaacaaaaatgaccaatttttagaaattaaaagttaagtgagtcaacaaagtctctcgctaaagatcgctagggctgtcaaacagcacagcatgctgctgctcaagtttggggatcagtaaccattgggtgtcatcacgtggaacgctaataagcgccacctcaccgccgttttgaatgctaactttctgggattccaacccaaagaaacaccttaatctttgactccacagtgcatttagatccaggaaggcaaatctgcgtgggtttgaagaaaattgaggtccctaatctgtgtttcacttcaaaaggcagaggacatgctgactttttaaagcagcgaggtttcccctccgtcctttcttccttccaagtaaactaccaagtaaaagctaaggagggtgggagagagaagtggagcagaggaagaataaatatattgcttacagttcccagagttacctgagaatcttcaggctcctcaatgcctctagctttcagtcaggatcctttttcagctccggacttagagaaagtcttatcctgagtaggaggggctaaaatgtgggctggtctccttgcgcttttgcagatgttttaaggtggaattaaaggggaagagggagaacgctctcttctcatagaagctaatattgtaaatgtaaatgcttagttattagaaccaggagtttgaagtcagaaaatatgcttaaataatatgtaaattaatcagtcctaaattccatgagtgctgttgtggatttctgtgtgtgtgatgtgtgtgtgtgtgtgtgtgtgtgtgcgtgcgcgcgtctgaaattgctacttgtccttaagtagtaactacttcctccttttttccaaaggagaacaaaattgaaaagacagtgaataacctagagcatttttgcattatttaaaaaggcaaagtttataacaaaccccaaatataaaaatgtacatttttaaaaaatgagtatcagaccactttaaaaatcaaatctgtttaaatatttccactccagactcagaacacctgtgttgataataatttctttgtaaatttaagattaaaggcataccaaataatgtaatatatatgttgagatttagggaagaaaatgaaatcaggttgaattccaaatttgcagtgtaaatccaaataccttatagcactgtaatgaagaaggtgcattgtttaaatgtacccaaattccatgagaatcaattcatgtctttaaagattgacatgttcatttagtatatcttgtttttcaaacacaggatcttgtttttgcctttaattaaatactgaactcactctcctaactctcttacaatattttcaaagaatataatttcactaaatcttctggaatatctgctttctgtagcccaacattcaactcttatttgtttttatttttttcccctaaattcaacctggcatattataaatctctctttgaaaaaaaaaaaagccagtaatgtcttttttaggaaggatagatttataataaacatttttcgggctgggcacggtggctcacgcctgtaatcccagcactttgggaggccaaggcgggcggatcacgaggtcaggagatcgagactatcctggctaacacggtgaaacccccgtctctactaaaaatacaaaaaattagccgggtgtggtggcgggcgcctgtagtcccagctacttgggaggctgaggcaggagaatggcgtgaacccgggaggcagagcttgcagtgagccaagattgcgccattgcactcccgcctgggccacagagcgagactccgtctcaaaaaaaaaaaaaaaaaaaaaaaaaaaaaaaaaaaaaaaaaaaaaaaaaaatttctctttccaaagaaatccctgaatttctagaaaggaggtgtatgttaattagaggagcagagagcacactggtagttttcatctctttcccccagacacaactggtgaaagaaagaatctatactgcagggcatgttcgttctaagactctgataaaaaagactccctggaaaagcagcttcacagtgcttgcttatagagcacaaaaaaagtgctctagtgcttttttgataacaaaaagttatagctctcaatatttccagatgatatccaatagtgtgtcatgcattaaagataaaaaatttatttaaacgcttttaaagaaaatgtcattatatgtcatggttagggttaatatatacggggagaagtttgtctctttcccgccttactaaatgaagctgatttatctccacctttataatgaataaaggctgctgcaggtatgtcttttcctctctggaatcagtgcagaccaaatcccatttacccattttgtggttctatggcctccttatctcatctattttggctcactacttgtgatctcactgttcacatagacccctaggtggatagtacaagttcagatttgccgtcttcactttgcccaatttcctccaaaaatattttcagcattgacctactgacttcaaaaacctctgcttccaccttaggtaagataggccctgacttccatagcgtgcttcagtctataggatcaattatgtc

SEQ ID NO: 1631 - DNA, 4001 bp, Homo sapiens
aaaaataaagcagggagcagggtgggagtgctgagtgtgtgtgtttggggatggggacggggactgttgatggtgggagtggccactttatttatttatttttgagacatcttgctctgttgccccaggctggagcgcagcggtgcgatctcagctcactgcaacctccgccacctgggttcaagcaattctcctgcctcagcctcctgagtaggtgggactacagctgtgcaccatcatacctggctaatttttgtatttttagtagggacagggcttcaccatgttggccagattggtctcgatctcctggcctcaagtgatccacccacgtcggcctcccaaagtgctgggattacaggcatgagccaccacactgggctggagtggccactttaaacagggtggccaagaaaggtcttgctggggaggtgacacttgagtaaagccgtgaaggagcaagctatggggacatcctaggggaagaaagctccaggcagagggaagagcaagtacaaaggccccagggtaggagtgcacctgtgagctgggaaacacggaagctgggtctacctttgccaaaatgtcttgtgaatccatcgccctgcccggaactggatcaaccccctgccctgagctctcccagtaccgtgtgctctctctcttcacagcaccaatcacattgtgttgcaatgtctctcccaccaggctgtgagcaacctgcggacagggacagtgtcttttattaatactttgacatctccagtgctcagtgtagggcatgatacatatttattgatgaaatcaatcaacaaatgaacaaactagactgtgaatccttgagggtgtctcatttatctctccctggcagcacctagcactctgcatggcacagattggatcctaggaaaaaatgtttgttgaatggctaataaaaatagctgatgccttattgagcccagataccacactaagttctttatgggccttctctcattttatccctagggtgaccctatgaggtagatattaccatcatatgcactttgcagattgggacactgaggcttgaagaaaaaaaaatgactcacacctgtgcccagctggtcagtgacaaagctcggagttgtcctgatccatttgactcctgaggccacgtatacttagcccaaagctagaccgtcttcagagagggaagcgagagagagagagagggagagatggaggaagggaggagaaagatctccctataagggcatcttaccctcctctgggtttctttctgtgtgtaccgaagtgtctggcacacagtggatgctctcaacaattaagggatgttaaatagatgtcggcgaattctctccctaaaggggaatatttgcctgtggtttaggttaaaaagaaatccaagcaaggcctcagattaacgtaaacacaagtcctaactcagcctgttcataactctccctggttttgcccgtaattttaggtatgaccttccggtaacctccatcttcccttgaggtgtggcctggcctccttaaaagcccgctctccaggcctgacaatgacaggtgaaggaccctagcagccttagagagactccttcaacagaggctgtgcctgcgcacctccccctgggcctcctcttgggctctccacacacccccttctccagtctctccctcccagctggcgtccctccacaacccccaatttatgcagcccccatcagtaactaacctctttggcctggcctcaaatcctgctctagaggtctgctcccatgagcaacttccttgggcagaccctggagacccgggtctcgcgggctccccgtctccagtcggaacattggtatccacagaccatggatccggggggagtcaaattcttggcctccagaatcttaaagctgtgaatgggagtgaccgatgatgaggacaaacccggaggtggggaggaaaaacttctgcctggacccagccgggtagaaccctgctcagcccccgactgcctttgcagaggcaggaagtcctgcacaatcagggcctgtggctggctgtcctgccaaaggggctgggcagtcacccagagaattccaatgcgggtggatttgagtcctgaaatatccaggtcacggctttagccacttcacaagcctttgctaatcccctcagcccgaagtaacccctacctcagtcctgggctcagaaccttgttaaggctctgacagcctgcttagaatcttgactatctgagtccctgggggctcatcagtcttggcggggacaagaacatgaacacaatactgtatctagtatacagtaaaactatctaatatacaaatttcccctattgtcccaataatggtttttatatccaatttgttggcttttttccgatccagaatcccaacaagaatcaggcattgcatctaattgttgtggctctttggtgtcctttaatctagaaagttctttaatctggtttctttctttctttctttctttctttctttctttctttctttctttctttcttttctgagctgaggtctcactctgtcacccaggctggagtgcagtggtgcaatctcagctcactgcagcctcggcttcctgggcttcagcgatcctcccagtagctgggaccacaggcacatgccaccccatgcctggctaattttttgtattttttgtggaaaggggtttcaccatattgcccagtctggtctcaaactcctgagttcaaatgatccacctgcctcagccttccaaagtgctggaattacaggtgtgagccaccacggccagacttaatctggtttcttctttaaaatgacattgatgctcttgaacccagaccagttgtcttgcagaatactcaccaatttggatttgcctattgcttcctcatgattatcaggttaaatgttttttgtaagcatattgcataggtcagatgaggggcatgcacattttcaacgttaccagtcattcctaaaatactctcttcaatggatgtgccagtttacattcctagcggcaccatagccagcacttgataatatcacatttgtcaattcttcccaatctgatgagtataaaattgcgtatcattgttttcacttgcttcccctagctgttggtgcaactgagcatttttacacacaccttatggccatttggatttcttcttcaacgaatggtctgttggtatctgtgccaattctgggcctctttgtcctaacttccatccgggtccttcctggctctgctgtgttggagaaggacgtaggggggagtgtgttccctcaggcttctgtatcagcggcttccaggaggcaacacattggaaaacaagacaacaagtgtttgctatatatgttgcaaatatattctgtaagcatgccagttgtcttttatttatggcatttttataatataaaaacttttggccgggcgtgggggctcactcctgtaatcccagcactttgggaggccgaggtgggcggatcagctgaggtcgggagttccagaccagcctgaccaacatggagaaaccccgtctctactaaaaatataaaattagccaggcatggtggcacatgcctgtaatcccagctactcaggaggctgaggcaggagaatcgcttgaacccaggaggcggaggttacagtgagcagagattgtgccattgcactccagcctgggcaacagagtaagatcccatctcaaaaaaaaaaaaaaaaaactaccacttttaactttcatgccatacaagttatcaatcagtaatgtttagtaccttgtttgcaaagtcctgcatgcctctctgtaacatgagtttaacaatatttttctcagtatctttctcctattggttctaaatttcggggttttacacttagggctttaatcctttaattcatttggagtttattttcatgtgtagtatgaggcagaaatttagttttatttacccgtaaggaaagtca

SEQ ID NO: 1632 - DNA, 4001 bp, Homo sapiens
acccaggacactggcccatctgctccgtcctcggcggcacgtggagtctgtaaggactgttctgctggctcccctccctctgcccagaggacgcaggcacggagggtgggctcagagccactcccaccactgccccctcctaagactaggcccttccctggccagctgcagaccccaagtgtgctgggtctcctggaacctggggctttggggccacccggcagcagccagcccctgtccacagcaggcaggcatcctgagcccagtggccagcacagggcagtgactccagggagctctctgcaggccagacaggcaggaaccagggacaacgtgcccaggagagccctgggatgggggctgcggtcagcgagtgggtgcacctggagtgacctgaatatacagcccatcctacaaacagtgtctgcccagcagccctggttacatctgccacactattctccattcagagagggcacctccactgggggtgggacagaggaggggacaggcaccctggagcagctgcacaggccaggcacggcatgaccactgcagacaggcttgctctgaatgcccacagccaccctgtgaaagcgccccatgctatccctcttgcccatggaggctcagagaggctcagtcccttgtgtgaggtcacacggtttatcagaggcaaaaaccagcaacccgtccccagtctgcccagcagcgatgccatgtcccaccccacgtgtccatgccaatcacagggcagaacaagcaggttccaaaccaccaggaggcaagctcctactgtccctggaaacccaggagttcctcctggtgtctggcctgagccacttcttctgcagccgtggccactgtcccccttcacgttttcctctccccgcccctggcccagagctagcgctgtgtttggggagctggagaccctgcccctctggcccagagctagcgctgtgtttggggagctgtagaccctgccccagccagtgctgaaggggcctgcccaggatgcccctcggaagctcctgctgtgaacagccccggggcttccgccacccctgctgctccgctctgtctgcgcagggcaatgtccggctcccaggtcaggaaagcgtgacagatcacagcaagaaatctccaacccggagcggagcgggatgggccagaccagagtgtaactccagggaaccctgaggacgcacagcaactgcaggccccccagagaaagcagcagctgcccctgtccatggtgctgactgcagctcagggccacctttgccaacctcgatcaggggctggggtggggttgggccaggagagcccccagagccaaaagccagagcctaccagcccctggcacccccagacctgccccccacccgagcagtgtgcatccgctgggatcaagctggaggtcaggacccgtgctggcatggctgagggcgcctcccccaccgcccacctggactgtgttggaccctttgcagggagcagaccctctcgctttcacgtgtcagcacaggggcagatgaggcagggtgggggcgccaaggggtgggggcagcatccctcctctgggaccgagtctgagggatgtgcaggtaatggggtcattgggccgtgctcccggagaccctgctgggaggagctctgcactgcccacggggggtcagtgggtcaccagtgaacaggtccggtcctgggcgggtcaccagtgaacaggtccggtcctgggctccctacggggaccatcacaacccccttctgggatcccacctgcccccttaccttggtcttggctgagcccacctgggggcccaggctcttccatggccggcgggtgccaatcccagttaccggcacggcccgagggacaccgggccctgtgctggcccccggcgtcccctgagccccagcccgagcaggggcaccccgcgcgcagagcccatgccgatcgcagccccacacgctgccctgccgcgcccgcccgtgaggaaggtgaggaaggcgaggggaaggcgggacggggccgccgctgggaccgcccctcccgtgggagccccgcccacttaacccttggctgcccagcccgggcccagcagcctctgctggagtgggaagggaggacacctgggctggggtctctggcgggagctgagctggctccgctgagaggccagaaggggaggcgggttggctgctggctcttcccatagcagcttgagcgaccacccaccgttcatcctgtcctccctccctccctccctcccggcagggctcctcctactgaggggtggctgcacccccaggaccagagccaaatgctccctggctggctgcccctccaccacagggaccctctggtcattacaccccaggccccgcaggctgcagccaagaagagccactcaccccaggagggcctctgggaagggctgagcactgccaagggtcattgaggtgacatttcactggctgccctggggggcgtccagcgttgggggaggccgagttccagcagtagctcctggtgatggtgacggtgacggctgcagccctgcgtgctgctacaccccttcctgtgctctcccagcccctcgcctccctgccctgtctgtccagtgctgagctgcccgcgctggggtcctctccctctccgagccagcattctgcctccccctgcacgcgctgctcccagcatctgagggacgtaacattttccagacaaaagagacgtccacccatggggggtgttctgaaaggtaccacctctgccccaaggggccttgagcccccatcccagagtgcggcctgggaggcttgtgtggacactgagccccggatgtgggcagggcaggcaggcacgcaggcccgggcaggaggatgtggggccgcctctgggctctctgagccgctgccacctcaaggtgtgaccacctcctgccatgcggggccccaggtgtggagggggaggggagccaccagcagctgcagtcaccacctgggtcctgccaaggaaggcccctgggcgcagctgcctggcaccctcaaaggagctgcctcctgcctttaccaccactcaggtggcctaggaccctcggctggaccagcccctgccctgggctcttgggacctgccctcgtgaatgaacagtctctctcacgacccattcggcacagccagggtcccagggcctgtgtccgcctggctgggcacagctgcgagaagggaggggcggccccctccctctgggccccaggtctcagtgggtcccggtgctgagctgagtggcagggctgaggggaggccaggccacaatgggggctgtccaggcaatgacactgcagtgcacgtgtgccagaggcaaccagtggcccaggagcaacaggcgtcccagcatcccccacacctgggctctgcatgtcccctgggacagtccactcaggaaagggccagcagccccaagtctcagaagggagaaactgaggtggggagaggagacagaaggcgaaagccacagacacgcccaagggtgggaaggagggagaggggtgtgcgggctgcaggtcccgacccagccacgcctccttggagtggacagaggcccctgagcccccttccagaggccggtgaaacccaggttcaggttctaaggaataatccatcctcagggccagccccgcccgccactcagccaggagatgatttccgtcaccgcggcctgcgattaaaggcggtgattaaaagccgcccgctgcacatgttaatttgcttaagattctgatctcctaaatctcttttctgggcatttaagcagaattctgtctttgagagcatttggcccggcgggtggcaggtggcgggcggcaggcggcgggcagcaggtgaggaggcaccatggtggcaggggagccaggccccagggagtttaattttctcctcgtttgaagaaggcgactggaaggaacaagcacatccagggacgcagagcc

SEQ ID NO: 1633 - DNA, 4001 bp, Homo sapiens
tgccagtgacagggcaaaggccagagcccagggccacctccaccccaggtgccggcttgcctgggtcacacagctcagctgggccctgccactcctccccagatggtcctgggaactgagggccctgctccccaccctgctcggccacctgccactcccaccacctcctggaccagtcctagcagccctggtaaccggcgctgggcctggggccccgagagctaccactcagacggagccagcacagaactcaacaatgggaaggccgggcacgaggcaagacagatgaggtggctgggctggctgtctggggccatagtgcagtggaggccccttgtcaggggcggggtgggcctagcaggcagcaaccccatgcccctgcccccgcccctggccacaggtggctcctgggagcggtcgaattcctgagtgcctgtgcccctgcctggggcatctccaggaaagcccccacccctcatgtgcaacaagcgccacgaatggtgccatgaatgtctgcgtcgcacgccctgcactgcagtatggacttgggaggctgtggtgccggatccgagcttcacaacccctcccctcccctcccccaggctgcctgcctcgctccttctctcccctcctctctccattcagcctcctgctgtagcttgtcccaggagagggggctgcagggtccagggagtccaggccagagtcagctgtcccagcccaggaacagactggtctcaccccctcggttcctgcacacctgctcacagaaagcccgggtcccagaggtaccatctgctaaagcacagagacgttaatccccaccccaggtctgcacgctgagggaccctggcgggggcgttgtagaggaccaagggcagtactggccgggccttcttggggaagctactacgtgatcacgagcagaggggaattgaagggatggaagccatggcatggggggctgggctctccggggcacatgggaggtgaagacgcaggtatggctgcagggatttaggagaggggtgaggcaggacacaggggcagggggcgggcagaggcctgcaacagggcagcctggacaggaccctgtctgccgctggaacagagagctggcaggccagcccggaccggggccctccacaggccaccacaagacacacactccaccctcccagccatacccagccagtctcctctgcagagtctcctaacggcaaaggccctcatgtccggcaccaggatgccagcccagccgcctgggctgcaagcaccactgacccccagagcacaaggcaccccttcaatgagagcattggagccacctgagatcccccctcgcccccttgggttcagcccccaggccctgcaggtgcctgggagaccgaggtgtgctgagcacgcctctgagcggctgaggggcagggccagccgacgctgctggacccacatgatccctagagcacccgggggacaggggaggcgagtgcaggatgggatggaggcccaggcttcccccacctccaggaacagcccccacccaccagtcacctggccagggccagcactcagcccaggccactcgcctgccccttcttacccagggggccgagctgccactctgaagacagcaccacactccctccaacccagaggagtacctccgccagccaggccaccgttcccttggtccggctgtcgggggagggccatggaccagacatggcctgacgacagccgggcctgcttcacggaggccacagaggcccaccggccttcgggcagcggaggtcaggcagtggcagcgctggcgacaggacctccgtggggccttctctcctctgcctcttcctcctcctcctcagggccctccgaagcccccacagggctgtgcccaggcccggctggcattggcctgaccgtcacctgctgtcctgatggcccccaggccagcctatccaccctccagggccaccaaggaatccctgacgcagccgcctcccaaggctgggggagcaaaggacctcagccccgcccagccccaggcccaatccctgtgctaatcccagctccagcccagctggtggaggatttaggccgagggaactcccagctggggatgggagggcactggggaggcaacagagtttcccaaggccccaggccaccagacccaggtcagggctgcgggacaagagcaggaccaacgggagggccctcctgggacccagagaacgcaaccggaaggcctgcagggtactgtcctccgaggaccctgtgtggggtgggcctccccgctgtgcgcccaccacagatgccgaggctgggcctggagtggtccctgccctcaccccgcatccctacttatgaggacctctgagtggatccccaaagtccagaggcaggtggcccagagcaggggcagaagctcacctcatccccgcagcgcccagcccctgtggctggagaggggagccgagccggatcccttacagcgacaactcccagcccaggcccaggatgtgggtccctgagcctgggttgggctctccatgtctccctcatgcagctgcagccccagcctgacctttctccacggtcaccgagctgtggcggaggaggtggccccatgcccagggcacgtttgtccccacattctgccctgcagggatgacagccatctgacctggacaggggcctcgcccaaggaggacccaccccaccgtctcagctcccactgaggaaaggactccaggtcccactgccaccaggaccacacagcccaccctgtgtactggccccgcactacaggacagcacaggctctcccatccccaagtccaggccgggacaccaggggcagctgtgggaatgggaggtgggcagaccccggctgaacaccagccacctgtgtcctggccatgcccatgcttcgtgaccacactggggagaaccccgcccttcttcccacccactgcccaggctctactggctccagcaacaaggactggaaggttccgggcagctgctcgcctccccccataccaggggaggagtttggcctgcagagcccaggacagggaggtgccagggctgggcatcctggcagagccccggggccaaggtcaggcgtgggaggtggcagtccctgaggagatggccatgcgtctccagctgaccactgacaaccagggccacacccagccagatcagatgcagtcagcacagagccaacccaggcccccaccaggggccccgtcacaggctctgctgctctcggcggaagcaggtcagcaggcgtttctgggctctgccgtggaattagattagggagccatgagctgcagggagaggagaggggctggagtcccgggcgtcctcaggaagacagggcctcggggaaggccaccgtgtaaggggcagcgcaggggccaggaggtggcctgagggcctggagacagaccagacggccatagccctggcccagggcccctgcccacctcatactgggctgctgcgggcttccactctgacccagggggtccagttctccttcctgcacctcagaggcctcctggcctgggacacacctgctgttccctcaccctgggcctggccccagctgggggtgctcccgtctctcacccatccctccttgaagctccccaaggctgggcctctgctccctccctccctcccttgagctctcagccactagctgatcccccatcagctggggttagggcttggaggccgccatctgcctgggcaggggttctgagaggagccacacatagagtgcctggccccagccccacaacgtgggtcccaggctcctgcaccccaggccccctgacctcctcagcagcagagctggaatcctcaactgtccaggcgggtggaggcctggctaatcccttcctgacacaggcctctgccgggggctgccctgcctgccctgaggtccaaagggaccgcccactcccctccaaaactcag

SEQ ID NO: 1634 - DNA, 4001 bp, Homo sapiens
atgaaaggtgaaatatggttgcctaggcaaaagctaggtggtccctgttaaattattgccattttagtgtctgtcattaagaagagctcacttagaacaaagcttttattttaatgtaaaactgggtactttttccccaaccttttaaacagtacttaatgaaaataaccagaggatggcctgaatgtaaacagcttgcagtcactcttagttcccatcgcacccttccacaactccaaaggaaagttcactctcttcggaggtctgtacactttcatcagattgtacttcaatgatctcagcccctgacctgctcctcatttctccctgaatactgtaagagaatatcactatgcgtatgtttatgcccatgctcaaagtatgctggcgcgagagggactctgcatttcagcccggtcctttataatccttaaaggaatgttctcaggctaatgaagggaagaaaggaatgattctgcctcaagcattcaggcaaaacattccgaagcactcagagtcccatttaatcctcatgctagatatgtgcattatttatttatttatttatttatttttacccatcctgactaaggagaaacagtttattttgacttctcaacagttaagaactgctcaaatggatgagatgataaaaggtaccaggtgtcacctaaagagggaaaaatctgacctttgtcttggcagtgatttctctggtctgtgtccctatgaatgaatgatctagggatggtgcatgaaggcagggaatgagatgaatgattctcatagatctggtttccaatttccctctttctgagttgctggaaaggcaaactcacttctaaaaattcccaaccctcccttcatcaccagtctcttcattcatctggattataaacagaaaaatcatttcccacacatcagctgtgcagtcaaataagtatatttcaggcattctctctcaacagtaataggctttatcttcttctcaatgatatgtaatcctatttattatcaatgtcctttgtccattaatcctttcgagaaaatgtttagtggccccattgttgcaagccagttcttccccccatctcccgtgttttcctccttgtatcatgggtgattgggaggagacacttggaaaagacatccagagagcagaggccaagagataaacatgttgtaacttccacagtgaattctaaaacctcatctaaagacctcacgtttacgttaaggatcacctcatcctggcaatgtttgctttactggattgaatcaaacttcctccaaagtcagatcgttctttctttgaaaacttgggctcctgttgttactgcctatgatagtttcaaaagaaaaaaaaaatcacgtggaagtttgctctagtaatgcttaatgcctccagtaaacagtgaagctcacagaacggtgacaattcaaagcaagctgcttaaggatgaatggatttttaccgccacacaaacatatcgagaaaacagacaactatttctttgaagaatctcatggaaattacagttactttcagaggaaagagcacacttcagagaatgcattaatcggggtttacatctgaggtcaccgtaggactgtccttccctggcagagcccagcgaagtccttataaattacaaagcaccattacctctgacatgaaaggaatcatttttcaaaaaatcagtgctctggtgaaaagagtgttcctgcccttctcataaaaaaaggacagtgcctcagagctcaagtgactgttcagtctcatgctaccaacagccattttcaccagcagaggctaagaattctttcccaggtaacacactaggtctgtagaaaactccagagtttcttaccattgcgaccaatcttccttccctccctgcggagtccagcagccaggagctgtcgctgatgtgctgcttcccacagcctctggagccttcagaggcagagaatgtttcatgtggcacaaacgtatcaccaccgattacatttcagtccctcaattgctggcctcaatgctttggaaatcagccaaactgagcacgaagagagaaagggctgcagcttgcaatttcagaatttcccctagaatgtgctcttaaaaacataggcccctcatttagcatttaagcaagcactggggactgctatgtttaattatgtttctccctcttttccttttaatctgagaggagttgtgttccttgtggaatgaaatgatagcaagatctcaagctgacccaggggaggcaggcaccgtgctggtgtccacacacctccaacctgagcagaaacggctgcaattccaatcagagtaaaggagaatcctgcctagacaaagacgagcgaagaggggcaatgctgacgagcactccatggttacagcagctcggtcatcggtgggtgtttgctaagtccagactaaatcctgtggcgtagcgctgtcaaatctgaacaggtggaaagaaaagttctttactcatcaaggcagtgtaaggtgcacagctttagcttgaagagtataatcaaagttcttcaaatgcagggaccatggcttctcagatgctttaaatctagcctgtgctgctcacttatatgaaaccacggggctctttgcttttcctgcactttggccacgttttatcgtttaaaaatttatctcagaagaattcaatcacacagctggcacacagcagcagctgaacctcatccaaagctcagacaggactctttagaataatagtacacataagcaaaaacatctgttgattgccaaattgtttacttgcctttccttcgccacctgtaaattgcaggagggcaggtgccatgcttcttttgttcaaatctgcatcctccaggcagcatctattccactctagaatatttactagctgagttaatacattgatttcccattactgttggaaatgttggcaaagtcccacaaattggtagaattccttttgcttggagcctgatttgttccaggcttgggttgggttcctttttttactgcttttcctctcatcaaaaaggaaaaattcacatcttcttgtatggttaggcctagaaagggctggaataacctccagcaaagctaaatacttgttctagagcaaattcatccccaggaatataatttgtgctgatggcctagggttctgatttcttagaagagtccatggcatttatcaggctcgatggcatcaaggagtagctgtgaatcaacagagtcccagaaaaacacacacattttcacaccctctggaaaaagtcttttaggatagagaagccaatatggcaggcaaattaggtgcccacatgagagacatctggccaagatgtagctcaatgcttgcattgagtaggttctagacacccctttaaggggttacatgaattcagtaagtgaatactctgaaactctggagtgtttaacacctgtccccaagctggaataagccaacattgcctaacgtggattctcagttcatcatcccatcctgaggtcctttctctagaaacactcagccacatcgttttgactctaccttgggccatgcccacttatccttctcctctcatgggaagaggcggcaacatctactgcagtgtgaccaggaaaaaaagcattgtctgcttttttccattagccttatatctgtgcacaagaaatcccctaccgcagcatcaatgaagcgtctccctttcttctacctgttctgcaaggtgcagcgttattctttcctccttcagaaagagttccctgacatcctcaacttacagcaatttatcttctctatgactgtcactcaacactgtcctaagcatttaacattgaatcatacattgtcttcagacacttcttggatgccactggttattttattgtttatttttaggtatcttaccatctagccagattgtaaacatgttattcctgtatcaaattctttttttttttttttttttgagag

SEQ ID NO: 1635 - DNA, 4001 bp, Homo sapiens
ctttaaactaataacaccaccagccccttcactaattctggagagggcatgtttaatggatacgttgcctttcaaacaacttgccatcctagaaaccttcagcgacttccatagtcttaaggatatgaggcatccctttgacattagcaaatggctctctacacataaaatagtgctgttatccaactcaaagcttcatattagagctttcagtgacttcatcaggccctcagaaagcaggcacagaccttcctttcagattattataatagagaaatgccccttcttcgcgtgtttcctcctgggaagaagcctgttggtgctgcagagcccaggaggagtgctttggggggcagatgggaagcaggtcggtgcagcagttggaaatgcgtgagttccaggagttcttggtcttatcttttttatcattgttggcgtcctgacccaaatacaaggaaacctccacattccattagcagactcaatttggattctgcagctctgcagggagaaatagcatcttctccttagctagttgtgctgcactcttgagataattctcttagtttaattttaacatttggtttaagaagatgctgatggatcaaatttgaaactgtggatccactaaacgcctttttagaaggttttttttttttctttcaaaatagcaagccttaggagctcaactccagagccaattcacttcgcgtgaagtcggcactccttgggagtagaggtcccctctcaccggctcccaccctccagaggggaggatttctggggagcccgacgatccgctcgcttttagcctttctccttgcaacgcgcaaatctctccctagttgggctcaagtagagaggatcaccaactgctcatcccagcggacactctgcaaaaaactctaatggcttgtgcgcgggtccacgctggtcgctagcggcgccaactttactcattcgttaatttgctagtttttggactgagtaaaacagcccccaaagacgcgggcaaacgccgctctaaagcccactaccatgcaacgccaggttgctcggagccacgctggtggcacttccccttcgtgctcactctgcacaggcacctccagaaccccgtgcaaatgaaccctaccgggagacgcaggtgggcaggtcgggtcggcagggaccaagagcctgaaagggaacctgccctcccctccccgcagcccggtcattaaggcaagaaactgcaggcagagaagcccccgaatccgacctaggacgtcggcgcctgccaggatcccctcgcctgccccccgcgccccgcgcgcgctcatgccaccaccacggggagggtgcatgcggcaggtgcctggccgaggcccccgggagcgagtcgcccttacgtgctccagcttgtctttcctccgaagccagacgctggcgctgtagtcctgctgcttgacgctgctgtagaagttcgcgcccactcgggtcaggcttggggagggctccttggggcggcttttgagcctcatctgctcgaagccctcatggggggaggccgagagccactcgtgctgccggatctccatcctgacatgaccgggcggccgccggcgagcagcggactcgggacgggcgcgcggggagccgggcgcggagggcgagcgggaggcccagcgggagccggaggtggagctggagactgagctggaggagctggaggagcgagcgggcgcggggagcgcggggtgctgagcgccagctgggagcgcggccgggcgggagggggcgatcgcgggaggcgcggggcggaaggagggagggcgaggtgcgggcgggggcgggggcgggggcggagggggacggacggggagaagggggacgagaggggacagggagggaaaggaacctgctccggggagacagaagtgcccggtgcggcggcgacgtcgcccggcggctgcggtcccgagcgggcgctccgctcgccggctccttgcggcacctactgggacccgggccggctcccggggcggcggcggcggcgggggtggggtgcggtgggaggggccgcggctggcccagccagcccgcgcctgcaggttggtgcagtgaggagccgccgccgcccctcccgccgcgcccaggcccgggcggccgcgctcccgctccgcacccgcctttcccgagcaggctacacctctccctggcgcatctttactggaaagccggcaggcgaggggagaagtgagcgccgtctccgcgcctcctcggtcctgctggctgagcgcggggatggctccggagggagacactcaggaaaccacctccgcccttcccccatctctatccagcggcgccccctcaccctgcccccggctcgcttgggctgcgccttcccccattctgaaagttcactaacttcccaccccaagggacttagagcagagggtgcccagcattcccccctgaaaatagccgagagacatgtgttttctggagccgtacacgctactttcatccgatggtgtggcgatgcaaatacgcccgggggcagtagcccctcgggcaggcacgcgggaccggttgctccccagccctcggtgtccacctagaaccgggctccccgggccgcacccattccgatcctgggagggtgatccagggctcctctgcaacgctccgcttgtgcggtgactgttccttaggtggacgtggcccaactgctgtgcatttgtttcttttctctgtttctaggcccctagggtccaggcttttccttcggggcccagccaagcgtgatgattattaggaatagggtggcttgttcgcgattaaatcttcaatctcttcatcttttgctatctttggagtcaacctctcgaaacattttttggttttatctaaatgctaaacagctggtgttcagggtgtctcgtgtctggttaaaagcttgggaagtgtatggaagctggagaggtatacaggggattttagagggtgttgccaagggtaaactgaaggctctctagccctcggcagaactgccctacttgaatgacggtttcaaagacattctggctgggatttcacaaacttttaggaggacagggattgtgtttcatatcttttcaaagtctccatttaaaaaaatggtatagtaaaaatagtagttgaaataaaatcctgtgcacattcaatatggggatgaaacaactaaacacaaatacacacattttggttgtgctaggttggttttcttaggagctgaactatattgtgcaatagatgccccgacctgtgggctatctctaagtctcatgttatcctgcaagataaatgttattaaccctcctttccagtgaggaaagtgaagcagaagcagaaattacacttcaaaacaaggatatgaaccagattgaaaagctgtgaaggccaggcggagtggctcaggtttgtaatctcagccccttgggaggaggaggcaggaggatcacttgatcccaggagttccagaccagcctgggcctacactaaaaataaaataaattagccaggcgtggtggtgctcatctgtggtttcagctacctgggaggctgaggcgggaggatcgctgaagcctgggaagaggaggcaacagtgagccgatatcgcactgcaccctgggcgacagggcaagaccctgtcggaggtgaggctgtgaaaactatacattccattgtatagcatctctgataattttgtttgtttgttttgttttgtttttgagatggagtctcgctctgtcaccaggctggagtgcagtggcgccatctcggctcgctgcaacctccgcctcccgggttcaagcgattctcctgcttcaacctcccgagtaactgggactacaggtgcacgtcaccacgcccagctaatttttgtacttttagtggagacggggtttcaccacgttggccaggctggtctctcaagtgatccgccagcctcggcgtcccaaagtgctgggatt

SEQ ID NO: 1636 - DNA, 4001 bp, Homo sapiens
tatttcatttacaagcagaaataatccaactcaataatccaggcagacacattcaaagtaattatctgtgtaaggcgtcctgcaccatcaccttcctaggaaggaggaaaagaagcctagcccagcaaaaaaaaagcaggtggggacccccattgtctgcagcctgtgtgcagcagcctgccaggattaattacacaccagtgctaacacatttatcacctcgccgctgattggaaaaccaatgacttttaataattcatatctgtggctcggcactctgtgcccttgtgcaaagacacagaaactcgcttgtttccataaggaaagcccagtggcagtgccaggaggggtgccttcagcccctcctgccaccccaacctggagacaggccagagcctagccgctcccacctcccctccaccagcagggtctgctcatgtcctgctgaagctaaaatgcagctgctcgggggtgaaagctggcgactgaaccgtcctagccacaggagccctcctcagtttcatactcttccagggtggcctggaaaacaggatttgggagatttgtagggcaagtgcccgcagtgcccccgcacctgcccagacagtgggctcaggcagatacctgccagccaggaccctgccccaccatgcaggagaccctcagcagagtgcaccactcaagtgatcagattgagggtaaagggtctacagggctttgggaagagcctccaatccctgaaggctgcaacctcctctgacaccagctctgagctccagcctcctccccaccaccttccaccctcctgcagctctccctccccacccctgtgccccggggatggctctccctctatcccggttctccatctctgctctcccaggctccacagcccccttccctgccctggctggcctgttgtctcaaagagcatttcccaggagcctcttctcccttcttctcccttctcccccacccccgccactttcctgtctcgccccgcttccctccccttccactgtagccctccttacccttctctggccagtcccccaactgtcctcctttcctcagactcctcacacaatacctcgaggctcttagctggctgcagcctggtcccatcattataaatgccatcccctcattccctgccctcctctaccacataccaggctccagctccttcaagagctccccactaaatctgagacccccagagctcagatgcgtcctaggaattggaatccaagagcctctgtcacccttcgacccaacctctgactcataagaatgatacacaccctgacccctccccacgctgaggaaggtgagtccctggggctgacctgagcctgaccctggaccccctccctctctccttcctgctggcaagattaaagggagggtgggctggcctctctgtgctagcttgcgtgggggacccctgctggaccctaggaagctgccagccccaacgctgccttcatccaggagatgcaattcaaatgtaatcaatttaaacagcatcagccctgacaggggactctggaggtgggggtgggggcacagggagggctataattagcattctcagcatccatgatccccaagtaaggctgccaaggatgagagatggggaagccagtgctccgcagtgcaagcagcccaggctcacgcggcagacaggcagctgccagccctgaccagagcccagccttcctcctcccacctcatctatgtgatgcatgaaaacagactcaccggcttctgaggtgtgatccccgcgctggaaagctctaactctgcgagccccaaggcacccctccccccagctcaggccagctggggtcctcctcccccgcccctggggcccccttctgcagagcggggctccggatctaatctgatctaatcagtcatctctccggctggcaggtccctggcgcagggagaggatgctgttgtggttactgcaggatccagcatctttcccaggcagaggcagctgggcatgctccatcggctcccccggggatttcagggccacgtgactctccctccccaagctgtcacttaggatcaggagtaaatagtccccgaaaaggtttaactccatccacaccagcgacaagctgctaaccatccacgcagcctgcctgcccgggagaggatggggtggctcagcacagcctcctgggccttccaccaccaggagaaggctgccccccaaaggggagcagggccaccgtctgggtaagctgcatttttagagtcccccacaagagactgcagggagccagaaactgcccagggtcttagaatcatgtgtggggcctcacccagccagcctggtgatcacctttcacctctgtggctgtctactccagagaggggcacgtctctaggtgtcaagagggcttggctggggccctggggcctccccatcccccgccccccccccaatatggtgaatttagagaaataacatttggagagggttgggggccactatgagatgccaggatgagtggggtgtgagtgggttgtggagccactgcccccacaccaaccagccaggctcctcccaggccctgggagggaagtctgtgctcctgttccttccgttgcacattcctttacagataagggcttcagttggtaaaaatgatataggtactcagatcacactaagacagacccacttgtattggagtcgagaggcttaattttttaatcaagttgttctaataataaacaaaaaatgcaattatcaggtgagtggggccttgcagaaaccctttctctagctcctgcccaaatcggtcttgataaccctgagcaaggatgctagccaagctacggggtacctgggttctgtattattcaggatcagaggcagaaggaaggacttcagacaatagggtcgtagctctgtttctgcttagacaaagattgctttctgcctcagtttccctttatccacatctctctcagttttcctctatccacggattctctgtgacaatgggcaagtgtaataaaaacactgatttcataaacaggatcagaaagatggaaaaaaccaaaagattcccacctcaacctccaggcaggctcgctggtctcagtcccatctgccccttaaacctggaaactggggactgaaccagatgagcttctggagtcacttctgaatagagaaatatgtcaagaagcaggagctagagaaagggtgtctgcaaggccccactcacctggtgattgcattttttgtttattattagaacaacttgatcaaaaaattaagcctcttgactccaatacaagtgggtctctcttagtgtgatctgagtacatatatcatttttaccaactgaagcccttatctgtaaaggaatgtgcaacggaaggaacaggagcacagacttccctcccagggcctgggaggaacctggctggttggtgtgaaggctgtggctccacaccccactcacacacaccacagcattggaggaagacagggacctagagagctactgaagggactgtctttcccaccccagggcaggccaggctggagccaggaatctggggttagggcagcaggcgcagctcagcagcactcttggggagggggactcttggtcacctcccactgttcccctgcccagctgagatgtcaggccagccctgcattggctataggaaagctgctctgctgaaggggcagacaagttgtggatgagggcccagtgccaggcaggaccgatcaagcccaactcacctgccctggctctccaggacttggcaaggctgccaggtgcaggcagggggagagtctgctttcagtcagccaagatgaggggctcttgggggtctctgaccctgcggagccagtggaggaaaggagtggaggcaagagattacagcatcccagagggaggccggggagggggacagagaccccagcccaagcccccacaatcctcaggcagctg

SEQ ID NO: 1637 - DNA, 4001 bp, Homo sapiens
agaagacctggtctggagcctacgttcccccacccttcccctactgggcctcaatttgcccacctgtgccaagagggcatagaattcagtatctggggatggctgccaggtcctagtgtgtgcccggaccccggctaaagggcaggagaatggtaaaatacccccgagctccctcaacttgaggagttactaaggaatctgcaggggacctcttggcctccatttcccagacttccaccaaggcaggccagggcctccccggattcacgggtctcccgcatcccccacccctaagtgggtgcctgggtctgctcagactgcccgaggcgcagcctctggcgccccctgccggcctcgagagggcttttccgcctgggaccgactccgggactggccagatggggaggatcggctgagcctcccagccacgccgcgcgcccgggcccctccaggatccccctgccccgccaataccccccataccggggccagggtcccatagactcctcacggccctatctccgagccgacccaccctagagacactgtgatgggggcgggagcttgaacccattccaccctcacgtaaatggagatacagctggtgaggaccctgtacccacccacaggcctggcactacgtgggaatctcgaatccgggttctgtccatcggtttaggggggtcctggcgcctagtcccaccccccgtccggagcgcagctcccacttccccgcgactcacctaggaacaggaccagggtctcctccccggtgtctaaggctctaaggctcgggccgagactgccaaagcctcatggggcgcgcggggagagggggacgggagccgcgggacgggctcagtcgactcagcgcaaactggggcgcgggacgtaggggaattacggtagccgcgcgggcgctaccacctggaccggccgggatgtaccaacggcgccgcccggctgggaccggggagaggaggggtcccaggaagggccccgcgccggagccagggaggtggctggaggccgggcggtggcttggggtaatccaggatccgggctcaggggagggggtggggggcgtcactgtccccgaggggccagccctttgcagatctccaaaaagttcaaagtccctggtcattaacttgggcttgaagacgggagctcgcccatcccggaagggggctaggggggaccagggcccgcgacaggaagcctccgcgcgacagaaaagccccgggggaccaggcagagagacccgcaggcctagcccgccccggaatcgccctgagccaggttcgcttccgctctattgtaaaaagctggattctgatctgcggcctccgcggtgccccagaaacagcccgcttttctctgggccccctcttttttttttttctggcccaggtgatatggccggaaaagggtgctgttctgccatttagtggttcccagttcccctctcccagcagcgggagtttagaataactctgggctcaggactgggaagggtgtggatacagggggcccactcgaggaggtggagttcaggtccaccaacctgttccgcactttcaagctttttatacagccttcccccgaccccttcccaggccaaaacctccagactgccccacacaacccttggggctgggcctatactagggcagctcctggctgggccagggatccccacgtcttcacctgctcccccaaaactacttagccaaaacccaggagtccccttgcattgtttctctggccctgcccgtttcttcagctgcagatagccccaccacctctctccggggaccagtcacttccagagatggcccaaacctggccattccctggggcatcctggtctgccgctgctcacccccaaagcattgcccaggagaataggtgattgcctctcccattactcacatcctgcccgtcccttctccatgggggcctcaggtccaccctttcctctccctggtcttcatctcaccacccctccctccacacacgcataccctgactcatccctgccacctcacaggccattgttaagctgcaagggaactctgaagtcctcccatccaacctccactccacactgcaatcccctctacgcttccctttctgtctcttcttgcatatgtctagtgatggggtgctcactacctccacttcggggatagctccagctgctggaaactctttcctgtagtgtgctgaaccccacctccctgtcaaggcctttgggagctgtgcagaaaaattcacctccctttcctcctgagagttctgaggaaatgggaggctctgacagagaggcctggtttgagtcctgatcttgccttgcttggcaagtcattttacctcgccactctgcagggccctctctaggaaacggagatggggtaggccccaccgcagcgggggaggcggccagatgaggtttctgtgccaggcgctaaggcagggcctggcatacagtacgtgctggatcaatggcggctgctggaatcactacctcctccatgataaacaccctcacatgtggtgcccaatgtcccctgtggcccagggccacaagtgtcctcctccatgcccccttgtgacctgggacgccctgactagacctcgaacagtgcccagtggagcccagcaaggagctggggagtccacacactgtcccgtggccacctcacaggagggcagggggaacccacaatatcattagtctgccttgatctcccggcctttctccatctccccaaactcacagctccacctgtgtgcaagaagctgggatggagcctggggaggtctcagatcccagggcaggtacggagggcacacccaaagtctagaggtgactttgttacccccactcccaggacaccttgcacacctacgctgtgctaggctctatgctaagcatgttatatatgggcctcttttaatcctcgctgccgggttattttccagatgaggaacctggggttcagagaagtgtagtgacttccccagggtcgcacagctggaaaaaagtaggtttgatcctggagctcagaggtgtggactgctctacatatcttcatcctggggaggggccatttctctcctggggtctccatgacacacagtccagacccctcatctggacatgcaggtgctcctagtgcagcctgcctccccctcctcccgtccccttctccctgtgccccctggcctcgcttgccccttatagcccccaatgtccccccctgctcactcagctgtcctccatctcagtacctctttaatcctcaggactccagttgcctccaggaagcccatcctggttagccctcctcccagtgggaactccaggggcaggaggtaggggacagatggcaaattcatctcagaagctccagcacccaggagagcctcaaataaaacatcaagggtgggcccagaagccgaagggtccagccctgcctgaaattggtcctttgccagggcagcctggggggaagtttggccagccagggtcacttcccttccttcctcccagcacagctagaatgtcacctccaggagggcatcccctttgttctctggagatctcctgggcctagaactgggcctggcaccgacagatgctcagagctggtctggtaaatgaataaatgaagtcatctccttcaaaacgctagtcacatcctggagagtaagaatagggctcttgatcagacaagcctcacgcaggccaggctctgacgatcatgctgtgtgatgtgggcaagttcctctacctctctgggcctccgtttccttacaagtcatgtggtcataagaataacgctgttctcctgagggtctcaagaagcttcactgagacaagcaggagggcctaacgccccgcctggcatgtaaacatgttcggtcagcaataattgttattattattattattgggtgttttttgagacagagtctcgctctgttgcccaggc

SEQ ID NO: 1638 - DNA, 4001 bp, Homo sapiens
agctgggactacaggcgcctgccaccacgcccagctgattttttgtatttttagtagagacggggtttcaccatgttagccaggatggtcttgatctcctgaccttgtgatccgcccgcctcagcctcccaaagtgctgggattacaggtgtgagccactgcgcccggccgtgtcatggcggatattaaaagtaaacttgaaaatatggatgtgcagggccagacgcggtggctcacgcctgtaatcccagcactttgggaggccgaggcaggcagatcacctgaggttgggagttcaagaccagcccaaccaacatggagaaaccccgtctctactaaaaccacaaaatgagccgggcttgatggcgcatgcctgtaatcccagctactcgggaggctgaggcaggagaatcacttgaacccaggaggcggagcttgtggtgagccatatcgcaccattgcactccagcctgggcaacaaaagtgaaactccatcccaaaaaaaaaaaaaaaagaaaaagaaaaaagaaaagaaaatatggatgtgcaggaggaatttcctggcccttcccgagagctacaaagacaaggttgggaacggttccagaccatccttgccaggggcgtgcaacttgaaggcacaaaatgggacagtctgaagggccttggggcatctttcttgccccactttctatgtcacagaggaggaaacaggtaaccctcctctaacacgagagccacagcagcaaagccaacctgccaccagagcaaccctttggcatatgtttttgtttttgtttgagacggagtcttgctctgttgcccaggctggactgcagtggcacgatttctgctcactgcaagctccgcttcccgggttcacgccattctcctgccttagcctcccgagagctgggactacaggtgcgtgccaccacgcccagctaattttttgtatttttagtagagacggggtttcaccgtgttaaccaggatggtctcgatctcctaaccttgtgatccgcctgcctcggcctcccaaagtgctgggattacaggcgtgagccactgcgcccagcaacccttcggcatatggagtctaggtctttcttctgtcaggagttagatggctgagcagcaagtccccctcctctgccctcaaatcagagctgatggctcaaactgcagggcttggagggcttaactcactgattaatggaagaatgagaccaaatggatccagcctgcaagtggctcttaaaccgtccggactaattcagtgagtgtgagtccttggagccctccaagacctgcaaagcccctcctttcactctgtgtcctcaaacctcctttctagacaaaagagatagaaaacatactcaccggttcctgaacaaaggctgagccagcttcgaggtggagacccatgttttgtcaggactgaattcatgcttgacctctgcggtggtggcaccctgcctggacctccagccacatgccaatgccacaggcctctctaatcagacacacaggtctccgtcctgctttgcccagttgccatctcaacatggaaggcttctccccgactcagccccagtcttaatttctgcagctggacctgtctgcacagaaaaccaaggcgctctcagccctgccaatttgctccccgtccaacacaggtcccctgggcgctgtatatttgaaggcacagacttcgcagccgccgctcacactgcatttccttgttggtggttggttccttcttggattttccattcctgagtgcccatttgcgccctggaatgggctcccacactgctggctgccctggaggtgccgtccctcctttccaggaaagcaacaccacagagaccccggcctctgcaatcccagcagccagcagcagcccctctgctgggctccttggctaccaggaaggccttagtttggtggctttcccctgccaggcagagaggggctggtcacagcgggagatcaagtgagcctcaaaacattagaaaaacccaagccagtctgcagagcaccgcagccgcctcagggccggttaccatagctacccttggcttcccagcccagcacatgtctgcccagctgaactctgctgattcgcaagactttgcttgctcagctcctggcactgcagactggacctgctgcccccaactcggcggctaccgctcttcctggcaaagccttgggaatacttaacttagcaaggtctttctgaaaaggccctgaacatcacgtaggcttccccacttactgcatagatggcccccatatttactttagccactgttcaggctgggcttgtcagccaatctctctctgctaggcccaaccctatgaggtgtgggaagacaagggctgagtcctcgctgccgagaggcagttttatcggcacagcactaggtgggggtttgtttcagttttttttttgtttttcttttaagtagatggtgtctcactatgttgaccaggctgatctcaaactcttggcctcaagtgatcctcctgcctcagccttccaaggtgctgggattacaggcatgagtcattttagttttttaaaacttgaactcttccaggagcaaagccctgtttccttctaatacactcccaaagacagtccagaaagaatgcaacatcccctctttacttacatatgaaccaagacaggaaaattaaactcccacttgagcttcaagtcagtgacaaataaaaattaaaaatactgaaaaaataaactcccactgcactcaatacttcaatggttaaaaacaacaacaacaaaacaggccaggcacagtggctcatgcctgtaatcccagcactttgggaggccgaggcgggtggaacacctgaggtcagtttaagaccagcctggccaatatggtgaaaccccctctctagtaaaaatacaaaagtgagctgggtgtggtggtgcctgcctgtcgtcccagctactggggaagctgaggcaggagaattgcttgaatctgggaggtggaaattgcagtgagccgagattgcaccatcgcactccagcctgggcaaaagagactctgtctcaaaaagaaaaaaaagggcacaacaaaacaaacaaacaaacacatcacaagcatttgctggagtctccacacttcattaaccgcctttcaacattttttttcctcccagtgttttttcactatagtttcttctaagcatttaagtgattacctggaataaaatgacctatctacataaaattacacaactaaattcatgttttcaaaaatatttaatgatacaaaagttcatctgttaactgaaaagagctgaacagaaaccatacatattttgtaaaatacacacacacacagcagaaccccagctgagacacctcacagtgtcagtgattactatgtggtggtgggctggaggatcattttctacatgtgtaagctgcttataaaattttaaaagcaacaagtgggggtttatgaaaaactttcaggaatgggttatctatggtggccgtggagcttgcttcctcaagggctctttgaccacaggaagcttggtagcaacaattttaaggtgaacctgccagaggcaagatgagtaagtagctgtggattcatttagtttctgcatccctccagcatgaccgtgagtagcacagccgtggtgccagcctcctgagtttaccatctcatcagaggctagctacacactaggagttactgaccgtttctacatgccggagactgtgctacatctcttatagacatgacttcacttactcctcacccaggaacactgaaggaaggacaattacccaatcttcaaaacataaaacaggctcaggctaagcatcttcctccaagttacaccactgacaagtggtagagccaggatttgaactcagagctctataatcaaagcctgctgtcttatccatgatcttgccatccaaacccaaaaacaaatgacct

SEQ ID NO: 1639 - DNA, 4001 bp, Homo sapiens
ccccagccgccccttcaggtcaggcaaaagcctcggggctccgcaggcctctggcaggatgtatattggggggagctgaggccaatttgttgccaggagcccccatctgggaaagaggcaaccagccaacaccagagcccaatgccaggcaccatccgtgccagcagattgtatctgacatcacaccgcccccctgcctggtgaccacggcaactggaggccgccccctccccgccccgccccatagcagttctccctgttccctcaccacggccctcctgtgcagaacgagtgtgtgtgtgtctgggtggaggtgcgggaggggagcggggggtggggggtggcattttacatttcctgcagctggcagtgctgagacacatgatggaagacaacacgggccctggtatgacacagacctgggtactgggttcaaatcccagctctcccacttcctagcagtctgtccctgagtgagcctcagtttccccatctgtaaatgagaataaggacaggaccatctcagaaggccggaggaggagtcagtgagtcctggtgcctgcgccagatgctaagttgcgcagttgtcactattgtcatgtaaatgcatgctgggaggggcaaaacctggctccaaaccccggctccatctctcatgagctgtgggccttggccaagtcactggacctctctgaaccttggtgtcttcatctggaaaacggggtgacgatgccttccctgcagagctgccgcaatcagtgcatatggcacagaaagcgggtggcactaagcccagcacatcacaggcagaagcgcccagccagtactattatcctccttcctgccccctttatccctgatttatacttcgccccactcccagctcccaagccctggcactccaggatcaactggccccttcctccttttgtcatccccagggccatggtcacactcgccaagtcccaaagcatctcagacccatgcccaggcctgaagagtggctgagttcaacaggaagggtgccatctgggcactggaccagcaccgtgggagaccacttcccctggctaagcctcagtttcctcatccgtgacataaggctacagctcctgtcacctcagaatggctgctaggaccacagtgcagcaaagggctttggggtactccacccccctgttcttgtagaagtcccccgactccactgttcctgagctgggggcaggccctctgcctcctaaaccagacacactgtggccccacctacacttgaacccagcccagccagccgcgcccgtgccagggctctgtggatagctggtgctgggatagaaagggcagttagagccctggcccctctgcccccgagggtccccaggctctccagcctccctaccttggccgcccgccccttgtccatgcaggcggggttctgacagcgcagtcccttcttttcagcggggctctggtcgtctgcaggggaggagcagagggcatcagtcagcggggcacccaggctcccctgggccccactggcctcccaaccggaggaggggtggggtgatctcctcagtcctcccttcaaaagaggtcagcgtccctttctcttttaaatgccaacttatctgcacgggaatccgtttgcagagcccttttctcctgcagtcctcagggaaattatccagattccacggggagaaaacatctttggaaatacgctgctctctccctctgtccctctagtctgggggacaagtgggggagcgctcagtgaccttttggggccccagacttcccagggggtcccggcagggctgctggggggaaggggctccaagatcccagatccctgagaaccttacgccctgcatcgctccctttagagacagaggagcccccgaaggtctggggcgacccccgttccccaagactcatctttgaccctgaatttggccccctccaagctgcctctcttcctgggggctggagtgcaccgcggtgggggcagagcggcgcaaccagcgagaggcggggggagggaggagaagcggggtgctgccgaggcaggccccgacttgggggccgagtttgggtacgagcggcccgaagcccggtcggcgcccacccccttgcctggagcgggccctccccggaggaggttaggagccggcccggccccccaggaccccgccccgcgtccgccgggtccccgcctgcactcacccatggagcaggccccgtgccgcgcggggggcgggcggcgggcgggggcgccggggacgccggggactgggaggccgcagagccgccgccgccggaccctcgcacgggaggcgggcggggcaggtgggcggggaggagccgcggcggccccgcctcgggggcggggggcggggggacaggagcgcggccgggcctcggcgccgacggtgtcacccctccctccccggctccccggcccctgcgcgctgcggtccggaggctgcctccacctcccggagggcgggcaccggggcggctcaggaagcgcgcacggctctgtcctggagggtgccatccacgcggagggtgcctgtccgcaggaatgcaggccgggagccacgcagagcccccaccccagcccggaatcgctgtctccgaggtcagtttccatggcaacacggaggctgccccgcgcagggtgagggctgtcaccgggagagactcgcctgccacggctcttgctgcatgtcctctgctggttcagttttaaactttattgaagtgcaaacgcggacagagaagtgcacctgtcctgtgagcacagctcaacacattttcaggaaactttcacaaaataacctgtgcccagaccgagctgcagagcgtccccacccagtccccagcccccgccacctccctcgtgccaaccggtccccccaagggcaccgccgccctgacttccaacacatcgattcgtctgcccggtcctgtagtttatgtaaatggcatcaggagatagcaaaccctttgccctacagaaacagcctcgcagaggtggccaagagtctgcgggggctcagtgctcctgagcctgcctctggacccccagcccaccctgcacactggcaccaggaggcattgcgccgacaagacctaggtatagaagatgcagcttccagcagggccgggtccctctcccaaaggctaagggtggacttccctgaccccttcactggaaggcctctcagctggagcctccctgcatggactccttacatgggctgggtccggccctgggactcacaggtgaccagaaactggtgcctgccccaaggactcctggcacagcaaagtagcacggatcccgggtctcctgagctctctggattcattcagcaaacacactaaagatcctctgaggatccccatgagccaagctctaagctgggtgctggggactcactggtgaccctgacaagacttggggagctcacagggggcctggtgggcagggtagccctttggggggcagcacatctgcatgaccctggggagggggctctcgaggaggggctgccacaggcaccccgggggcctccaggctgagagggaagcagctgcccggggccctgggcctcctcagtgcacagcctacgggaactctcaggatcctcaggcccagcccagcctcacccccacactgtgctcatttccctctccgagtctctgctctcagccatccaaggggccagcgatgcctgtcctgcctctaggctggaggtggaggcagccgaggcaagagacggccctgtgaggactgtggcgaggtccctgcctgctgggaggaagctgacttgagggtggagtggggttcggggcttttgtctgccatgactccagcaggccctcctctgccatctgtgtttccacggggacctggagccctcagccagctttgtgggagtttcccatgcgtccagcctgggacttctccagctgagcaggacaacatctgctgt

SEQ ID NO: 1640 - DNA, 4001 bp, Homo sapiens
cccgggccacacagtgagatcctgcctctacaaaaaacaaacaaaattagccgggtgtggtggcgctctcttgtagtcccagctacttgggaggctgaggtgggaagattgctggagcccaggaggttgaggctgcagtgagccatgatcacattgctgcactccagcctgggcgacacagtgagaccccgtctcagaaaaaaatttaaaaactacagagaccactaagctgtcctcagccagggctctacccacaccctcaccctgaatccacagcgcactgctgagagaaacatcaggctttgcagcttctgggagcccaagcttcaggtgtctcctcatgagaatgatctggggaagggccctgccccaccttgtcccctcttcctgggagccccccgtctgcgggctccgcagccctctggccctctgtgaacccagccagcatggcagaggctcccagctccaatcccttccaggcctcctgagatttcctagtgccagctggggcggcagacctgcccatgacccaagccctggtctcaccgcaggtagggggtgacaaggaaggagccgtgctaggtcggaggagttctgggagggtctctgggacccttccagtccaagtctgactctgtgccaccatcttgtttttaaatcaatccaatatacagacagcagatttgataccctgattcgctccttacggaagagtcagtattcaacaaatacggactgagccctatgacgcaccccaccctggatcccttgaaagcctcgagatcagtttccctgctgtgatggtctgggtggccactaccatcactgaggctgctcgactcctccagctgctgccaggggctggtgcccaggcccggctgacctcatctgcttccctcctctcagcagtccccaggctcaggggcactgggggcacagtgaggctcagccccaggatctgaaccaggtggtttccgacttcgtcgagcagatctggttgacgatgaagttctggaagccccccgggagaaccatgagcccaactgagaagctggggtgggcagagctccctggtgcagtttctgctccccgttctgcctcacgtcccacccccaaaccccagagtctccccagctccctccagaggcaggactcccccagcactagggcggaatggccccttcttgaagccagactccagccccttctctcagacccaactgcccctccctcacctgcctgcctgcccaccatgtcctgcctctgtcctgcaggagggacaccagggtccgggggggaatgttcccaggtctcaacccaagggaggagagagcccacccatgggaacagccagctcccaccccctctaacgccaggcagccaaaataacagaggggggccctttggggaatacacgcatgtgaggatggggacagagaaccaggcgtccaccctcacacaagggctggggccagaggcacaaggagaaacagaggcctctggggtaggaggaggctgtgggcagggccagggcagaggaaggaaaggagaggggcggcccagcatagggcccgggacccacaggtgtgtccggagctggccccagacacaaagcgccaagaattggcggggacatctcagccggcggggacacaccccggagtccgaggtccccgtcaccagggtgcagctgcccaggtagggggctcggccgccatgggccgcatccttcccctgggggccgcggggcccatagtcacgggcaccccctccctggcctcccgcacaggactgggcggctgcaggcgagaactgggcacccagccccgttcccgccccgtcccggccccgtacctggctatcaccgtcgcgggcacgacccccggcccaggagggctccgagtcccggaggggcagccccgggcccggcctggaggctgctaggcgtccggagacaccgggtcctgtccccatggcggccggaggaagccgcggtctgcgccgcccgccggacaaagcgcggagccccgcttcctgccattgtgcggccgcgcccgcccccgccgagcgcggggaccccggggagggccgggcccggaacagcccccagccccccaggaaggcggacacctccctcccgcccgggccctcgccacccagccccggggatccccgcctccccgcccgggaacccctacacccccgcctccgcctgcccgggcgaccccccgcctccccgcctctgcccagacccggggactccacacccctacctctgcccggccgggggacccccacagccccgcctccgcccagtccccgggacccccaccttcccacctctgcctggcccggggtacccccacctctgcgcctctgcgcggccccgggcccctctcttctctgactccctcctcaacaccaatgccgggctcagagggctcctcagaacttgctctttctcctggggagctccttgaatgctggaggcagggggcgctggtgacacccccccccaccttggagactgtggagcccctcccctgggtgactcgatccccgcccagccctgggggtgcccactctgctgtggtccccacctcaccctcagcgccaacacgcacggtccctcccagccagaagggtaccttccctcctcccttcctcctggagacccccacccccgcctcggagcctcagcccaggggaccccttcttactcccagcaagggagctcttagaatacaggcaccagaagggggaggccaggatggggcacactcccctcagggtccttggtccggctctccatctagccccagggacacccctctctgctccaacaccagctttgagccccagtcacacacccaccccaacctcacaaccagctctcatctcagcccctcccatcaacctggagacccctgcccgagagcctgagccccagggacaccccctcacaccgactgctcactgcccaggtacggcagaggccgagagccaaaggccggtggcctctggaaagggccgtgggcagaaggcgggctgctctgagaggctatccttggcagcccccaggagctgggtgaggtggaggcatcaggaaaccctggcgacccacatggcacagcagcccaggtccctgcagttctaggccaggtccccaccgccagggggcactcagcaaagcctgagaggacgcaaacgcccagactctggtgctggagtcaccactacacggctgtcaaagcgcttttacactgattcccaggaaggcagggcaggcaccattagccccattcacggcgtgggggataaagtgacataaagagacaaaagtctacaggcaagactgaaactcagactgtggctctgggattctgggatggcctccttgggacactcctcagaacccatgggggtgaggtggccatgctgtctgtcatcagcccacccacccctaattgctcctcctccacctggttccatggggaaagagggtgggaagggggccagggtccgtgagatggctttgggagggcagcagcgttttattagaggctgggagacttccagggctgtctccactcccaaagcccaggtcacccactgtctacaccacaggcagagttgtgtttttgttttttgtttgtttgtttttgagacggaatcttgctctgtcactcacgttggagtgcagtggcatgatcccagctcactacgacctccacctcccaggttcaagtgattcttctgcctcagcctccccagtagctgggattacaggcgcccgccactacacccagctactttttgtattttagtagagatggggtttcgccatgttgaccaggctggtcactaactcctgatctcaagtgatccacccccaccttggcctcccaaagtgctgagattacaggcatgagccaccacacccggccaacaggcagagttttgaaaactaaaacttcccatcttgcttatagtgaaatccc

SEQ ID NO: 1641 - DNA, 4001 bp, Homo sapiens
ggggggtggggggtggcattttacatttcctgcagctggcagtgctgagacacatgatggaagacaacacgggccctggtatgacacagacctgggtactgggttcaaatcccagctctcccacttcctagcagtctgtccctgagtgagcctcagtttccccatctgtaaatgagaataaggacaggaccatctcagaaggccggaggaggagtcagtgagtcctggtgcctgcgccagatgctaagttgcgcagttgtcactattgtcatgtaaatgcatgctgggaggggcaaaacctggctccaaaccccggctccatctctcatgagctgtgggccttggccaagtcactggacctctctgaaccttggtgtcttcatctggaaaacggggtgacgatgccttccctgcagagctgccgcaatcagtgcatatggcacagaaagcgggtggcactaagcccagcacatcacaggcagaagcgcccagccagtactattatcctccttcctgccccctttatccctgatttatacttcgccccactcccagctcccaagccctggcactccaggatcaactggccccttcctccttttgtcatccccagggccatggtcacactcgccaagtcccaaagcatctcagacccatgcccaggcctgaagagtggctgagttcaacaggaagggtgccatctgggcactggaccagcaccgtgggagaccacttcccctggctaagcctcagtttcctcatccgtgacataaggctacagctcctgtcacctcagaatggctgctaggaccacagtgcagcaaagggctttggggtactccacccccctgttcttgtagaagtcccccgactccactgttcctgagctgggggcaggccctctgcctcctaaaccagacacactgtggccccacctacacttgaacccagcccagccagccgcgcccgtgccagggctctgtggatagctggtgctgggatagaaagggcagttagagccctggcccctctgcccccgagggtccccaggctctccagcctccctaccttggccgcccgccccttgtccatgcaggcggggttctgacagcgcagtcccttcttttcagcggggctctggtcgtctgcaggggaggagcagagggcatcagtcagcggggcacccaggctcccctgggccccactggcctcccaaccggaggaggggtggggtgatctcctcagtcctcccttcaaaagaggtcagcgtccctttctcttttaaatgccaacttatctgcacgggaatccgtttgcagagcccttttctcctgcagtcctcagggaaattatccagattccacggggagaaaacatctttggaaatacgctgctctctccctctgtccctctagtctgggggacaagtgggggagcgctcagtgaccttttggggccccagacttcccagggggtcccggcagggctgctggggggaaggggctccaagatcccagatccctgagaaccttacgccctgcatcgctccctttagagacagaggagcccccgaaggtctggggcgacccccgttccccaagactcatctttgaccctgaatttggccccctccaagctgcctctcttcctgggggctggagtgcaccgcggtgggggcagagcggcgcaaccagcgagaggcggggggagggaggagaagcggggtgctgccgaggcaggccccgacttgggggccgagtttgggtacgagcggcccgaagcccggtcggcgcccacccccttgcctggagcgggccctccccggaggaggttaggagccggcccggccccccaggaccccgccccgcgtccgccgggtccccgcctgcactcacccatggagcaggccccgtgccgcgcggggggcgggcggcgggcgggggcgccggggacgccggggactgggaggccgcagagccgccgccgccggaccctcgcacgggaggcgggcggggcaggtgggcggggaggagccgcggcggccccgcctcgggggcggggggcggggggacaggagcgcggccgggcctcggcgccgacggtgtcacccctccctccccggctccccggcccctgcgcgctgcggtccggaggctgcctccacctcccggagggcgggcaccggggcggctcaggaagcgcgcacggctctgtcctggagggtgccatccacgcggagggtgcctgtccgcaggaatgcaggccgggagccacgcagagcccccaccccagcccggaatcgctgtctccgaggtcagtttccatggcaacacggaggctgccccgcgcagggtgagggctgtcaccgggagagactcgcctgccacggctcttgctgcatgtcctctgctggttcagttttaaactttattgaagtgcaaacgcggacagagaagtgcacctgtcctgtgagcacagctcaacacattttcaggaaactttcacaaaataacctgtgcccagaccgagctgcagagcgtccccacccagtccccagcccccgccacctccctcgtgccaaccggtccccccaagggcaccgccgccctgacttccaacacatcgattcgtctgcccggtcctgtagtttatgtaaatggcatcaggagatagcaaaccctttgccctacagaaacagcctcgcagaggtggccaagagtctgcgggggctcagtgctcctgagcctgcctctggacccccagcccaccctgcacactggcaccaggaggcattgcgccgacaagacctaggtatagaagatgcagcttccagcagggccgggtccctctcccaaaggctaagggtggacttccctgaccccttcactggaaggcctctcagctggagcctccctgcatggactccttacatgggctgggtccggccctgggactcacaggtgaccagaaactggtgcctgccccaaggactcctggcacagcaaagtagcacggatcccgggtctcctgagctctctggattcattcagcaaacacactaaagatcctctgaggatccccatgagccaagctctaagctgggtgctggggactcactggtgaccctgacaagacttggggagctcacagggggcctggtgggcagggtagccctttggggggcagcacatctgcatgaccctggggagggggctctcgaggaggggctgccacaggcaccccgggggcctccaggctgagagggaagcagctgcccggggccctgggcctcctcagtgcacagcctacgggaactctcaggatcctcaggcccagcccagcctcacccccacactgtgctcatttccctctccgagtctctgctctcagccatccaaggggccagcgatgcctgtcctgcctctaggctggaggtggaggcagccgaggcaagagacggccctgtgaggactgtggcgaggtccctgcctgctgggaggaagctgacttgagggtggagtggggttcggggcttttgtctgccatgactccagcaggccctcctctgccatctgtgtttccacggggacctggagccctcagccagctttgtgggagtttcccatgcgtccagcctgggacttctccagctgagcaggacaacatctgctgtccgcccagaaagtttccaggcccctgcgttctcaaaactctgagcctggggttggattctcacaccctttgccccagggcctctggattgtagccccgtattctgaaggctccgggccatgtcttctgccactgggtctgcctcaccagctccctagatccccccatgactgctcaggtcacagccaccatcgggcctgactatcctgtggcctctatgccacttgggttctggaattccttgtcctttgcctggtacttcctggcactggggtctacctgcctgaactctccggcctctgacccctggtctcagcaggctccaggtg

SEQ ID NO: 1642 - DNA, 4001 bp, Homo sapiens
gggtgggggactgttccttaggggcaagagtgcagagcagaaaggagcccccagcccctgtaccagggcagtggggtgggcctgggcaggctcctgcattcccacctcctctccacagcagggagctgaaacagctcaggggcaggcccaagaagtcctggcccccaactccctggggagggagcccctccccagcccagccccagctccaggcttgtgagtcagggccggcttgttgaaactgatacccagaaaccagatgcggaggctgatgaataatggagtctccaaggcaggacccccgcacccggctgttctccctcagtatcacctcccccagccccagaaaagcagatgggaaaccagggatcccccaggcatccctgccccacaacgagctggggccccagcctggtctgggtgggagagggacttccctgtccaggaaaggacgcaggtctggggccagctccaggctctgccgacagcagacgggcctggaaccaggagtccgagctctctggctggagggatgtccttgccaggaattcccaccaaggctaagctcccctgggagcctgctagtcccaaggccccacccaacaccttagaaatccaggggtggagactgcatgcatgggcaggccagccagggcggggtggctttgccaggcggctctctacgctccacccggcctacccaccctcctttcccctaggcccaggcctcacccatcaccccttgggttctgaggctcacctggagtcagagcctgacctaaggccctgccctgtgccgggcagatggcagggacacagaaaacctctccccaggctaagcccaccgcacgggccctggaagccaggaaggccccttcctccccagggagcggtcctggctagtatgcccaaggctgggacccagtgctagagaaagagggaggggctgcagtctgtgaacatcccctcctgcccagcctctgcagttcccagccccagaccccagcgtgtgtcttcggagcacctggactagcaagcccttccccggtgcaacttagaagcctccttggtagggagcgggggaaagagggcacctgcctgggcttcagaagacctggtctggagcctacgttcccccacccttcccctactgggcctcaatttgcccacctgtgccaagagggcatagaattcagtatctggggatggctgccaggtcctagtgtgtgcccggaccccggctaaagggcaggagaatggtaaaatacccccgagctccctcaacttgaggagttactaaggaatctgcaggggacctcttggcctccatttcccagacttccaccaaggcaggccagggcctccccggattcacgggtctcccgcatcccccacccctaagtgggtgcctgggtctgctcagactgcccgaggcgcagcctctggcgccccctgccggcctcgagagggcttttccgcctgggaccgactccgggactggccagatggggaggatcggctgagcctcccagccacgccgcgcgcccgggcccctccaggatccccctgccccgccaataccccccataccggggccagggtcccatagactcctcacggccctatctccgagccgacccaccctagagacactgtgatgggggcgggagcttgaacccattccaccctcacgtaaatggagatacagctggtgaggaccctgtacccacccacaggcctggcactacgtgggaatctcgaatccgggttctgtccatcggtttaggggggtcctggcgcctagtcccaccccccgtccggagcgcagctcccacttccccgcgactcacctaggaacaggaccagggtctcctccccggtgtctaaggctctaaggctcgggccgagactgccaaagcctcatggggcgcgcggggagagggggacgggagccgcgggacgggctcagtcgactcagcgcaaactggggcgcgggacgtaggggaattacggtagccgcgcgggcgctaccacctggaccggccgggatgtaccaacggcgccgcccggctgggaccggggagaggaggggtcccaggaagggccccgcgccggagccagggaggtggctggaggccgggcggtggcttggggtaatccaggatccgggctcaggggagggggtggggggcgtcactgtccccgaggggccagccctttgcagatctccaaaaagttcaaagtccctggtcattaacttgggcttgaagacgggagctcgcccatcccggaagggggctaggggggaccagggcccgcgacaggaagcctccgcgcgacagaaaagccccgggggaccaggcagagagacccgcaggcctagcccgccccggaatcgccctgagccaggttcgcttccgctctattgtaaaaagctggattctgatctgcggcctccgcggtgccccagaaacagcccgcttttctctgggccccctcttttttttttttctggcccaggtgatatggccggaaaagggtgctgttctgccatttagtggttcccagttcccctctcccagcagcgggagtttagaataactctgggctcaggactgggaagggtgtggatacagggggcccactcgaggaggtggagttcaggtccaccaacctgttccgcactttcaagctttttatacagccttcccccgaccccttcccaggccaaaacctccagactgccccacacaacccttggggctgggcctatactagggcagctcctggctgggccagggatccccacgtcttcacctgctcccccaaaactacttagccaaaacccaggagtccccttgcattgtttctctggccctgcccgtttcttcagctgcagatagccccaccacctctctccggggaccagtcacttccagagatggcccaaacctggccattccctggggcatcctggtctgccgctgctcacccccaaagcattgcccaggagaataggtgattgcctctcccattactcacatcctgcccgtcccttctccatgggggcctcaggtccaccctttcctctccctggtcttcatctcaccacccctccctccacacacgcataccctgactcatccctgccacctcacaggccattgttaagctgcaagggaactctgaagtcctcccatccaacctccactccacactgcaatcccctctacgcttccctttctgtctcttcttgcatatgtctagtgatggggtgctcactacctccacttcggggatagctccagctgctggaaactctttcctgtagtgtgctgaaccccacctccctgtcaaggcctttgggagctgtgcagaaaaattcacctccctttcctcctgagagttctgaggaaatgggaggctctgacagagaggcctggtttgagtcctgatcttgccttgcttggcaagtcattttacctcgccactctgcagggccctctctaggaaacggagatggggtaggccccaccgcagcgggggaggcggccagatgaggtttctgtgccaggcgctaaggcagggcctggcatacagtacgtgctggatcaatggcggctgctggaatcactacctcctccatgataaacaccctcacatgtggtgcccaatgtcccctgtggcccagggccacaagtgtcctcctccatgcccccttgtgacctgggacgccctgactagacctcgaacagtgcccagtggagcccagcaaggagctggggagtccacacactgtcccgtggccacctcacaggagggcagggggaacccacaatatcattagtctgccttgatctcccggcctttctccatctccccaaactcacagctccacctgtgtgcaagaagctgggatggagcctggggaggtctcagatcccagggcaggtacggagggcacacccaaagtctagaggtgactttgttacccccactcc

SEQ ID NO: 1643 - DNA, 4001 bp, Homo sapiens
tgagatttcctagtgccagctggggcggcagacctgcccatgacccaagccctggtctcaccgcaggtagggggtgacaaggaaggagccgtgctaggtcggaggagttctgggagggtctctgggacccttccagtccaagtctgactctgtgccaccatcttgtttttaaatcaatccaatatacagacagcagatttgataccctgattcgctccttacggaagagtcagtattcaacaaatacggactgagccctatgacgcaccccaccctggatcccttgaaagcctcgagatcagtttccctgctgtgatggtctgggtggccactaccatcactgaggctgctcgactcctccagctgctgccaggggctggtgcccaggcccggctgacctcatctgcttccctcctctcagcagtccccaggctcaggggcactgggggcacagtgaggctcagccccaggatctgaaccaggtggtttccgacttcgtcgagcagatctggttgacgatgaagttctggaagccccccgggagaaccatgagcccaactgagaagctggggtgggcagagctccctggtgcagtttctgctccccgttctgcctcacgtcccacccccaaaccccagagtctccccagctccctccagaggcaggactcccccagcactagggcggaatggccccttcttgaagccagactccagccccttctctcagacccaactgcccctccctcacctgcctgcctgcccaccatgtcctgcctctgtcctgcaggagggacaccagggtccgggggggaatgttcccaggtctcaacccaagggaggagagagcccacccatgggaacagccagctcccaccccctctaacgccaggcagccaaaataacagaggggggccctttggggaatacacgcatgtgaggatggggacagagaaccaggcgtccaccctcacacaagggctggggccagaggcacaaggagaaacagaggcctctggggtaggaggaggctgtgggcagggccagggcagaggaaggaaaggagaggggcggcccagcatagggcccgggacccacaggtgtgtccggagctggccccagacacaaagcgccaagaattggcggggacatctcagccggcggggacacaccccggagtccgaggtccccgtcaccagggtgcagctgcccaggtagggggctcggccgccatgggccgcatccttcccctgggggccgcggggcccatagtcacgggcaccccctccctggcctcccgcacaggactgggcggctgcaggcgagaactgggcacccagccccgttcccgccccgtcccggccccgtacctggctatcaccgtcgcgggcacgacccccggcccaggagggctccgagtcccggaggggcagccccgggcccggcctggaggctgctaggcgtccggagacaccgggtcctgtccccatggcggccggaggaagccgcggtctgcgccgcccgccggacaaagcgcggagccccgcttcctgccattgtgcggccgcgcccgcccccgccgagcgcggggaccccggggagggccgggcccggaacagcccccagccccccaggaaggcggacacctccctcccgcccgggccctcgccacccagccccggggatccccgcctccccgcccgggaacccctacacccccgcctccgcctgcccgggcgaccccccgcctccccgcctctgcccagacccggggactccacacccctacctctgcccggccgggggacccccacagccccgcctccgcccagtccccgggacccccaccttcccacctctgcctggcccggggtacccccacctctgcgcctctgcgcggccccgggcccctctcttctctgactccctcctcaacaccaatgccgggctcagagggctcctcagaacttgctctttctcctggggagctccttgaatgctggaggcagggggcgctggtgacacccccccccaccttggagactgtggagcccctcccctgggtgactcgatccccgcccagccctgggggtgcccactctgctgtggtccccacctcaccctcagcgccaacacgcacggtccctcccagccagaagggtaccttccctcctcccttcctcctggagacccccacccccgcctcggagcctcagcccaggggaccccttcttactcccagcaagggagctcttagaatacaggcaccagaagggggaggccaggatggggcacactcccctcagggtccttggtccggctctccatctagccccagggacacccctctctgctccaacaccagctttgagccccagtcacacacccaccccaacctcacaaccagctctcatctcagcccctcccatcaacctggagacccctgcccgagagcctgagccccagggacaccccctcacaccgactgctcactgcccaggtacggcagaggccgagagccaaaggccggtggcctctggaaagggccgtgggcagaaggcgggctgctctgagaggctatccttggcagcccccaggagctgggtgaggtggaggcatcaggaaaccctggcgacccacatggcacagcagcccaggtccctgcagttctaggccaggtccccaccgccagggggcactcagcaaagcctgagaggacgcaaacgcccagactctggtgctggagtcaccactacacggctgtcaaagcgcttttacactgattcccaggaaggcagggcaggcaccattagccccattcacggcgtgggggataaagtgacataaagagacaaaagtctacaggcaagactgaaactcagactgtggctctgggattctgggatggcctccttgggacactcctcagaacccatgggggtgaggtggccatgctgtctgtcatcagcccacccacccctaattgctcctcctccacctggttccatggggaaagagggtgggaagggggccagggtccgtgagatggctttgggagggcagcagcgttttattagaggctgggagacttccagggctgtctccactcccaaagcccaggtcacccactgtctacaccacaggcagagttgtgtttttgttttttgtttgtttgtttttgagacggaatcttgctctgtcactcacgttggagtgcagtggcatgatcccagctcactacgacctccacctcccaggttcaagtgattcttctgcctcagcctccccagtagctgggattacaggcgcccgccactacacccagctactttttgtattttagtagagatggggtttcgccatgttgaccaggctggtcactaactcctgatctcaagtgatccacccccaccttggcctcccaaagtgctgagattacaggcatgagccaccacacccggccaacaggcagagttttgaaaactaaaacttcccatcttgcttatagtgaaatcccaccatggccgggctcccgcctccctcccagctggtccgcacagggtccacctgccggtcttccttctctccctacagctcgccaagctcagggccttctcctctgtattttctgtctggaattccacgcaccctatcttgaaacagctgacaccgggccccaacttaaatgttacctctaagacgtccttttccctcatcttaaaataaaccacccttaccctcccactctcaattcctttaagttaaattatttccttcttagtgtttattactacctgtaattcatttctttgttcacttttttatcatcattcttccctaccagactgtcctctccagaagccagcgccttggccgtctgcatctcactgtgtcctcggcacttagaacagtcctggtgcacagtaggtgcgcttggtggggatgagatcagtgaacagatgaaggcagaagggccttcatgccacagaaggacatggggac

SEQ ID NO: 1644 - DNA, 4001 bp, Homo sapiens
tgggtactcagcaagggtgggggactgttccttaggggcaagagtgcagagcagaaaggagcccccagcccctgtaccagggcagtggggtgggcctgggcaggctcctgcattcccacctcctctccacagcagggagctgaaacagctcaggggcaggcccaagaagtcctggcccccaactccctggggagggagcccctccccagcccagccccagctccaggcttgtgagtcagggccggcttgttgaaactgatacccagaaaccagatgcggaggctgatgaataatggagtctccaaggcaggacccccgcacccggctgttctccctcagtatcacctcccccagccccagaaaagcagatgggaaaccagggatcccccaggcatccctgccccacaacgagctggggccccagcctggtctgggtgggagagggacttccctgtccaggaaaggacgcaggtctggggccagctccaggctctgccgacagcagacgggcctggaaccaggagtccgagctctctggctggagggatgtccttgccaggaattcccaccaaggctaagctcccctgggagcctgctagtcccaaggccccacccaacaccttagaaatccaggggtggagactgcatgcatgggcaggccagccagggcggggtggctttgccaggcggctctctacgctccacccggcctacccaccctcctttcccctaggcccaggcctcacccatcaccccttgggttctgaggctcacctggagtcagagcctgacctaaggccctgccctgtgccgggcagatggcagggacacagaaaacctctccccaggctaagcccaccgcacgggccctggaagccaggaaggccccttcctccccagggagcggtcctggctagtatgcccaaggctgggacccagtgctagagaaagagggaggggctgcagtctgtgaacatcccctcctgcccagcctctgcagttcccagccccagaccccagcgtgtgtcttcggagcacctggactagcaagcccttccccggtgcaacttagaagcctccttggtagggagcgggggaaagagggcacctgcctgggcttcagaagacctggtctggagcctacgttcccccacccttcccctactgggcctcaatttgcccacctgtgccaagagggcatagaattcagtatctggggatggctgccaggtcctagtgtgtgcccggaccccggctaaagggcaggagaatggtaaaatacccccgagctccctcaacttgaggagttactaaggaatctgcaggggacctcttggcctccatttcccagacttccaccaaggcaggccagggcctccccggattcacgggtctcccgcatcccccacccctaagtgggtgcctgggtctgctcagactgcccgaggcgcagcctctggcgccccctgccggcctcgagagggcttttccgcctgggaccgactccgggactggccagatggggaggatcggctgagcctcccagccacgccgcgcgcccgggcccctccaggatccccctgccccgccaataccccccataccggggccagggtcccatagactcctcacggccctatctccgagccgacccaccctagagacactgtgatgggggcgggagcttgaacccattccaccctcacgtaaatggagatacagctggtgaggaccctgtacccacccacaggcctggcactacgtgggaatctcgaatccgggttctgtccatcggtttaggggggtcctggcgcctagtcccaccccccgtccggagcgcagctcccacttccccgcgactcacctaggaacaggaccagggtctcctccccggtgtctaaggctctaaggctcgggccgagactgccaaagcctcatggggcgcgcggggagagggggacgggagccgcgggacgggctcagtcgactcagcgcaaactggggcgcgggacgtaggggaattacggtagccgcgcgggcgctaccacctggaccggccgggatgtaccaacggcgccgcccggctgggaccggggagaggaggggtcccaggaagggccccgcgccggagccagggaggtggctggaggccgggcggtggcttggggtaatccaggatccgggctcaggggagggggtggggggcgtcactgtccccgaggggccagccctttgcagatctccaaaaagttcaaagtccctggtcattaacttgggcttgaagacgggagctcgcccatcccggaagggggctaggggggaccagggcccgcgacaggaagcctccgcgcgacagaaaagccccgggggaccaggcagagagacccgcaggcctagcccgccccggaatcgccctgagccaggttcgcttccgctctattgtaaaaagctggattctgatctgcggcctccgcggtgccccagaaacagcccgcttttctctgggccccctcttttttttttttctggcccaggtgatatggccggaaaagggtgctgttctgccatttagtggttcccagttcccctctcccagcagcgggagtttagaataactctgggctcaggactgggaagggtgtggatacagggggcccactcgaggaggtggagttcaggtccaccaacctgttccgcactttcaagctttttatacagccttcccccgaccccttcccaggccaaaacctccagactgccccacacaacccttggggctgggcctatactagggcagctcctggctgggccagggatccccacgtcttcacctgctcccccaaaactacttagccaaaacccaggagtccccttgcattgtttctctggccctgcccgtttcttcagctgcagatagccccaccacctctctccggggaccagtcacttccagagatggcccaaacctggccattccctggggcatcctggtctgccgctgctcacccccaaagcattgcccaggagaataggtgattgcctctcccattactcacatcctgcccgtcccttctccatgggggcctcaggtccaccctttcctctccctggtcttcatctcaccacccctccctccacacacgcataccctgactcatccctgccacctcacaggccattgttaagctgcaagggaactctgaagtcctcccatccaacctccactccacactgcaatcccctctacgcttccctttctgtctcttcttgcatatgtctagtgatggggtgctcactacctccacttcggggatagctccagctgctggaaactctttcctgtagtgtgctgaaccccacctccctgtcaaggcctttgggagctgtgcagaaaaattcacctccctttcctcctgagagttctgaggaaatgggaggctctgacagagaggcctggtttgagtcctgatcttgccttgcttggcaagtcattttacctcgccactctgcagggccctctctaggaaacggagatggggtaggccccaccgcagcgggggaggcggccagatgaggtttctgtgccaggcgctaaggcagggcctggcatacagtacgtgctggatcaatggcggctgctggaatcactacctcctccatgataaacaccctcacatgtggtgcccaatgtcccctgtggcccagggccacaagtgtcctcctccatgcccccttgtgacctgggacgccctgactagacctcgaacagtgcccagtggagcccagcaaggagctggggagtccacacactgtcccgtggccacctcacaggagggcagggggaacccacaatatcattagtctgccttgatctcccggcctttctccatctccccaaactcacagctccacctgtgtgcaagaagctgggatggagcctggggaggtctcagatcccagggcaggtacggagggcacacccaaagtctagaggtgacttt

SEQ ID NO: 1645 - DNA, 4001 bp, Homo sapiens
tccagaatccatgctcctaacaatgatgctgcccatggctttggttgtgatacacccagggatgggtttgcagtttctagtgtgacattttctggggtgcattccagctcaataagtgtccttgtccaaacacctacaattatatgcacctcaacaaacacacctaactcataagtgacagcctgacttacaaagtgaatctctgccttcaaaagactcatgcttatacatgtgacagcgtgccccatgtctactgcctctccatcacagactttctccattcatttgtttgaaatccaaagacaaacgccgggcctacctaaagccacaatcagcccagattagattagaaaggtcacctgtgttcctttctcttccattaggaaagatgtactgcttctcaacaaagtatttgctcatcctgccctccttgagtaagcaaaaaccataccccattacattagcaaagctcagtaaaactacgtaaaactcttgttggatctctgcaatgttactttagctgtgcttttagaggaatgttttcagtaagggcaattcgagaatctattttctttttaagtcacatttatctttatgaaaggtaaaatagcttgcctgtgttgcttttgaggaatctcagtgggaaaacagacaattatttaaatatgatggttgatctaattaattctatccattttgcttcttcaagtaaaataagctgctgagtccctcacccaagccattttctttctcttttttctttctttctttctttttttttttttttttttcagtttctgagactatctggtgagccaggaattcaaattacacaaacacacacacagagagggagagagagagaaaaatccattctgatttggccatttaggttttcagtgaatatggattcttttaaatttattattattatttttatatccagcccaaaaacgtcagaatatggattctaccttctagcacggacccttttgcggatatgccaacttcatcacaaatacatgcccttgacaggtatgtactcatttctacctggaattgggacagtgatgtttactgcggcaagccccacagcaaggtgtctgtggtgtcacccggttccccggatcagcatccaaaatgcaatccccatgtacttcaggttcttataatcaaagcccctagtgaacctcttcaaagctaccatccttgagcaagattattcaggggacttcccaggagcagaggcaatgtcgccgggacccaggccatgggaaagtgaagttgcttatcactggcctccaccctgactgccagaccctgggcgacgccagcctggcggggggacccggggatgcagcggattccacaggaggctgcatggggttccttcaggagctcccgggggcgccgctgccccagtgggggaccggagggtcgctgacccctctccgggagggcagggccccgggccaggtttggggaagctccgaggatgctgacctcaactttgttctttaaaaatagctccgaggccgcggcgctcacgtgagcggcgccgcttcccctctaccggcccggggctcccggccgctcgtcgccccccgggtcgcggaggggaagggcggggggccccggcccgggagagcgccgccggagggcgtggggggcgcggcgaggaaggggccccggccgggagggaggccgcgctcaccttcttcaccgacagcgagatgttctccaggatccggtccttcacctcccccggctccatggcgctgccaccgtcgccgccaccgccaccgccaccgccgccgccgccccgccgccgcttcccgcgccgggggccgggggccgccgccaaccgctgccgccggccgtacgggggctccgtcgtgccggccgcggggcccggcgcccgccgcccggccctcgcctcgcctgggccctcgctccaccgcggcccggaggctccggagcgcggccggcggggaaggaggccgcgggctgtgcgccgcggcggcggcggcggcaggaactgatgtcaggcggggcggcgccagggcccgcctgcgcctggggactccggggacccggagacccgcacagacccttggccgcggccctccccagagaccccgagacccgcccccagccctcctcaagtcacagactctccccggcaccccagagacaccctcagaccccagggacgccagagacctcgaccccgcctgccggggacctcggggctcctcagagaccctccccaagccctcctcagcccacagattccttcagggaccccagagacaccctcagaccccagggactccggacaccccgaccccgcctgccagagacccccacagaccctgggaccccggccctcctcggagaccctcccccaggcctcgtcagcccacagattccctcagggaccccagagacaccctcagaccccaggaactccggagaccccgaccccgcctgcccgggacaccggccctcctcagagaccctggagaccctccccctcagccctcaggccatagactcccccctgggacctcagagacaccctcagactccagggactccggagaccccaaccccacctgctggggacccccacagaccctgggcccccagccctcctcagagacccccaaagaccccgaggcactggccctccccagagaccctgagaccctccccacagccctcctcagcccacaggatccccccacaaaaccccagagactcccacaggccccaaggactctggagactccgaccccacaggccagagacccccacagaccctgagaccccggccctcctcagagactcgagacacccacagaccctgggccccctcccgccggccctctttagtccacagacccctccttggagaccccagtgcaccccactaactctggccagggaccccaagaccctcttagcctgcaagccccacttatcttcctccccttccttagcccagccaccccctcaatgtgcagacccaggccccctggctttcgcagcctggaggacccagcacccccaccgggtcagcctagactccagtccccagccctagaccctccctgggccccctggccctccacagcctcccctcctcagtgcctcaccctcaaggcccagtcctacatttgaggtccctggtgttcctccccacccccaaaacacaccctcctcaccttcagccccaatgccccattcccactccttatccttatccctcttcttcagccccacgtatcccaagggcctcaactccctcagcccctgaaacccaccgtaacaactctcttcccacacaccctcctcaaatccaccatctcataaagcccctgcacttagaggtgtcagtctcctacctggctctcttccctccttaagttcccaaataaatatatcctgacacatagattagtccctcctttttattctcagacaccccagttctcaactctggttccctggtcttccctcttctctgctcaggccaccccatccctgaagtccccttagcatctgaaatactgattcattgcttatctcagagggaccccacaagcctccaaaggtcgctccccagccccttagtttcccaaggagagacccaaaatagtggtactttgttttttgttttttttgttttgttttgttttgtttgtttttgagacagagccttgctctgttccccaggctggaatgcggtggtgcgatctctgctcactgcaacttccgcttcccagctttaagcgattctcctgcctcagcctcccgagtagctgggactacaagtgcatgtgacaccatgcccagctaatttttttttttttttttgaggcggagtctcgctctgtcacccaggccggagtgcggtggcacaatttcagctcactgcaacttcctcctcccaggttcaagtgattctcctgtctcagcctccccagtagctggga

SEQ ID NO: 1646 - DNA, 4001 bp, Homo sapiens
atgtgctgagaggggaggggactccacatccacgccacatgtagtcaatcctggcacacacagtcctctacaaatgcaggctttgatcaccaggttggaagtcagaaaagggacgggtgtgaacctggggctggagacctctgtgatccacaggctcagggccaagtgggaaggtgtcctcctccttctaggagctggcgagagctacctgcagagctgctgtgccctggccaagcttagctgcccctgagcaggcccaggaatgtgaacagacagacgcatggctttcccggccttctgcctctgggtggggcctcctgtacccacacccagcgtgggaactgatgccgggttggcacccatgaaaaataggccacagaccaggaagggccacacagctggccctgcagcgcagctcagcctcggggccccggggaggactcagcttggagccgtagtagagccagctcacagcactgggtgcagagcccaggtacagggccgcggagcactggctctaggactggcccagagctcctcccccagccccatttcccgaggttcagcaggttgttgcctctgtggctaccatgtcctggcaagggaggaccactacggccacccaccacacctcataggaccccccagggtcacactgcatgtcctgggcctggacagagggagtggtgtctgagatgcagccacagggaccccacccctaacccagcccggctccctctccctgcccactcctctgaggcagcgtggtttccgaaaccagtacttgtctgcagggagccctgaaactctggaggtcaggagagggtatggcacgagcttcctgcctggcgggggcatgttggcaaaggggtctgcacggccatgccagctgctggacccaggagtgcagggcaggcgtcctctcccgcagatgctcctagggcctgcacatagcggagcccacccatccaggctgcctgacgggggtgcagtgggggttcctgtctgccctgaagcccaggttcctggtcctgttccctcatcccagcaccagacacatctgaaaggggctgggatctaccctgtgaagacccttagtcccacaggggctggggggggggtgggcatgggggtggtcttctgctcctttgacggagaggtggcctagtgtgtgcttgggagacacctccttgctgcatggccttggcaagctgggaggaggccggcgcgtgcacagagggattgctgtggaccaggcggccatacccagcggcaacttcctgcgggacacccagggagaaaggccggtgtaggtgaccggctggctcgctgctcatctgaggccccttactctcaagtgacactacctgccggcacgaccccaagccccactgcagcgacagagacacgtgcgctggtcccctgcgggaggaggtcccgggaggccccgcccgcggcccgccccgcccagctctctcccgactgactcagtcctgcgtcgcggtttcgctctccgctcagactttcggccggatgagctccccagggcggggcagtcagcgtcggctcctcacctaccggggtctgaacgccccgggggcgaggggaagaccctgagctgcacggacacacggcacacacgcgcgggcagagccacgctcccagaccacagccaccgtgcacgccgcgctcaccgtgcccgggatgtagtggaagagcttgttggcggcggcgtccccgcttcgagcagcctcggggcccggcaggccggccgacatccgcgcgctgtcctctctggggacaaggcaaggggtctcgtggcttggccccggagcgggtgggggagccctgcgcccaggtggccgcacccacgccccgctcacctgtttcccttcagcgagggctttctggagaaggaggcccggagcctcctgggggcctgagggacacagtggctgttccccatggccagagtcgtacaggtcggcaagtctgggtccctgtccacagcctcctgcccccgcctcccgcgggcaggcggggctccgggacgtcccgcccggcaccagggcctgggcgagggtggagcctttctggaagaggcctggcccctacctgagccgtgcaggtctctgccctgggccctccactcgagaggccagccttggggcaagcacccctctggcccagacgaggcctccagtgtgcagaggtaccccacctgcttgtgctccggcttggtgaacccggggcgaccttccaggccccccgggacaacgtgcccacacatcctgtttccatctaaactctggccggcccgagtcaccggtgactgcagggagggctgaggcaggagttccagcacaggagacggcggccaaagccaccgcagcctcccctcctgcctgggccccctcgccacagacccgagtcagggtccccaaggcttaaggggactcagggaggccacatgccccctagacggccaagacagtcagcgcactcgggggcaaggctgtcctccccagccctaaccccagagcccacgatgtggcggggacctcggcctcagtacccagcccaggcaaacgccacccacactgggacgctggtccacaggaactgcacggcccccaccctccctggacgcacagctctgccttgcagctcccagatgcctgcgcatctcagggcacccccccacacccctcaccctggaccccagacaggacccaaagttgcgcagctgccccacatgccagagagagatgctcagcctgaggaaccccagaaatgtgtttattaagttggactcgtattgctgtgtggggtcccagtgcacgcgtgtgcacccactacaagatccaggaaagatggcacacggcagacgacgacaggaaggacaactgctccccacccttcccgggaccccgccatgtgcaaaattcgagctggggtctgcagctgcttggagagacccagggcctcttgctccacagcctgcaaggtctgagcaggcaacggccctggggcggtgaggcccccgcctggtcactccccgcgccccccatgcaggcagtggaggggaggacacgcaggaggaccagacgctaaaggtgtaaacgggcagccgtggcactcctcacccctcaataaataagataaataactaaataaataaacaactaaataaagacatgaaggaatggatgcagagacgtgaacggatggcgcaggacgtccctggtgggggccacggtccccttaaggcatgtgggaggctgcaggcctctggtggtaggtgggtcagaggctggtggaggacacggacagcgtcggggaggatggcggcgggaaattgagcagctccagcaccgccacacccacactgctgcgccgggtgaacatgcaggatgcggccacccacttgttggtcctcgggttgtacttctcgatggagttgaggctggagctaccgtcgttaccccccacggcgtacaaccatccgtccatggccaccaggtcatgcgtgctcctggggggaaggcggggtgagcccctggctgcaggaagggatgcggggggaggggctgcaccacaaaaaggggtggtggcgggacatgctcgctgaggttgggagaactcccttctcacagcacatccccactgcggacccgcgcccccctcccggcagcacatccccactgcggacccgcgcccccctcccggcagcacatccccactgcggacccgcgcccccctcccggcagcacatccccactgcggacccgcgcccccctcccggcagcacatccccactgcggacccgcgcccccctcccggcagcacatccccactgcggacccgcgcccccctccccgcagcacatccccactgcggacgcgcggacccctcccacagccccactgcggacccgcgcccccctccccgcagccccactgcggacctgcggatattcatgggcgccacgctttcccagg

SEQ ID NO: 1647 - DNA, 4001 bp, Homo sapiens
ggtacacaggacagtcttccaggctatactgactgcctttggacagtcacagaggcagggaatggaatgacttctaaccactgtaggggcaattctgatttctccacattagtacacgttattgatcccaagacttagggaaaaaagggagatgggtctggattcaattatcatagctcaggtcttgacacagtgtagactgtggttttcatggttaactacacagccaaagctatccaaagacatacaggggttcttaactccatttctctcccttctgatacaaatggaggggtgggcaggaagtgggtagaaaatgggttccttgccttttttaaatggggtgggggtggggaacagagagcatactggttagggacactggcttcaacgaaaataactgccactcacacacccgaggtcacaggggcctgacggcggggtgcgtgttttctgtgattcagggcggatgcgccacggacaggacctgtgcacgctcctgccacagacaggaaaggggaggctggctgggttaaggtggggggacaggaaggggtggcgaataggctaaactgtttcagcagaaatagaaaagaaatcctatatgcaggaggccaggttagggtgggaggcagcaagggacacttagaacttctggggcatcttgggaggggcttatcgttgttagaaaggtatttgcaaacaaaaaaacactgagtaagcggccaactcaacttctaattctcactctggtcttctcattaaagggtggcctttctctgcagatgagatgggggtagagaggagaccactgaacttgcctttggaacaaaacgggggtggagtaagctaggcgagcccttggggagtgacaaagtgggggctatgagaaaacggagagttagaggcaagaggcacccacctccttctcagagatgtagagctggtcccctttcagcaccacatagcggtttttccaaatctccctgaaaatccctttcccgcagaatttccggacccagccgaccttctcgggcggtgcaggctgctggtttccatcctgaggtccctgccccaggacaagatgagaagcgggcggttaggagattccagccggcgcttcctctccgtccgtctctcacgaccgcctcggcggcccagtctcctccgaaggctgcggccggggggcggggggccgccccaggttcgctcccacttcggaaaggttttcactccgaggaactccccccgctcccctcccccgctcccgaataaacaaccggggctgcaagtggcaggggcgccggccgggcgcggagaggctcccaggttccctccaggccctgcgcccccgccgccccgtcctcgccgcgcggggactaacggcgtttctctggttttctctcccattgtctcctcgccacggcggagcgcgaggcaaacgctcgcccggcgcccgggggcgggggaggtgcgggtcgtggggaaactcagccaagttgaagccccccgaggcgagtaaacaaacaaaagcccccgcgggcgcctggcggggccgaggccgaggggaccgggccgccggggcgggggcgcggccgggccgtgggtctcccaggccgccgcggcgccgacggagcgggggtcgtcagagcgcggaggcggcggcggccgcagggcgggcaagcgcactcacccgcttggcggaattgttcttcttcatcattcccagcgggcgcgggcgcggggcggcgagccgaggggcggccccgcgtcggggcctcggcggcaccgcgggggctccttccccgcgggagggcgtcggagctgccccggcgccgccgctcctccctcgcgccctcccgctcccggactctccccttctttgtagctccggtttcactcaaggccggcctccctcgcattcgcactcgcacacacacgcacgcccgctccccgccccttggcgccctccatcccggcgcccacgcggcccgggtccccgagcgcacccccgccacccgcccgcccggcccagcgcggccgctcccccggcccggtgcgctgtgggcggcccagtccgcaccccgcagctccatccgcgggccgctgacgttgcgagttcagaataaagggcgaatcgcggagccgcagctcgggcgctccccccgcccccccgcctttgtttctgactcacggagggggaagaaggcggcttcgaagcggctggagaccgctccccagggggcagggaccctcgctccggcggcggctcgggcgacacgcggagcccgagagacccggccgccggccgccccggggcccagtgggcgggcgcggtggataatggagagacgtgcggattcgtgaagactggagatcgccagcctctacagcatcgccttacccgaccaaaaacaaaaacgagagcgggaaccgggagggcgcgccacccacaacccgcatcaggaattcacgctcctaggtgctagggtggcctgggcaggtcagatgctgggggaaagttttatgctccggaggggatcgacgtgttgggggatggggtgggacagaagttgctattaatacacgtttcttccagcgtacaatgcctcaggccttattgtagcttcaggagaataatcctaaggatgaggcggattttatgatctccatctcacagggagaaaacggagactcagaatagctgagggatttgcagacacagtgtcgatgctggcttttcagacacagtgtcaatgctggcaggaatagaactctgtctccaaaccattatcctttctaccaagtggctttcaatataagttccaggtgaggcttaaacttcctgccacctgggtatcttttcccgctatactgataggtaaaaaccccaccctctctacagcgctggagcccagtggagggaagggctgaacgcccagagaatgccctgactagagaagcctctgctgatccctcctacagcagatctgcctcagagcctccaggacacatcttagtaacttcatgtctttttaatatatatacgtgtgatggaaaaggggagtgagaaaccccgcgcttgggtactggtttcatcaccactctgggctttggtcaagtcactgaatttctttaggcccgcgtccctccacgtattaagtggtgagggatgaactgccatttttatcaacaaggaaagctaggggaagatatgagatgacctctgagagtcctttgaagatatgtgttgtcttccagggctaattttgaaatcataataagctaataaacacattgcctggcatatggcaagcatgcagtaaccacaaaatgaataaaaatccctggcactgaggagcagggaaaaggaaaaatcatttttccagagatgtctcaagataaaagtgttggctagatttgtggtttgaatagtggaggctcttttgactttttctggtgtctgtcaaatgaaggaggggctccctctcttttccagttccacctttcctcctaatccaatgatattcctctcaacttctttccattcaccataccaattaattccacgattttagactgacacagaactttatcctttcaaaatgctcttatatgtcatttctttacacttttaatgccaccttgtaaggtatatagagtattaatatttccatttggaaaatgaggaaacagggcatgccagataaactgacttgcccaagtttatacatcaagttactggctaaatggattagaatccaggcttcctgactgcagtctcctcttcagattttgtaaccccctcccatgggcatgagtgtgcacacaccacgttccccaaaccatcttgtcccctttccaccgtctctattttctaaccccctgtttaaagagcgatgaaaaaataatgagcaaatccagggtgtcttcatatgtgaggatgcaaaatgtccaaatgtactggtgagcaaatagcctgcacgattttttgagggctt

SEQ ID NO: 1648 - DNA, 4001 bp, Homo sapiens
acgctatctgtgtcacacacacaaagtatgatggccacagcagggtcttcttacacccacaatgtcatatcccaccatttccacactctcagtctgtctctcacacacacatacacgctgcctgtcaccttcccccatccacacaaagggtaagtcatgtgcctccaagaatctgtatacccccatctgtctcagggactcagagtcacctaccctatctgtgtcatacacctataggatcctccccctctccaccggtctcggtaacacaggctgccacctccaccttcacacatgcatgaacagcccatcatcccttcccatttatctcatgcacacatcaggcagtcaccttgcctcccacatacatatgcactgtctatcacgcatgtcatctgtatcacacacagggcccctttcctcaaaactcacttcttcctctgctccggaggctccaaccgggctgccagcccaaaatcccccaccttcagttccatgttctcagtgatgaaaaaatttcctagatggggcaagagaggtgtgtcagattctttccttcctccctccctccctccctccccaacctcccatcctccaggctcaggagtctcacccaacttgaggtcccggtgcaagatgccgcgctggtgcaagtacttgaggccagaaaggatctgccgcaggtagtagcgcacttctggctccaacagggtgtgccgggccttccagatgtgggccagggactgcagagagccactgcctcagcccctggtgagccctccctccccctccccctccatctgtgctccctgaggaagaaacagggccccagctttgggtcttaagactgtcttctcggctgggtgtagtggctcacgcctgtaatcccagcactttgggaggccaaggcaggtgtatcacaaggtcaggagtttgagaccagcctgaccaacagggtgaaaccctgtctctactaaaaatacaaaaattagccgggcgtggtggtgcatgcctgtaatcccagctactcaggaggctgaggcaggagaattgcttgaacccgggaggcagagattgcagtgagccgagatcgcgccactgcactccagcctgggcaacagagcaagactccatctcaaaaaaaaaaaaaaaaaaaaaaaagactgtcttctctccctcactctcatccctgcgggaatcaccatctttcacctttcggctgcagagctccaagaaaatgtagatgttgtcagcgtcctcaaagtggtgcgaaaaacgcacgatgtggcggtgctgcaggtctcggtgcagctcaatctcatttaggatctgcgatgagggcgcggagtcgtcatccttccatggttcccatgccaccgtccccaccccacccctcgcccgctgagcctggacccaccttctcgcgctgatgcggcttggcgacgcggctctgcgggatgactttgacagcgtaggcgctgccagtctctgtgtcagtggcctcgtagcagcgggcgaagcccccctgtgaagagggggcatcaggctggttgttccaggggggccgagtctggcccgcgggcgtccccgcgttgggggtcaagtgcccacgccctgctcggcgccagaaaagaggccggccgggacccccacctccaccatcaccaccccgcggacgtccctcggcccaccttgcccaacaagcggcctttgaggtaggtgcggccgctgcgcgggtccgtgatgaggcgcccggggtctgacgtcggtagcccggccagcatctccagctcaggtccgcgcaaggcactcggaggcggcccgggcccggccgggggagcgggcgcggcggccgcacgctggaaggggcgcggagacaggaaaccggcggcaggctccatgcggccggcgcgtcgcagcgcggtcccggcttctcggttccgcccggccccggccgcgcgtggcgctgcctggatttgctacgctgcgctggcgcccaggggagcccagcgttttatcaatgaacgcctgccccctccccggcgtctggtcaccgagagtcccgcccccttcctagcagcgagtcgaggagaggccactcccattcccggccttacatcacccagaagctcctcccccacccaacgcactgccagaccccgcctcctcgccgcgccccggggcgcagcccggcagctagtcaccatgcaggtgcaaccaggccgcaggggccagctgatccctgtccgcctctcacccctccttggccactgcgagtcccgctcgtgggggcctctttctttccccatccttcgggatgtgtgctgaagtccgagtggggcccgggcatctgggggcgtctccccagcaactagatagatcagcgttccagccagcagcggagaggcaggggcggcgctcgcttttgcccgggcatgttacccgacactcccctttcagtgtgccggaccgcgtgtgtccctcgccctcgcccggggcccggcccagtgctgccctctttagggcctggaaggaaggcacagtctcgcgcctggcttgcctggcccgagggctgccttgccaggtttaggagtcaagcagagtctggaatttcaaggcttttaccatgctccaggccacatcttccgctacccacttctacactcttgaggggcaaatttcgggttcctccggggtccgcaattcccttcctctgaaaatacccccgggcctgggtcagcagccagaggccagaaagtgaatgggaattggattttcttttttctttctttctttcttttttttttttttgagacagagtttcgctcttgttgcctaggctggagtgcaatggcgcgatcttggctcatcgcaaactctgcctcccaggttcaagcgattctcctgcctcagcctcccgagcagctgggattacaggcatgcgccatcacacccggctaattttgtatttttttttttttaagtagagacggggtttctccatgttggtcagactggtctggaactcccaacctcaggtgatctacccgcttcggcgtcccaaagtgctgggattacaggcgtgagccaccttgcctggctgggaattgcattttctcaaatgctagacacgggcacttgggcagctagtctctggaccacgtggacccctagacccctgcgcaatgcccacccttcccagggccagagacagaggcccaggaccacaggcctcctggccttgtctctcacctctctgccctccctctgtgccagccaatcaattaccatgccattcctcaaagatttattgagagcatctgctaagtgctggacactatctcgaataaaactaatcaagcttgcagccctcatttagtttacattctgcttgatggaaacagacaataggcaagcagataaacaaggtaattgcaggctgtgaaaagtgctatgaaggaagaataaacagaagagcaaatgaagagcctactttagaaagagtagccaggaaagtcaacaaatatttgctgagtacccaatttgtgccaattttacctcccaaatagctctgatatctatccccttggctccatcttcccctcacaccctggcctgggccacagtctctcttgtcaggatgattgccacagctccttgctgctctcctggcctttggtctcatgcccatttcatcccctccatatgctattagagggatcccacccaatccctcatcagactcacgagggcaaacttctccaaccttgtccttcatgaccactgaagggagacccacgatagcctcagatgtggagaaatactagtagccaaaattactgagggggagttggggatagggatgggcaggaagaccctaagtgcctgctcaagagtctggtctttatccttataggtcagcagtcttccagaggggagatggtggtggggctagaaaggacaaatccccagggtaaatggatctgaggcatttagagagt

SEQ ID NO: 1649 - DNA, 4001 bp, Homo sapiens
gcctgtaatcccagctacttgggaggctgacgcacgagaattgcttgaacccaggagacagaggttgcagtgagccaaggtcatgctactgcactccagcctgggggacacagtgaaacactgtctcaaaaaaaaattaaataaataaaataaaataaatggtggttcccattcctgacccaaagaacccgggatccttctggtgatacagtttcaggttctccaggagggtaagctgaaggaggagaatgccatggaaagtaccgccacttctgcttggctttgctgggactgtccgcagtctatgcccttctcgggacagccctggagatggcccatgccagggagggctggggaggagggaagcacccactcaggacagtggggcacacactgcaatccaatctgccttgaggaagtagaaagagcgctagactggagcccagctgacctcggaccaaccacctctgtctggaccaccctggacagtcacttcacctgtctgggcctcagtttcctcaagtataaactgcagagagggccaggtgtggtggctcacgcctgtaatcccaacactttgggagaccaaggtgggctgatcacctgaggtcaagagttcaagaccagcctggccaacatggtgaaaccccatctccaccaaaaatacaaaaattagctgggcatggtggcacatgtctgtgatcccacctacctgggaggctgaggtacaggagtcgcttgaaccggccgggcgcgatggctcacgcctgtaatccaaacattttgggaggctgaggccagcggatcaagaggtcagaagttcaagaccagcctggccagcatggtgaaaccccatctcaactaaaaatacaaaaattagctaggcatggtggcacgtgcctgtaatcccagctacttgggaggccgaggcaggagaaacacttgaacctgggaggtggaggttgcagtgagctgagattgtgccactgcattccagcctgggcgacagagcgagactccatctcaaaaaaaaaaaaaagaattgcttttacctgggaggcagaggttgcagtaagccgagatcgcatactgcgttccagcctgggcgacagagcaagactctgtctcaaaaataaataaataactaaataaataatacattaagtaaaataaaaaaaataaactgcagagaggaagaccaccctggcaggggctaagcagaccacaggggacatggatgaaagcacaaacttatccacaaagtgagccacaccttctacccccattcctcccctgtccccctcaagacccctcattcccatggtcatgaggcctcctggctctggaaccagacacctgggtgggtggggtaaatcctggttccaaggcccacaagttgtatgatcttgggcaagtgaatgaactctggagcctcagtttgcccagctggaaaacggggataatagaaggaaacacttaccagggtagcaatcatgcctaactgatgcctggcccatagtgagcactgggcagaatagccattgtcggttattattatgaaaactattattatttgagcctttctgtgctgaatgggactcagctgtcaccctttccttcccgaagcaggaaccgcagccccaagaggggaagtgatttgttcaagtcaccagcgattaagtggacaaggagccggaacccagactccctctccagcccaggcctcccattcaggtcgttcccagggaggcagcccgacaccagccctcccgcccggatccgcgctcccgcccccggccttcgctccctcaccctccggcttggcgtcgcccttcgcttcggccagcagcagccagcccagcagggccagtagcagcaggggccgcatggccgaggtatgggggacgatcggccgacccggcggcgctcgcagggctggaaacttcgcgacggggccgcaggtcccgctgccacgcactgggcccgccccgggggcggcaccaccccgcccctccacgccctcccccgcgcctgcctagtggggaagggtttttctgcagatatgcccaagtccgggcctctccttattagggcagctccctccgcctctctgtgcagctcccggggcttccgtcaggccctgccgtctccctcccttctctggggggttcactccgaccagaaagagggcggtgagaggagagagaggccacgatttctagaccccaggttctgggccaaggctccatggcatcgatagccacgagcccctgtttgctcgcctgaaaagtggggcttatgatagcgtctgttcattgggtcttgcacgggttaatggcgttacctgtagcgcacttagagcagccccaggtcaagccccaaggaagtcagttttcatgatttcattagtccttcccaaaacccaaggggtgagggtgggcacggatgcgttcagagacacggacacccctacgtggcccacccaggcactggaaatgcaggaagcccgtctccactctccccaaaaggcaatcacttgatctccctttgtgtccctgggaggcaaacctctgagccaaggaaagtcttgcttctgaggtttttttgttttttgttttttttttttcatttttttgagacaaggttgctttcagttgcccaggctggagtgcagtggcgtgatcaccgcttgctgcagcctcgacctcccgggctcaagcgatcctcccatctcagcctcccaagtaggtgggatcacaggcctgagccaccatccctggctaatttttctaccttttttttgagacagagtttcactcttgttgcccaggctggagtgcaacggcgagatctggggtcacggcaacctccgcctcccgggttcaagcaattctcctgcctcagcctcccgagtagctgggattacaggcatgtgccaccatgcccagctaattttgtatttttagtagaggtggggtttctccatgttggtcaggctggtcttgaactcccaccctcagatgatccacccgccttggcctcccaaagtgctgggattacaggctgagccaccacaccctagagagattaattgttaaatgagtaaacgaatcgatgaaagtttttagggcctcttcacagatacccaaagcccaacaaacaactcaacggtctctagagtaagggctcctggaccagatgtcagacaggggcagccacctctgaacaaaaatccttccttccttggaagaaacctcagacagaggccgggcacggtggctcacacctgtaatcccagcactttgggaggctgaggcgagcggatcacaaggtcaggagttcaagaccagcttgaccaacatggtgaaactctgtctctactaaaatacaaaaattagccaggcgtggtggcgcgcgcctgtaatcccagctactcaggaggctgaggcagtagaatcacttgaacccaggagactgagtttgcagtgagccaagattgaaccactgcactccagcctaggcgacagagcgaaactctgtctcaaaaaaaaaaaaaaagaaaaaaaagaccttagacagggacccaggagccttctcccagctgattaggctccagaggagtgggtggcaggtgtaaccctaggctggcagggggttccctgcagggggcaaaggggtgggagagaaggaatgtcacgaatgtcaatggacgacaaagagcaggctatgcgtctgtgctgggaaaagatattaataaatcaacagcattcagatgagctgggtgcggtggttcatgcctgtaatcccagtactttgggaggccaagacagccagattgcttgagcccaggaattcaagaccagcctgggcaacatggtgaaaccccttctttactaaaaaaacaaaaattagctgggcatggtggcatgtgcctgtagtcccagctattcaggaggctgactggggaggatcacttgagcccgggaggtggaggttgcagt

SEQ ID NO: 1650 - DNA, 4001 bp, Homo sapiens
aagcctccagcccaggccagccaagatactcatcttggcctgccgctcataagccttgtccactgtgcgcgtgaatggaaggaaatgaatgtgcccccaaatttctgtgggttcttccaaactgatgggcccccaagtgactgcctcaagctatgactggcagtcccagtcccctcaaactgatgctgccttcatgtcccttgtgcactttctactggtgtgccactgtcactctaagattcctacaggggacctgttcagatttccattgcccacttcatggggctctcatttctagacccttactgacctagagccccaaatcttttatccaacttcctccccaccattatttctatccctcctgagcagagctgagtttgagtaggtagctcccactagggcaagggtcattccaaacaggtggacttttttcggggatctaaaatggtagtttctggtgactctctgggcatctagaccatgattggcattatagagactacctgtgggatggataaaaagggctagaattttctaggatccctacctcacttgtggggtggggcaagaaagagcacatggaaggaaacattctcaaatggttcataaggagcctctgggaccctaagcaaactcccatttcaacccccagcactcctgtggtgctcaaactaaggggctggacccctgctgggcgatacaccgcaaagggagccccgggagatgaaacacttagacccattcagtgcctaggaatctctccctgagccttatggaacccgcgcaaatgatgttttcccattcccctgatctccagtccccgatcggaagggagagccggcggccaccagggaccccggcactggagtgaacgcccccaaatcgatcgctggccagtgtggctttgggctgtctcgctggtgccaccgaggccctctttgggctccagctctcaggacagccttgccgccccgagctccccaaagccgcagagcgccggcaggtgcgcggtggaggcgcgccgcggagcgctgctgccgccctcagcccgcattcgggaagccggcgggctgccggccgggaagccctcggcgggaggcagcggctccagtgagcctgcgatcgcgcgcacgccgcgctccagcccgcgaaagtggccgagcccacgcggggactcgcccgccgcggccaagccgggtcttctggggccgggaccccaaagaggcgggcgcgggagaagccgccacgggtgtgcgcgcctgtggggagagggcggagggcgctgccgactccgagcgcccggcccagccgccgcttacccagctcggcgacgtcggtctgtccttccgtccccgctcggtctacctcggccgccgccggctgctgagggcggcgcgaggcccctctccctgcccgcagctcggaatcagggagacgaccaaatccacatggagtccaaattcattaaaatccacgtcaagccaccagacacttatctgtattcctgaagtcgctcctcggtctccgctccgcgcgcccctcagtcctccgtcgccccgcagcagcccggctgggcgctgtcgccggctctcagggggcacccggaggcgccgagggggcgtgtgggggcggccggcggtgtctctcctgaggaagaagcagagccccggctgtcttcagatttttccagcgcgactttccgggctcctctgacatcagcaatcccggcgcttccttcccttcttgctctccggttcgttcacagtcccatttcctccgggagcctggctttccagatctatttcgaggtttgctccgctggctgcggcgctcgcacgccctaccgctcccaagctctcggggtctctctccggatcgctcgccctctcggctgaaaaattcccagcaactgccctccgccgccctcccgctccagtctggcgcggatgccgctcctcccggcagctctggctcccgcggtggcggcggcggcggcggcggcggcggcggcggaggagccctgagcgccggcctccctatttcaccatgcagctcattatcatagaggccgcgcgcgttaaccccctccccgccggccgcgtccgcccgggctggggccgcgcccgctgctggcaccgcccgccaccgccagcaccctgccccctcccccgcccgcgcggacttcctcctccgcaagctgtcaacaaaggagaagcaggtttggcatccggaggccgctcggctgcctgtcctgcgcccagctcagcccggacccatcggccaccttaagtagccaagggggcaaggaaaatgctgccagggcccgggaattcgagtcgggccttgcgagcccagctggcttggcccccgggggaatagaaggtctagcgttggggttaggggggagctcagaacacaggaagagtgggtgagggcagtagggacagggaatcccccccattcgcatcacctgtcaccgcacacatcctgcacacctccctcttcatctgtaatttgagtgaggggtgagtggggaggaacggggcttgtctggtagggttgagactagagtcttggaatttgtgggagcaaatttcctcttcttgtaaattaaaaaaagaaaaaggccaacaagctgtcaaataaggcttgaagttgttgttattattattattgcaatgagaagatgaaccttgctctgaattgaatctcaaacttccagccctgatagggatcctgggcatctggtaagtcccgacttgcatgggggcattggggacgggagaagagctttctatatccaattcagagaatctttctggcagggtaatcagaggggtggcaataagataacttattttaataacctaaggtgagaggtttcgggattctggatgacaatgtctcggtgccctcaaggccactgattcctcgccacacagtctcagtaactccgcagcctctagacacggctttccggaagcggcctgcaagctggaccccagcgagttcgcaggatctgcgtagtccctgctcgcgattagagcgcacacgagtttactcctgtccaagtattctgataagcttcctctactgccctctcgtggccacagtcctcagtggtataaatctaaaaaacaacaaaaatcactgcgaatacctaaaagcaattgcaccaaattcttagagcagtagcggcagaagaaacgaagggagggaaggatgaagaaagggagccggagaaaagagagagagagaggaagaagaaaaggaaatctagactaaccagtcatctcgaacaatcgcacattcaacacaggactgggggatctaggctttactccaacatctgcagaaatcagcgaattcttcaaaagttcttcattgtaattagctgaaatttgtgttcctgtaactttcactggctactgctagttttgtcctgtgggaccacaaagaatctgtctaagctgtgttgcctgatccatacctgttctttccttcaaacttctttagcattcattgttggtaacacaccaataaattatcatatttaccctgtgttattatttatttatttttataagtagatcttgtctccccatgcagacagactagtcgatcgttttatctctgggtagactgaatctaaaccacaatttattaaaaaagatgatttgaagaagatgctagaagattttggaacacttcctccatttgttcatggagtttggccagctacacctaagaccagccgtggtaggattggagatatctaattgataaagctccaagctgaaaattagggccctctggttctaaatcaagtggtgtctgactctggaagaggtcacctctcttccctatgcctcaatttaatcacaccttgggaagattatgatacaattgaaataattttctcatatgccaccctccactcctgtggtccagaaataaatcttagaatgaagagcaaggaagcataaaatgaaacagac

SEQ ID NO: 1651 - DNA, 4001 bp, Homo sapiens
gaggttaggtgagctgtctgagcaacaggcagactatagatttaaacctatgtcttctgggtttgtttaggctgatatggttcttaaaggcaaatacagtctaagattggagggaagtggatttttggatcctggtcttgaagggaagctactataaattgcttcctaaggcctcactacctctgaaatcaccaattgctttgatgaatccaagcttcatcattctcaaggcacccactgtcctgggtccctacatcaatgaggcttgtgtgtttttgtatgtaaaggcttattccttatgcagagtctcactagtctgtcaaccaagaccagctttttgggcatataatgcctgggaaggggtggatttagaagcctccaaacaaactcctcagtcctaaaataatctcaccctccttactcagttgtctcagttcctgaaccttcactgggctcatccctttgagtctttaagactttacagttttaaagagttccatgatcaaagacaaaaccactgggagggaaagcatgaatcatgagaatattgaattagactgctctccaagaacacagtgcaaacaaattcacctgaggcaggaagggtctctgaaagacaaacttcatcagttttgctaaggatcaaccctacaatagcatagcccaccagatagatggggaagccgaggttcagaaagattcaagtgcctactcaagggcagacccaaggatctgatctcaggtgttctgtcccctgctcagagttccaagctgtgttgctatgaggtccctattctagcttatgtagcttttgttctcttctgtgcagactgtgagtggctgtctaatgccttttagagaattatttatgctttgggaaagccctgctctgcctcccaggcttgtcactctagcatatgaacaatctatatccaactattggggttagcttttggtccctgcatctgcttctatatgtttatgcaggcagtctctcttaatccattacttaatgaaagggaaaagactggagctaagctgaatggtaaagaaggatttcatcccataggatctagcactcaacagaaactttcctgtttcctggaaaatgcagattcagaacagggatgaatttttggtctggattagagatctagaggagacatgttcttcaattatgattgagaattaggaacatcccacaccccgggaacactccactccctttctttagagccatctgatcccagcgagtccgacaggcactagatgctgtcacccactgcccactctttgctgtggggccctggggaagatcatttagctgacctaagcctcaatttctctcctttgtagataagactaatatcatttgtcttattttacgacaccgcagtaatttatcaggcatgcaaactttcaaaggttaaaattgatgtacaaatgaaagctggtgtaatactcgaggcaagcaggggaaagaatggacggtggtcacgccaagaggggtgaagttggagcttccaggttaggcagggcacaccagagttccaggagccaggtatgggggaagtgtggcgtccccagacaggggcacgatgtgctgggaagggtgttggggccgggctggggtgcgtgtcggggctccagctgcagtagcagatgctttgcggcggaagcggggagtcacgggttgacctggggagggagggacccacatatgagcataggtgggtgaaggggacccgggttcacctttcagcgcctctttcatcgcgacgcgttcctctttgctgaactgagaagggattcgcgacgccctttgatgctccccgctcctcgggcccatcgatctggagacggtagggaaaactaggagcagcatagccaccagggccagcacgcaaacgcaccgctgagccatgcttctctcgagctcctgctgtcaggctaccggggtagttctgacctaaacgcccagactagcgtttcttggccctagctctgctcttattccggcaaacagccttagccacaccccatatccagatctgaccaatcatcgcttcgctaggacagcggaacaaccaattgacagaatgaccccgcccaggatccttaaggcctttcgagggttgtgggttttcgtgctgaggccagcagttcctgcagagcagaggtgaggtcgggctccaggctagagtcatgtctggtccgcacttgatctctcacccataaatcctttcctgtatgacaacaaatcaaataaaggaggaaaagcaaaataaaatgcacgaagcttatcagaccatactctgctgctcgttttttccgaagcttagaacctgactacaattccctagatcctggggcgggggagctctctaggttcccagcttgatttcatctgaaattggaacaaattgctctgtttatagatactgctttgaaataccagctcagagggttggctcctgtttagaaatttcattgaaagtgcttttaatattaatgttaacactacatttttgcaactctagacaagtacagtaagactgaaggatttttagaaagattactataaaatatttaagagaattttgatgtataaataattttgatgtattccacaagtgaaattttatggttattcagagtagaggatcattctggaaaaaagaaaacctgtcttatgtcacagaaatataaaatcagatttcctgaagccagaataaatcgttcctttcagatttcttgatgcaattttatctggcatcactctcaaattttagaattctcaagaaaaattcagtaagtgctatacaaccagtaaggccatattgctacctgtgaccaaagctacaggttcacagtcctggtgtttgcatttcatttaagatttgcttaaaaaaaaaaattcagccatgtagttacttttcttttcttttctttttttttctctctcggtgcccaggctggagtgcaatggggcgatctcggctcaccgcaacctccgcctcccagtttcaagcaattctctggcctcagcctcccaagtagctgggattacaggcatgcaccaccatgcctggctaattttgtatttttagtagagatggggtttctccatgttggtcaggctggtctcgaactcccgacctcaggtgatctgcccacctcgacctcccaaagtgctgggattacaggcgtgagccaccacaccctgcctagttactttttaatagcaactttaaaacagtatcatgaaatacttcacatattataaagatataaaaaataacataatgaacatttctggattcaccacctagtttaagatttagaatgttaaaaatagagttgaaatttaaacatgaacattgacataatttttagtaaaaagtagcttaatctctacctaactttaaaatttttttaaaagagactttttattttatatatttattattttttaaaattattattatttttgtagagatagggtttcactattttgtccaggctgctcttgaactcctggactcaagcaaccctcccatttaagcctcccaaagtgctagtattacaggaatgagccaccacacccagcacaatttttatgattgtaaaattcatgtatatttatgcccttgtgaaatatttggaacattaagtataaagaaaaaaatcacatgctatcccaatatccagagacgttcactcatcatattttgatgttatccaatcttttttctctgcacacaaatacccacaaatgaaggatgtccctgttttaaaatgaaacagatgcatatactgcatccaaagttctatgttctgctttttttcctttaacattatgtcataaacacttcctggtccttaaatattctttaaattatcttatcacataatatttgataattaagagtacgtacaacgtgtatgtaaagtaaataataacatgaacacccgtgatttggagtttagacctaactggt

SEQ ID NO: 1652 - DNA, 4001 bp, Homo sapiens
ggagaatcacttgaacccggcaggtggagactacagtgagccgagatcgagccactgcactccagcctgggcaacagagctagacactgcctaaaaaaaaaaaataataataataataataataataatctggttccttctcatccttcaagttccagctgaaatgccatctcagaatgggcgccccaagcatcctatctagtggtatcattacctgttcattatcttttttttttttcttttttagaggcagggtcttgctctgtcacctaggctggagtgcaatggggctgttataactcaccgaagcctcaaacttccaggctcaaatgatcctcctgcctcagcctcccaaagcacggggattacaggcatgagtcactgttgacacataataatggccttactatcttaccagcctatgtgatgatgttgttggcgtctctacgcattgaatgcaagctccaaaaagacaagaggccttgtctgcctcatggtatccccagctgacactcaaatatttgatgagtcatgagtgaagacaaatcattaattatgcgtaggaaaggtaaagtgctgaacccaggaggaatggactgggaacagatgagagtcctgatgaagccaaagaacagggaagtggggatagagagggctagagaaggagaggctgtggtcagggcaccgaactcctggaagcgtttcaacactgatgtgctggggtggtgggatcatgggcaaaactctcgagtcatataaattatataaaagtgaaggccgggcgcggtggctcacgcctgtaatcctggtactttgggaggccgaggtgggtggatcacgaggtcaggagttccagaccagcctggccaacatggtgaaacctcgtctctactagtacagatacaaaaaattagccgggtgtggtagtgtgcacctgtaatcccagctacttgggaggctgaggcaggggaatcctttgaacccgggagacggaggttgcaatgagccaagatcgcgccactgctccagcctgggcgacaggacgagactccgtctcaaaaaataaaaataaaaataaataaaataaaagtcgagacaggaaaaatgtttcttttcatggtaacacatttagtcctggcaatctcccagtgaagaagatattctcataatagctaacaaatctttctatgtgtcaggtcctgtcctaggcgccttaggtgtatttactcatttaattctcaaaacgaccctatgagaaaggtactattgctgtcacttgactgacaagaagccgacgagggagagggggcttacgtcttgctcacatagtggtgggccgcgacttaaaccctgatctgtagccgggcgcgggagcacgagcctgtagtcccggctacttgggaagctgcggcaggaagatcgcttgagcccaggaggtcgagtctgcagtgatcacgccactgcactccagcctgggcgacaacgcaaggccctatctcaaagataataaaaaaataaaaaaccctgctctaatttgcaaaggctctatctttcctcccaaccacctgaaattttagtgaaaacggggcttcctgtaggaaggagtagctagctatcccggtccgctacaggttatcagtgcgtgaataccctgactcctaaggctcaggatttgactgggtcgcctcgtccgactgccccgcccccaacgcggacccacgtcaccgcgcgccagcctgcggccgtcctgacctcgcgggatttgagcttcggtgccaacaaacactcccaccgcggctgcgtccactttacctgccggcggcgaccagcttctgaagaaaagtgtccaccatggtgtcgaggagcttcaccctcgaaatggtagtgccgggtggcacagattccgaagacgacccctcatgccttttttcctcacagccgctgcctagattggcgctacttgcttcggccatgttgaagttgaacctccaaatctaactggcccggcctccccgcctgccggagctcccgattggccgctcccgcgaagggtgcctccgattggaagcagtagaacgtctgtcaccgagcagggcgggggcggggaagtcatcggaggctgagggcagcggggaggcgaggctctgcgcggtgggatgtccgcgaccggaaaaatacgcgcaagccaaagctcgggggctcaataaaaacttttaattacatttcagagacttcgtacagtgcaacagtgaatattcactgttaattttcacaagagtccatttcatcaaacgttcagagagtctgccttttcattcccttgttcctcagtgctccaatcaggtttccagtctcccagaggtttcttttagttttgattaccgaccaaaactccagtttagggagaatggaagtccaccgtcccatccccaccaaaacatatttcagtcaaacccaatcccagtccctaaagaattaggaaagtatgggccaagggtccttttaattatacacacatcacccttaaaactgcgtgtgtgtacgagaaataaagaaaaacacaagaggggctgtaaaatactgcacaagacaacaaaacagaaggaaagtcttgagggagaaacactaagacgcgagcggcaggatcctacctcctgtccgtgacactccccattgacaccttccccactgtgccatggcggggaaggactaaagtcgagtctctagggtctctagaggtcttgctaggatgagcttaaagagatggggtgagggtggggggaactgcttccattatatttgtggttctcagggttaagcagtgaggaggggcaggaagattcagaatgatccgtgggtccaaccctttggatgtgaacattcctggatagaaactggaggactctcttgacaaagtgcaggaagggataaacaaaaataagatcaagtgaaatgggaaaaccctcaaagagatcaagatgggcagtggtggtggtgaaggtagagaagtggttttcagaacctgttctggccaaggtggaagaatgtgcggcagccatgaagaaatatcaaggcttcaggtagctagcacctttcaaactggcaccatggcctttcccagggggtgggaccaatagggtttggaggatcatccaggtcacacgtctcaggtagaaatgcagggtttgacatgccttctctatttgctgcacctctctacctgcaacacaggcttggggagagtagcggtagggaggaaggagcactcctctcctagctcctgaggagagcatcagataatcttggcagtatcaggctggtaaatgcagtggtcctggtattgggtgactttctgaactgctctttatgttcttccagcattcctccacagggtaccatgactgggatgactacgcatccagtgatgtggatcttagagatcaccatagtgagacaacacttgttgccgtaagtctgagtgattggggtatttatgtgtatgtcatggctgcctggggcagagaatctacccactgccctctcctaggtttggctctgctggcctgggtaatgtgctggggaacacatgcccacttgttgccttctagatcaactactttctcaacctgacttctcaaggtagtgctccaagtccagtgcacccaagacagcctgatccacttagaactgtgcccaccacgggagtcctctgggccaggggatgccccagcttagactctcctagggctcctgagactgaagggacagggaagtggcttgtggaaaaagctacattacatttttctacctgtcttaggaagggggtgagctctgacagcaggattggcgctttagcaggactaatagcctggttcacagatgttaaaacacacacacacacacacacacacacacacacacacacacacacaaaacaaaagtatcaacatttctcccaacctaataacccctccaaagagaggacgagtgctctggagaac

SEQ ID NO: 1653 - DNA, 4001 bp, Homo sapiens
ccgcaacctgggtgcgctccagcctgggtgacagagcaagactccgtctcaaaaaaaaaaaaaaaaaaaaaaaaaaaacatgaggcacagagtgaatgacagatgtgtacaagatcacacactaatcaacagtgagccagggtttgcatcccagcagtctaattccagagcctgtgcttcggaccactatttgacgtcagggtttggaggtgaggagaaatgcaacttaggaaaaggtggtgagatacttagtgatgaaaaattcaggtggtgacctctgctctgggctctcccacaccttcatagaacccccgtggtacccaaaagcagcttcctggtacccccaccacactggccttcaagaggagaggagccccactttctccccaacctctgctctcctagcccaggtctcagcaaaatgctcctgcacagaagatcttgctttgacagaaaacactgtgcaaaaggtattattatttggggaggcagccagataaaacagaaagaaaccagtccttggcgcaagataaagttgaatttgtttgggttttttttctttttgtttcaattatatattaattgctgagatgcccatcatgaaccacaaagctgaatttgaatcctggatttgccacttactttgtgaccagcaagggttttttgttgttaacttcgtatgttattttattttattttacttcgagacagggtctcaggctctgctgcaaggactggaggacagtagcatgattacaattcactgtagcccccaggttcaagcgatcctcccacctcagcctcctgagtagcttggactagaggtgctcgccatcgcactaggctaacttttccatttttttgtagagactagggtcttactgtgttgcccaggctggtctccactactgggctctcaagccatcctcgcacctctgtctcccaaagtgctggggtgacagacatgaccaccacacccggcctgtttaactttttaagagcctcagtttcttcacctgtgaaatggagatgctaataatggcacacagtacctaacaaagaggtgaagagggttttttgttttgtttttttaagacagggtctcgctctgtcgcccaggctggagtgcagtggccaatctcgcctcactgcaacctccgcctcccgggctcaagcgattcttctacctcaggctcctgaatagctgggaccacaggcacgcgtcaccacgcccagctactttttggatttttcgtagaggcggggtctcgccatgttgcccaggctggtatccaacgcctggtatatagaaagtgccttcgtaggaaccattattaatgcttctcagagagacctgcagctgaaggtctttggagaggtggtcacctgcttctttgaggctcgcctgtgtagactactgttttatgtaatggtggcattccaccttccccagcccagtgctcctcctgccttgcaaacggacgacccgtactccaaagctcactccgtgacacccaaaagcactcctcgtgtcacgtgatgcggagagctcccccttccacctttcccgcctcacggacacctgctctgcagcgcctcggtcacgaagtccttcccggatttcctcttgccgctgaacagcagtaccagccgcggggcgcctcccagcggggccatggggccgccacgcctcgcgatgcctgaagctgacacttctccctacccctaaaatcgggacaccgcgcggaatggacgcggccactaagcggagcggcaacaaggaacaatcgcgcccctcctcgccgtagctgcgaacagggctgaccgcccgcgaccgtgccctcagctcatgtccaaacagatatggggagaaaagggtgagacacgcggagagaaaggcggttccttcacagagcagcctcccctcgtgaagctcccccacccgaactcacttagaacagtccagccccgcccagaaccttcgctcacagcctggcctgcttaactgacacccggggaggaaccggacgcgactaccttcctccgaggggggtgacgtctgaaatttcctgaggtgaaccccatgttcccttccgcgcagccctaaaactttaggaaaaaaaatctctggagtgagatcacgttggagacgttttggaaactgcccttttgcctgtgcgttatagtacatgtgccacagcaaatctgcgcgcgccccagagtgggaatgggtcttcctgggggcgtaaggcagccctgacgcgagcggcgtgtctggccacgtcatgtcgggggaggagcagaatcgcgcacacgatatttcattgtcaagcagattttataacccgagacgtcactaagatgtggccctttaagcccggcgagaaacctttgattgcttttctagccgcagcctccggcccaaaggttttcggaagcaaacggcgtgggtgacatcaatagtaagggagcgttgaatccctagatgagattgcctggtttcatccgaagtctggctcccagccagaagtttgagaggcaggataagaataatctgtcctttccctgcatccccggttctgcctcttcccgcagtaggtgacgggttgccccagctgagtacgtcgagttgtttttggctatgacttgccgtcctgcatttttctgagcatgtcagaacagagcctgcaactcattactgcctccactagagaaaaagtgtagtgtggagacttagggagaaaccattaatttcctgaatgttgaaaagaggcacaggagagtggtcagatgcaaaaagaacagacttaaggaggtggttttttgttttttggggttttttttgttttttttcagcaacccagaaaacactgcactcatcaacgccctagaaggcagcacagagtggattttcagtcccagcttggacacttagcaagtcactctgagtttaccactgataaggcccacttcccagggttataataagaaaggaatgaagaaaatatatgacaaggtacaataaaatactttgtaagttctcaagtatcatccagatgtaaggggttgttatttattcttagcacttcgtcattcaacacagaatcagattttccagctcatcttcaataaacatgtatttgggcctccacggaaagtccacatctcctgttttacctgagtcacatggaaggagtcagaacttactcccggagtctctttcctcacctgacccaatgcacgccccttacctccctctctgactctgagatccagctccctgaatacctagtgagcgatcagaaaacttcccccaggctcacgcctgtaatctccgcactttgggaggccaaggcggatcacctgagggcaggagttcgagaccagcctggccagcatggtgaaaccccatctctactaaaaatacaaaaattagctggatagctggacgtggtggcgggcacctgcaatccagctactcaggaggctgaggcatgagaacacttgaacctgggaggcagaggttgcagtgagccaagattgtaccactgcgctccagcctggacaacagaaaaagactccgtctcaaaaaataaaaaaaaacttcccccatactaggcttcctagtatgcctcaactgaactccactgtcccttactggtgtctcaagtggaggctttagtctcccagccctcatccctcagcatccgctttgagtctatggcctcccttcctccccattttaatttccacaccattactcatcctgcctcttggaaaactatggttcctctaaggctcatgccacctgcctgcgctaccctcctgctttcctcagtactggcagcccagcaatcctggtggttcattttcattttcttttgtttctttatgcagacggggtcttgctatgttggccaggctagtctggaattcctgggctcaagcagtcctctctggcctcagcctccaaaagtgccgggattaccagtgtaagccac

SEQ ID NO: 1654 - DNA, 4001 bp, Homo sapiens
ggaaacagggacccagtggcttggtggtttgggaagaacacttggtgatggcggctcactaaatttggcaccagcatagttctgattagcttgagatttaaaaagtaacctgggacctgataagctagaattccaactttgattatttggaaaatttttgttcttccccccattttgcatggcctgccaggcagctgctgatgagttataaccatgtcctctttcttttttcttatgaacaatcttcatctgggaattctgttccttggtcttctgtctgttaagctgttgttggttcttactaacatttctagattgaggggctggaatgttatacctctctccaccacccatcttcagcttctttgtcacctacaagtgaatggaaacaaatattgagtaaaattccattaagaaaagttcaaaatctttaagaagcttctatggctccaacttataactccagatattttggacaagactcaataacaggctattcagctgctttaaactcaaaaaagcaagccgttcagacttcaatatatgcacaacctttattgttataccttccctaagaaaaatgagcttacccacaaatctacataatctattttaaaataaaaacaattggtttaggatggttccatcataaaatgtttgcccattatgatgattacctttcagtctgcttttcagattgcaggatctccactacctgtcctcttccttgctgccaagcccaagataacaagtgttgctttctgacagatcccttcctttgtctcaatacagaagttttcatgggccgatctgctgagttcagcctaggagctgaggccaacatctgagtctcctcagcacacaagtttgagagaagtcctagctagaaaagtaaagattacttcattatttcaaaaacacgttgagaaagtgatcatttagatttactacgaaaatcgttgactgtaaagaaggctacttcctgaactaaaaggtagaaaatttctcgtaagatggctttctttgaccttataaccacgaccatttaaaaaaactcttcacccttgagatccagtcactcctggggaatttttgtaagtgtctccaagtcccgcaataagttttatctttatctttttcctgggaaagaccttcagattctctcgcgtataaaatcaaggaagtgttaaatgttgagtcatatcaaaaaattggcttcaggcggattttctaaagagaccgtgtttttaaactcccaccagaattttccaatctttccacacatgtcacatccattttcagtctcttggaacatgtagacatcacgcagtgtttcctttggttatgaacgctctcgcctcctccccgtcttaaaataagttctcacaagccctaacagtctaagcccatcttaaatatataaaaatgtctccctagagggaacagcttaactttcaaggtttggttttaatttgatgttccaagaaaataagttaccaaatagttaagccccctcctttcaaaggggtaagagagctttccaaacagataaacaaccctaaataaattgccatttccggactgtgagtaattcccaactcgaacccggaaaacgcctcctccgacgccacaagggcttggcttcccagtggccccatctctccggagccgcaggggtcgcggcgctgcgaccgcccgtgaccgcccgcgcccgcccgggttacccggatctcgcctccgctcgcctccttcctccaacaatggggagcgcggccaccaacatggccgcgcccttagcgcagccgctacttactgacttcaagctcggaactaacgcggcagcggctccctctcgacgtcgaagcctccctccctttccagggagagacgaggcacggaccgacaaagcccacgaacaccgatgagcgagctgccggccaccccagcttctacaacccgaccttctccttctgcctctaccgacaaaatggagtcggcagcgactgcagaagcagggccgggaggctccgcggccaatcaaaacacgacagcgcgggcctggccaatgagaagcgggccgccgcctgttgctggggctggccgggggcgaaggcgcggaggtggggctgcagagggtttgaaatctgcccggggaggaggagcatgccgggagtaactgctcggtccaccggtgtcttagtcctttctccggcggcctctccgcgcccctggcccgccgaggccccggccgctagctctcggctcttcctaccgctcggctctcgtgcgcgcgggctcgccgcccttgggactgccctgggggaaaagactgaccggcgggggacgtttggttctcgaattagggccactgagtcctgtagcctgtattgacagatggaagatactccggaaagcctcttgccagggcgcagccccctcccgcctcgggcctcggcttctgggtcgcctctctcccacacccacaactccgcgtccgaagccggcgcctccccgcggttccctccagtgcccccaccctccagccccgcaattactcaaaagttgcctccctgtgaaggcggttcagacacacgcgggcaagtcagtcacttcctgcttggtggccccattggtccttaagttcaattagagccctttacgcgccgtgttaccgtttcctgtggctgcagctctccccacccacacaccctcgagggccacaaccggttaggttttgtttctctgagcacagcgccttcgcgcgttgtaagtgcacagtaagtttgctgaaagaatgaggactgctctcctcccctttctgccccacttgtaagtgaaaaaggggaagaaagagaatattgttcagttgattatgccagccagatgcaggtaaggggaaaatggcaatttctttggagtaaatgtataagtaacccaatgtgaatcttttaaaagagcactaatttcaatgagcgtgaataattctgggccaaacggtacaaaatcagtctcattcacagtttgttcgtgtatacacatatatacccaagtttacgttacagaatttatatttaccaactttttataaatctcatgtaattcgttatttttgagacggagtctccttctgtcgcccaggctggagtgcagtggcacaatctcggctcactgcaacctccgcctcctgggctcaagcgattctcctgcctcagcctcctgagtagttgggattacaggcgcctgccaccacaccctcctaatttttgtatttttagtagagacaggatttcatcatgttggccaggctggtctcaaactcctaacctcacgtgatccgcccgtctcagccactcaaagtgctgggattacaggcgtgagccaccacacccggcctgtatttcgttttttaatcttcaattttttgccaccgttatcccccacttcccaatccaacccaaattcctatattctagccattggatcttaagaaaagttactgcatcttacgggatgcagtttgttaatctaatttgataaaagaggtatttttgagcatagggactttctgatgctaatcatattcaaataagaagtatgtggtaaaccaacaggtgtcttagtgaaagtgtaatctgttttccaaacattcaagaagtttgcttagacgtctagccagataatagccagctgtatttaatgaatttttaatggtgtcactttaaaaaacaaaaaacaaacaaaaaaacacttccgtggctccaaattgtgatacggaataaaatctaaactctaaacgtttagaaaattattcaaagccattgcagtctagagttagtcttttcatggcagggcatggctcacacctgtaatctcagcaatttgggaggccgaggcaggaggatcacttgagcgcgggagtttgagaccagcctgggcaacatggcaaaaccccatctctacaaataacaattagctgggcatggtggcacacgcctgtagtc

SEQ ID NO: 1655 - DNA, 4001 bp, Homo sapiens
ctggggaaatgtttgctgaatgaacgactttgtgaaaggcagagttggaaaagatctaaagatctgcagtatgatctgctctgactcccccagtttgcaaattagtgtgttaaagccaaggccaagagtaaaatgtgggtcttctgactcctgcccagagccttgagttggccttgaagactgagcgggagttctccaagtggacggagtgggagaaacagccctccaggcagaggtagagtgtgatcaaaaggtaggggtggggctagaggagagggacgtgtgtttaaggaagggtcaacagggcgggaggcctgggtggccaagggcctccaccgccatgctagtgttggtgatagggactcattaagggttccaagcaggacacggccagcactcgcatgtatgactacaccaagcctaaaagtgccaccattagtaatcccctatcctagactcagacagaagggataaagtgtgctcccacagatgacatgaaaacagtcgtgtgactctgacatttcttaacttgcactctaggctagagtagactgggtcttgggccctaagagtggacatgagggagcagaacccccagagcagtcccccctggtctttcccagggcagtccacgggctcttctgagtgacctacctcggaatgctgtgcgcctgcagatcagccggcctccttgctcaccatgagccctcctgcctcgccgctgccttcccagtgtggaaggtttctatataaaggagggataggggacgggaccacccaggggctctcccggttcacaccagtggcgcctcgtggagcagggcagaccacagcttccccttccctggccagccggtaatcgaagggcagacaggtcagtaattcactccaagcgctgggtgagcatcctccgcgcctcccggaccagctcagtcagtgccgcgcgcaccggggccggggtgctcgccccttgctgccgcgcctgctcctctccaaaaggctgcggctgcctctcctagccccagcccccgaggctgccaggagcctcgcagccccgccaccacctcctcttccacctgacggagcgtcaggtattccaacgccaagatctcgtcccccgccccaggccgggctgtggctcggggacctggaacctggggcttctgcctcattcgcaggaaggcgcggatctcgctcctcgcgcttcgcggacccccaccccttcctccctccagctgtcccggctgggaagcagccgcgtagacagatagacggactccagaccgccagctgagacctttagctcaactagtggttggcactaagctggggcggcacagtggccggggaagccgagccccggaggggacccacccggcgtccgacgcgccctggggccagacctctgcccctctctgggcctcagtttctctatctataaagaggtggaggttggagtcgctagggggcctgatgagttgacgtggaaagacgcggggatacttcgggcccaggctctcatgacaggggtccccgcccctacgcagttccacctgccccccacattccctgtcgcccgccggcgtcctcccactccagcccccgcccccaaccgccctcagattctttccagatgtgcgcagcgggaggggcctggggacggggaccagcctctgctcagagaggagaaggcccctgcctgggtcctgactgcgcaggggtcgcactccagaggaggagatctccggccgtgccctgggtgcagggtcctacagagggggtgagatgcggcgggcccgccccaggcagctgctggagccatccggagaggcggggacgtctgagtgcgctgcccgggctcagcccccggcccctcggcccaccccggctgccagcgccctgtacctgctgcgccccggcgccgagcggcgccccacaggccgaacgcgctcccccagtctcagctgcgctccgcgggctcgggctccttccattcaagtcaagctgggcgctctccgcgacgcaagttttgttgtgggttttctcctccccgcctctctcccgcccccttcccccactccccacccgccccgggagcatctgctggacgccggcctccttcggacacaggcgtagggtccccccaggcgcgggcaggagaaagcctgcccctccccgctcgggacttggccggttcccacttcccggggaggcagagccgccgcaccgacccctctcagccccggccgccgcaccacgccccccgaacccccacccgggagaccgggaaggcgggctgtctggtccgcgacgcttcctagttcccagccttccgcactggaactggaccccctttaggccccgacacctgaaaggagggctggggagaggggtccttcgacccagtgcctctgagctgtatcttcctcattacagaggatgttgcaaccgctccaggcacgagtacctttccgttcactctcccaccctggggtcctgggccgtggctaatggggccgccagccaagaccctgctgggcctcttcccggaaaagttccccacgctccaccccaccctccactcccatccctgttggccctgggcccacagcctggtgagccttgaagaatggtaaattgggccggagtcggggacatgcagatcccagtcacagagaaacagggcgggtgaacagtgagacctcacaccaccatattgctcccaggaactgaaaatgtttccaagtaaaggagtattaactactaccagctgaagcaacactgtttggcgccaggggcttcggcggtggaacaggcaatgcggctgggcttaggtggtacttggcacctccactgtgtagcaagcctcctccccttacctgctctggcctgtgggcagggcatccacagctgcctcacctggctgtcctcccactgaagagggagaaggatgcataagtcacacgtgggaccccttgctcaaccttaacctgaatgaatgaatgaatgaatggcccctgtaaagcagctccagacttttcactggctgccgcccccgtgaggttataccatatgcattatgctctgcttcacaactccgcaaaggaagaactgctgctgccccactttatagaaaagagatggcctcagaaaggatacttgactgagtaaaatgcccattcactggcagagctggggttttgaccccaggtttacccttctccacagcccaagttcttcccatgatggaaacaggcaggtaacttgagcaggcaaatgtagagtctagatttgaacccaggactgtctgtttccattacaccaacaacccaagaacttagcaagaatggggagggaaaatattttgccttctttggcctcaaattccagtccttttggagctcaaactcacaagagttggtgtgattcacagcattggacctggaccaacagagatgcatctcgtgtcttctcctgaacattgagcctagattcaagtagagctaaaaggacaggattctactagcttgaatactcatggactaaaaatcttttaggacaatgagagccagcacatattgagtgcctaataaatgacaggcaccatcctaaatccttaaaatatcttaatcatcctagccctgtggggaagatattctctatacttataactgctaaggccaaggtgtttcaggggcccgctacacggcacaccacacacccagtacccaccacctcccagagaaataggcttttctatggaatgctgagcaaatgcccatgtgtgctttgtggttggctgctactatagatacaagctgcaggaggaatcactttgagtgtctctggtggaaaaatggaggcaaccttggtgctctagaagcaaatcctctttcagaaggattgtaaaggcagagtttgaaattgaggtttcctgaatctacttgtgctgcttcaattccttcatgctgcccctcaatttcagctcctgtttgatatta

SEQ ID NO: 1656 - DNA, 4001 bp, Homo sapiens
cttgagttggccttgaagactgagcgggagttctccaagtggacggagtgggagaaacagccctccaggcagaggtagagtgtgatcaaaaggtaggggtggggctagaggagagggacgtgtgtttaaggaagggtcaacagggcgggaggcctgggtggccaagggcctccaccgccatgctagtgttggtgatagggactcattaagggttccaagcaggacacggccagcactcgcatgtatgactacaccaagcctaaaagtgccaccattagtaatcccctatcctagactcagacagaagggataaagtgtgctcccacagatgacatgaaaacagtcgtgtgactctgacatttcttaacttgcactctaggctagagtagactgggtcttgggccctaagagtggacatgagggagcagaacccccagagcagtcccccctggtctttcccagggcagtccacgggctcttctgagtgacctacctcggaatgctgtgcgcctgcagatcagccggcctccttgctcaccatgagccctcctgcctcgccgctgccttcccagtgtggaaggtttctatataaaggagggataggggacgggaccacccaggggctctcccggttcacaccagtggcgcctcgtggagcagggcagaccacagcttccccttccctggccagccggtaatcgaagggcagacaggtcagtaattcactccaagcgctgggtgagcatcctccgcgcctcccggaccagctcagtcagtgccgcgcgcaccggggccggggtgctcgccccttgctgccgcgcctgctcctctccaaaaggctgcggctgcctctcctagccccagcccccgaggctgccaggagcctcgcagccccgccaccacctcctcttccacctgacggagcgtcaggtattccaacgccaagatctcgtcccccgccccaggccgggctgtggctcggggacctggaacctggggcttctgcctcattcgcaggaaggcgcggatctcgctcctcgcgcttcgcggacccccaccccttcctccctccagctgtcccggctgggaagcagccgcgtagacagatagacggactccagaccgccagctgagacctttagctcaactagtggttggcactaagctggggcggcacagtggccggggaagccgagccccggaggggacccacccggcgtccgacgcgccctggggccagacctctgcccctctctgggcctcagtttctctatctataaagaggtggaggttggagtcgctagggggcctgatgagttgacgtggaaagacgcggggatacttcgggcccaggctctcatgacaggggtccccgcccctacgcagttccacctgccccccacattccctgtcgcccgccggcgtcctcccactccagcccccgcccccaaccgccctcagattctttccagatgtgcgcagcgggaggggcctggggacggggaccagcctctgctcagagaggagaaggcccctgcctgggtcctgactgcgcaggggtcgcactccagaggaggagatctccggccgtgccctgggtgcagggtcctacagagggggtgagatgcggcgggcccgccccaggcagctgctggagccatccggagaggcggggacgtctgagtgcgctgcccgggctcagcccccggcccctcggcccaccccggctgccagcgccctgtacctgctgcgccccggcgccgagcggcgccccacaggccgaacgcgctcccccagtctcagctgcgctccgcgggctcgggctccttccattcaagtcaagctgggcgctctccgcgacgcaagttttgttgtgggttttctcctccccgcctctctcccgcccccttcccccactccccacccgccccgggagcatctgctggacgccggcctccttcggacacaggcgtagggtccccccaggcgcgggcaggagaaagcctgcccctccccgctcgggacttggccggttcccacttcccggggaggcagagccgccgcaccgacccctctcagccccggccgccgcaccacgccccccgaacccccacccgggagaccgggaaggcgggctgtctggtccgcgacgcttcctagttcccagccttccgcactggaactggaccccctttaggccccgacacctgaaaggagggctggggagaggggtccttcgacccagtgcctctgagctgtatcttcctcattacagaggatgttgcaaccgctccaggcacgagtacctttccgttcactctcccaccctggggtcctgggccgtggctaatggggccgccagccaagaccctgctgggcctcttcccggaaaagttccccacgctccaccccaccctccactcccatccctgttggccctgggcccacagcctggtgagccttgaagaatggtaaattgggccggagtcggggacatgcagatcccagtcacagagaaacagggcgggtgaacagtgagacctcacaccaccatattgctcccaggaactgaaaatgtttccaagtaaaggagtattaactactaccagctgaagcaacactgtttggcgccaggggcttcggcggtggaacaggcaatgcggctgggcttaggtggtacttggcacctccactgtgtagcaagcctcctccccttacctgctctggcctgtgggcagggcatccacagctgcctcacctggctgtcctcccactgaagagggagaaggatgcataagtcacacgtgggaccccttgctcaaccttaacctgaatgaatgaatgaatgaatggcccctgtaaagcagctccagacttttcactggctgccgcccccgtgaggttataccatatgcattatgctctgcttcacaactccgcaaaggaagaactgctgctgccccactttatagaaaagagatggcctcagaaaggatacttgactgagtaaaatgcccattcactggcagagctggggttttgaccccaggtttacccttctccacagcccaagttcttcccatgatggaaacaggcaggtaacttgagcaggcaaatgtagagtctagatttgaacccaggactgtctgtttccattacaccaacaacccaagaacttagcaagaatggggagggaaaatattttgccttctttggcctcaaattccagtccttttggagctcaaactcacaagagttggtgtgattcacagcattggacctggaccaacagagatgcatctcgtgtcttctcctgaacattgagcctagattcaagtagagctaaaaggacaggattctactagcttgaatactcatggactaaaaatcttttaggacaatgagagccagcacatattgagtgcctaataaatgacaggcaccatcctaaatccttaaaatatcttaatcatcctagccctgtggggaagatattctctatacttataactgctaaggccaaggtgtttcaggggcccgctacacggcacaccacacacccagtacccaccacctcccagagaaataggcttttctatggaatgctgagcaaatgcccatgtgtgctttgtggttggctgctactatagatacaagctgcaggaggaatcactttgagtgtctctggtggaaaaatggaggcaaccttggtgctctagaagcaaatcctctttcagaaggattgtaaaggcagagtttgaaattgaggtttcctgaatctacttgtgctgcttcaattccttcatgctgcccctcaatttcagctcctgtttgatattactgaagtacatagtgtcaagtacaagctttaagcttggagctgggttcaaatcctagctaggttcaaatgaatataaaaatagtacctacacttcacagtatgtctaaattggagaatgcaagtacagaactttacatagtacctgtcacatggtaagtgc

SEQ ID NO: 1657 - DNA, 4001 bp, Homo sapiens
aactagcctaacctctcatgtcaacccaatgactcgagtcttatttaaaatggttcccttcaaccagcagtaagtcaacaaacatttacttggtgcctacaatgtgcctggcatcaaacgcagtgcaggataagtgggtgaacgagagagacaaggtcctggcttctaggacttccaattgaacgatgacaagctacatggctgagggactgtttccataacacctcctccattctttgcactgccttttaaagccacagagctgttttctcaggaatgcaaacacaccgggctgggctatttttacttcccacgtctgtctgaggaggagacttaaagcaagctgggctctcaggcctgcatctgctggctgtgtggactccacaccttcttacttacccatccgccctcagagcagattcgtactttctgcatgtctgccgggccgtcctctagttcccggctctgaatctcttcttcctcttcctcttctttcaggctcaaattgagagggtaggctgtggactccatctctgcaagcaagattcaggttcagaaaaaccaggtgtcactgtgacctccccaaagcctatgatgggggaggctgagccacatacaaacctctttagccccaagcactgttcccgctggagggaagtaaggaaacaagagtcggccaggaagctacagggtgacatgtttaattatgataagagaggctgtgggtagataacgtatctggctgccttcaaatatttaaaaagctatctggggaagagaacccagactggtttgtagagactggacggcagaacagaggccggccagtggataaatactcctggaaaaggttttaagcagtgagaaaggcagtactttctcacagccagtgccacccaaacaggaatcagaggcaggggaaaggtgctgatttcctatcagtgaaggtgtctgaacacagattggacacttactcaactggaatgggtgctagaagccagttaagcatgggcggagcggttggctcagtaggcccattgcctggattttccaaattcaaaggttctgtccacgagctggttcagaaaatagggtcattctaccttaagggactttgcaaacgcaggagtcagtgaaacatagtgagggttatgcctggatacccaaaaaggtgcagaaatcggctggggcccaccccgacagggaaataacccattgcctctgggctgcaaattctctattcgctgactcttggccagtacaaagggccgcactcctgccctctatgggcgcgggcaattcctaggtgtggagtgcggatgcatcttgagggctgcatcggggaacctccaaagaaaagatccctctggagttcaaagtcggttccttcgatatttccaaaaaagataggcgaacgcggcatggatgggtctaggcttcagatgcctgcagctggggcccgaacttggcggcggtctccctgccggctccggggcagaggtgggaggggccgcctccccgcgctaaggtgccgcaaccagggccgccgcccgccctgccccgcctgcgccaccgccgccgcgcccccgggcgcgttcggatttctccagccatcttgccccatttccctttctccgcggaaccgcgccgggagcgcttccgctgccccctccgcccggcccgcctccccacctggccccctcccggccccagcgcacctgccgggcggcgagagccggcgccgcccgcctccccggcgggcccgcaacaaaggcggcggcggcggcggcgcagcctcggcgcccccgcctctgccgcggcccagccgcccgggacccgggggaggggccgcgccgccgccgcccccgcccgcgcgcactcaccgccgggcccagcggccagggcgcggggtggggacgcgagggctccggcccggctgtcacagcgccatcctttccgcctctccgtcctcccgtgcgcgcggcccctcgggagggagcggggaggacacgtggtgggaggagggagggtccggcccggagctgagggtgttgggaggcgaggggaggagcgcggctgatgtcagcaggcctcggcggcgccgggggacggcgcccgcgcgagctccggggccctcctctaggcgcggcttccggccggtccgggcagtccctggcgggcctgggtagccgtgccctcggccttccccgccccgcccgatgcaggccgcttccagtgctgcgtgtgacctcggcgtggacgaggcaggaagagcccagattgattttaaccgagcgtagcgtgggcgcacagttccatgtgctcatttgcagtcaccagcgggttgcacttgcttggacgagctctccaggcgttctcgccgtgcttcaggcaatgaaaggctagaccggcaagagcgtgtaggggcatgaggaggggtctttggggaagagtattcgtattctggcagcgggctcctgtccagaacttcgtcatatacatggagaaggaacttcctgatttttgtagctgttgcttaatatcccaagcatgtaattccttggatgaagtgggtgtatagaaggacctttcttctccaaaacgtccaaaggagttgtttactctcagctctgtgggcaatacaacaaaagtgacctgagaagccctgaagcccttttcattccagaaaaagattctgggtatgggtttttgttgagaacttgttgaagaaaaaattattctgacacttgttaaaacagtaaggaagactttatacagggttattgctataggtgtaaagatgatcacactggggggagagatgaggtctaacacggaatacagtaaggacagctggggatgtatagccaaggagcagaacgaaggggtcagtagatggaaagttactgatacgagacatcaagcacctagagggattcttgctgaacccacttaacaggattcttgctgaaggcaggctagggcgatcagatatcaagggtgggggaatgagaaatttgatcagatatccagggtgatcagatatcaagggtggtgatttctctctaacctaacttagcagggttcttgctaaaatagagctgggcaggccaaaggttcggggtgagtggtcaggggaccagggtggaggcctgctgaagaagaggacttaagcctgattaaactttggtcaaggaaagagtccgtcaaactcttcagattgtctctgagacctgaatatctgttggaaaagacctgtctttccaagtttttgtggccactactacttacatgtgaattttacttctctcagtcatgggagaggtcactgtgcactgtgctcttaacacgtaaaatgtagcatgacataacgtacacatcttggaagtgcaatcacggtgacaacccaagaccgtagaagatctaatctgtgggtggaaaagatcgttcaaatattgggagggaggctagaatttacttttttgttttaatgaacaattatttttgtgtaaaagtaagtatttgtagaacaggagtgacatgttagtttgaattgattgacattgccctcttaatttttctgaggaaatggcagattcaaacagaaagtgaggaggacattaggaagggagaagagtaatagggatgttgctggcaccccagcatcttagaaaagaaattaatacagttttgagatagacacacacacacacacacacacagacacacacacacgaaaaaccctactatgttagagttttagtctctgagagccctaatgttctcatgggcttggattaggtgtccctgggaagaaattaagagtgacccacccgaattcttgactttgagcccacagccccatgatctcaattactgttagaggatcttagaggatccacctttttacgggtctgtaattgctaacaagacttactctaggagcaacgtgctggcctaggcacaatacactacagactcatgtttaagtggttttctaa

SEQ ID NO: 1658 - DNA, 4001 bp, Homo sapiens
gtttttctacaatgcatatattatttttgtagtactaaagctgttttagttttaaaggaaataaaataattaaaaaataaagtccctcgcagcgatgcaatgactctatgaaagtgcctacttcagttatgaatcttgagacataactggtcaacaactcatcttaggagtgtagaaatagacattagaaattaaatagaaaccaatactatatagcctttctattaaaaaaaataaaataaaatacactaaaaacactagtctttcaccatttctttcatgtagacaacaaccctatcctatcttccatactcaggaaccaataaacaaatgaatctgccagagaaaatacagaactgccctgggaaaattcttaccaaactaatggaatttttctcattaaagaaacaaaaacaaccaaccaaccaaacaaaaaaatcttaacaggaattttgggttgacattttctctccaagaaattatcaatagcaagaatctactgctctctcacttgaaacaccagtaccgagtcagcactaacttagaaggaatagcaccatctacagaaatcacttccgtatcagagaatcattactaaattcattttccaactagtagaaccacatctgtacctaactaaacaggtagggctgtccctgagaccttttttattctttcacccctctagcccaggattattatttcccaataatcccacttaccattgttgttggcaattagtgtgacaagagtcttctttgtactgtcgctgttctgtgccccgctgctactaacggtggtggatgtagagaggtgcccagcaacagaagcatgggcagcgatgggcactggagccgagactggctgctggctcacagaaactgtggggaaggggaggcatagtcacttggagacagggacagatgacactaaaggatactgctctaatcttccctttccatcttattgtgggtctctatagccaaaaagtttcctgtttcataaatccaactgttcatgtgatttctcctcctacttaacccttagtccaccatttaaacacaatcccttcttcgtctcacatctcctggttaattaagttacatcacggagcccactgaactgggattttaatctttgcttacatagcactagcaaacctctaggactcaaaggtttattattaccactagtggtattcataatcatgcatattaagccatccaaaagaccctgaactgtgccctatttcagcccaaaccaatgccatcttcaggtctcaagacaggaaagataaaaatatagagcaactggtacaatttaggggagcaaaagaactaccacccattttctgaattcagggcaatctagaatttgacccagcagtatcacctttatgaaagaaaagctaacaagcctaaatttgtaaactgtccatgaaggcagacacaaggcaatttctactccactcacaaaggaaaccaagttcaagtaaaacaaaataaaacaaaaaaaacaagactatgggaacctatttttgactgggtacataaatgagcactgacacacacacaccaccactttgaattcttgttcatacatcttttagtaagaagactgctagatatttgataaacactggttaatccaaccttccaatgttttcgatgaattaaatatatagtttctagctatatggatgaggaaactgaggttttcacagactagagcatgggaaaaaaggcagcaccagtgagtgccacaacgaggtctccctggattcttcaagtccttttccatctcacactttgttaaccaaaataccattcaatttaattaatttaaaccatctaagatcagaagagcttttgttacctgtggtagttttatccactgaattataatcttcaactacagagtcctcaatgacatcactgattttctgccatggctccaactcctcctcctcacattccatgaacaggtcggtgtccgccatgctataagaaaaacattcaaataagatatgggcctaagaataggagatattgctttataccaaatatgaaatcagaactttgactccattggtaacctacctccttggactcctttatcatatcctctagccttcctccatttccaagggttcagaattacaacttctattattgaatattagaatccattccacagcaaattatttaataattagggttacaggccgggcatggtggctcccacctgtaatcccaacattttgggaagccgagggaggtggatcacctgaggttgggagttagagaaccagactggccaacatggcaaaaccctgtctttactcaaaatacaaaaattagccaggcgtggcggtgcacccctgtaattccagctacttgggaggctgaggcacgagaatcgtttgaatccaggaggcagaggttgcagggggtcaagatcacaacactgcactccagcctgggggacagagtgagactctgtctcaaaaaaaaaaaaaaaaaaattaggattataaaagtttaggccaggcacagtggcttatgcttgtaatcccggcattttggtaggctgaagtgggtggatcacgaggtcacgagttcaagaccagcctggccaacatggtgaaaccccatctctactaaaaacacaacaattagccgggcacgctggcaggcgcctgtaatcccagctacttgggaggctgaggcaggagaattgcttgaaccccgggcagcagaggttgcagtgagccaagatcgcaccactgcactccagcctgggcaatagagactccgtctcaaaaacaacaacaacaacaaaaagtttaatgtgtaatacccagggccagggttaggatgaggacagtgaggtgagtcaagcaagtgcaggatcggattcagtctttatttaaaatagatattctgttcattatggattgttctgcattaatattgatcttttaaaatgatgcattaaaatgcatttattatgattactgaacctctctgtactcctttaaattttgcatctaagatgagaaccttacttgtcatactctagtcccagtcctactactaccttgtacgtctagtctaggaaatcctggaggccattccactgtgatttcggagtcaacccttaatttgaaaacactgcctaaattacatgtccctttaaaaaattaaagtctgagccgggtgcagtggctcacgcctgtaatcccagcactttgggaggccgaggtgggcggatcacctgaggtcggatcacctgagatcgggagtttgagatcagcctgaccaacatggagaaaacccatctctactaaaaacataaaattagccgggcgtggtggtgcatgcctgtaatcccggctactcgggaggctgaggctggagaatcgcttgaacatgggagtggaggttgcaatgagccacaattcacgccactgcactccagcctgggcaacaacagcgaaagtccatctcaaaaaaaataaaaataaataaaaacaaataaataaagtctgtatctctgcattgcaaacaaagagttaatgctattctgccctccaataacagtttactaagggtcagtttctctgtgttggaacgggagtactattactgctcaatgttcaaacaaagcctttactgtaaggctctaagtgtccttagtgtcttagtaattctgctgctacatccataagcgaaaaccaaaaccaaacaaccaacctaaccattctgtttattgagtatttagttagggctatacatcctgacagtagcagtttgcaagaagcccaacagatggcattgtttcgcttgaaaattgaaaacaatcttgcagtgccccagtgagtcagctatagccaggggcactctgggttttaatgggtaaagtgcttaactggattctaactggtctttaatcttctattttaattatttctgtctttctaaaccaaagccacaaagggg

SEQ ID NO: 1659 - DNA, 4001 bp, Homo sapiens
ttactttttatgcaccccgaagttgagaacgattgtgctaacagttcgaattcagagttcaagctctcagaccctgagcaatagtgtctcaaaattaatcgtttgccaacgagcagccctccctgccccctccgtttccctttcctctagttgggtaaatgcctacagaagtaaaacccggccgggcgcggtggctgacgcctgtaatcccagcactttgggaggccaaggcgggcggatcacctgaggtcaggcgttcaagaccagcctggccaacatggtgaaacctcgtccctactaaaaatacaaaaattagccgggcgtggtagcacatgcctgtaatcccagctactaggaaggctgaggcaggagaatcactggaacccggcaggcggaggttgcagtgagcagagatcgtgccactgcacaccagcctgggcgacaagagtgaaacttcgtctcaaaaaaaaaaaaaaaagtaaaaccccatttctgtggagttttgagcggcggtaagaggtgtctacgggcttggaaggacgggctacaccgcttgcatcaagacggcggctgctgtgagatagtccaactgcatcttagtttccatttcgaaaatgagactggccactaaatgactctaaggactcatcagcactacctttttctgaactaagaatgtctaagacaagtgctactagcagtttgagagaatcccacatctggagaggaaggaaataagaacaacacgcagaaagacggaaaacaaatagatcaatgacagtactcctttgcaaaaggtgccaagaatctaaataaaatagtccccgggataaacatggcgcccaccgcggcaggacataatcaccagaaaataaagattccccgcctcattccattttataaatcacggcgccatcccaaaagaaatttggggaccgagggaggagacttcgtaaactagctgcagtgcactaaggcttaggatgtactattagaccaagcagagattacataacacaagggatcggctcagcaatcactcattttcctcctcccgctcaaaacgagcgccccactccttctcggagcgggaatggggcggggagggccgcgcacccccacccccaggggccgctccgccgccgcccgcccctccgccgcacggcctcgccccctcgccggcccctcccgccgcgccccgccgtctcgccaccgcccgcgcccccgcccccgccccttccccagcgggccaccgcccgcgcccgcgccgcccactcctccgagacgcctcgcgccgagcgtgcgtgtggacgtcgggctgtgtgcggggccgtggggcgcgagtgcgcgcgcgcgcgccgcggcgggcgccggggggcgggggcggccggccagccggcaggcagggacctccgccgccggcccttcgcgcggctcccgcggcccggggcgcacgcacacacactcgcgctcgcgcgccgcaccccgcggccgcccctgccgcgggccgcgccgccactcgcggtgggcgggggcgcgcaccgccggccccccgcccccacccccgcgcgtaccggccccatccccctctcattgtctcgcctctgaacgcctcgccgagcgaaaagataacggaacccccgggagcagggggtggggagagagaaggctcgctcgctcactcacctcctgtggtcgtcgccgccggtagtctgacccgaggaaggcgccgtcgccttaaagggaccttacacccggcgccagaagggggtgggagcagggggaggggacgggggcttggggggagacgaagaagaggtaaccgttgaaagctcgtctccccaagggtgaaaggaagcctccctcgggttcgagtgattcggggtggatttttttcccgaggggggcgggggggccccgagggaggggggtgggggggccaaggaatgcggctccgtgtacgggagctggcgcgggggagagagacgccgactccccccaccgaccctctcgccccgcggagggatacggctcgtcacttccgccctcccctttttcacggcctcccaattggtcggagcgcgctgcacgtcatgggctcatccaaacccctgcccgggcttcttttctagtcaagtttggctgggcctgcaaataaataaataaaggaaaacattttttgtaatgaaaaaagaataattagcttcagaagctatatctaaattttggtgagaaaaatgagacttccaaagaaaatattccccaatttacttgccaagagtttccaaggaagtgttgggaggctcccccactttccactcaaggcttagacccagtcaagagggagacttcatgacacaggccaggtggtgaggcccagtggcaccaacaactgtcattggaacaaagaacaaaatggcactcactctttctcaagagacactcggccaagtaaccttgtggctgcggccttgtttaagtgaagaacttttaaaagccattttgatcctcaagcccttctggatcctggaaagaagtggcacacgattgttaaagcgattattgtgatggaaactgctttgctcccattgtgagtagattcagcagagatccccagttccaagaaaccacacacactccacatccttatgctttttgctccaatcaaggctgagatgggttggctcaaagaaattggttagtccactcaaacgaccatccacctgtttattcttccccagacaaaaactacctcttttcaggtagctaagaaattttgtcctttattgccttctgagattataaaaatgtaatattttccttgaatatttgaaaatgtttgctatttaagcaatacacaaatatttgcttcaaaccaaatgtgaaatcaaggtacttggtgcagaaaggggaaatccagaactatgtttatttgtgctctttatatacacactccattcaaaccaccagactgaaaataggcagtggaagtaggcattccaaattgtatgcacctgcccgtgtgagtgtgcacatgtgcatacacatacacacactgccaccacccagtttcattccatttcataccaaaaccatgtgagtgatttccactagtgtaggatgcttaggaaggacttcattatttgaatgagaagaatcactaaatccttctgaaaatacttctgaagactttccagacctgatctggagaagcccatattaggattatgggatcaatcaccaaaagactacatgaaactcaaatcctattttatactgtcgtgtaattagtataattcattatatatgttatatttacattatgtatattacgttattaacctttgaaaaattccaacatatttccccatgccctgtcaatttattctcccagccaatgagatctagcgcagactatgccatataccgttgaccagtaactgttagcatgctttattgaaaatggatcatgcatccattcattcattcaatgaatatttattgggggctgggcatggtggctaacacctgtaatcccaacactttggaaggccaagggaggaggatcacagcagtctgagggcagcctgggcaacttagcaacatcccatctctacaaaaaaaaattttttttttttaaacagagtctcgctctctcccccaggctggagtgaagtggcgcgatctcggctcactgcaacctccgcctgctgggtgcaattctcctgcctcagcctcctgagtagctgggactacaggcgtgcgccacgatgcctggctaattttttctgtttttagtagagacggggtttcaccaagcaggctggtctcgaactcctgacctcgtgatctgcccgcctccgcctcccaaagcgctgggattacaggcgtgagccaccgtgcctggccccaaaaaatttttttcattagctggttgtggtattcctagatacttggaagacttgggaggatcacttgaggccaggagtttgagactgcag

SEQ ID NO: 1660 - DNA, 4001 bp, Homo sapiens
caatttactttcatcattctcattccttaaaggcagtactgagattaatagacttattgtgaataaatgaggtacggcatgggaagagcaaagatttgcctaaaagctgtgatgaactaggaacactttgagaaacaaaatgttgatgtctaagtctcatccttttctccccgaaataacattgttctgctccaagggcaggctttcttcatttttccttttctggggtgagaagaacaatattcaaaggtgggtgaaataaattagtgaaagaaatgagagaaaatgaatgtcatttagacatacctgatccagtgatgttcctgtgtcatgggcaattactcttagtggctggctgccggttcttatcagatggactccaattttttctacaatctctccaaaatgctcttgcagcaacaaagaacagagcttaatttctgcttgagtcattgtactggggagtctgagagctagggaaaaaacaccaaaatggtacaatagaaagtctttcacgctggaagcagagctgctgagtgtaaattcatgtattctttctggagggcaatttgacaatacatatcaaaaagccttaaaaatcttgcatatctttgaaacaacaatttctttttggatattgtgtccaaagaaagaaaaagctaataataatgaagtcattagttctctttataataccgacttagtggaaacaatctaacgtctaacaataaatgatgccatacccatacaatggcatactacaccaacatttaaagttatttagtacgatgcgtattcatgtagaaaattattcataataggctggcgcggtggctcaggcctgtaatcctagcactttgggagaccgaggtgggcgtatcatgaggtcaggagtttgagaccagcctggccaatatagtgaaaccccttctctactaaaaacacacaaaaaaattagctgggcgtggtggcgggtgcctgtaatcccagctactagggaggctgagacaggagaatcgcttgaagccgggaggcagaggttgcagtgagccgagatcgcgccactgcactccaacccgggcgacagtgcgagattctgtctccaaaacaaaaaaaaacaaaaaaaattactcataatatattaagtgacagaagcaagctgaaaaaatataaaaattcaattattgtaaaaaaaaaggaaaaatgtatgcataggaaaagactatgcatcaaatttatctctatgggattatgcgtgattctgattttccttaaagattgggagatgattttgcggtctgtcacagaccttagtttctacacttcactgcttggaagaattaaggtcactgttcacagctcggtgggagtgaacaggcagtgttattctcagtccataaaggaaatgataatttcgaaaaagaaatttaggaggtaaaggactgcttctcaacagggtgtgtcaaacaggagatgaggttacgttgtttgcaggacagtattcaattcttaaacttctactccttgacaaagttgacacaatcagaaacggacgtagttaattttatgattacttccttattacaaattgctaccaaacattgtttacttatttcttccaattcctaagaagccaagtctttgcctccccgtccccaccccgcctcagtatcaccagagacctatttcgtccatccacatatctttggagaagcattcccagatcctttgccatcctcggaaagggcttccaaggcgcttggctcctagctctacacttcctttacacaggttcccgtttcggacgtggtctcttggtccagtcagtgccgccacgttcagacagcattttccactaacctcagggtcagcgcaatccgggggctccaactccaattcggctgagcttcccgcgacggcttcctacggctcccgctggccttctaggccgaggtggagcccaccgccctttctaggacgcggatcgccaccgaagaagacgcggaaaagcaaaaagcgcgtgccactctaccccagagtttcggcggcttccggggacgctctttctttcttctcgctggaagactggaggaccagcgaggggctgtttgtggagccggcgggcgggccgtttgtctctccttcctgcgcctctttggtgctgggaggcgggccgcagggtagctgttggcgccgccgcgtttctgggcctggccaactcacgtgaccgacgcgggctctgaagcggtgggccgcaccgaggcggcggcggcggcgacgactgcagctcgggaggtagcggcctggcgagggacgggccggctgccctctcggacggccgcggcggagggcaaaaatggcggaggcttcggcggccggggcggactcgggcgccgctgtagccgcccaccggtttttctgccacttttgcaagggcgaggtcagccccaaactaccggtaagagcgctgtgttctctatacttgggaacctcatagattcctggccccgatttcccggaactgggtctggagctttctgcacatcattgactcgcccgacatcggtctgccgaatacctgctgcccacttctaagccgccggccctaaaccctgggcatcacggcctcggccccgtacctcctgcccacctcttaattcatcctgggctgctccacctgacctcacctctttacctcccgtgtccttaatttttttttttcttagcaagtttccctctgataactctcccctcaattttcttgcattcttttatacctggtctttttcctacgatgacctccccccacacttcttccactgtgtcttctcaccttcctctgtgttcttttccacttttcaccccccaccgcccccgccacctcccttgtcagtgaagcgaaatagcggattgctgaggattgtcactcttcggttttttctagggaaggaagcacagaaagggggttggaaggtatctgtggggcgaaaagggggattttgctcttcagtggtttccagggtccttgtgacagtgaagacagcagcgtactaatgacttgcagacggtctgcactcctatcactgttgaaggaaatggctttaggaagaaggcaggacgtactgtttcaacttcgtttattttggttgtcatgctgccagtgtctttaatatcattgttccgccccccgccctgtccctttcttcacctaagaaaaagagccgggacagaatgttggggatgcttcctctgacgtgaaattggttttcacgagtttctgccagagtgttagccccttgagaggcagtgctgtggttgggaagaaaacacttttgtaggtcaggcgcggtggcttaggtctgtaatcccagtgctttgggaggacgaggcaggaggattgcttgaggccaggagtttgagaccagcctgggcaacagagtgagacccctctctacaaaaacaaacaacatttatgcagcatactagccagcaccagcatcacaaacccagaaactgttttgggttgggttgtagctactacgaggagctcccccagagtgaatgtcaatcctgtccttggccaactgtctttatggttgttcctttccttacaagtgtccaggttcagtcttgtgatagagtggcaacataatgtatgtttctatttatggtgtctcagatacagtgtaggagaaaaccttctgaagtgagtctgtatatcttatttcttagaaacacaaatggagtccagtgaataagtgcttaaagggtgttttatagtcttctctcactcaaaagttttgtttaaggcattatgatacattctttcctctctacttgccgcaccccctacttcagagtcatagtttcatctaaatgctacttagctgtttttcttttttctttttttttttttgagacagcctctgtctatcacccaggagcatgatttcggctgactgcaacctccacctgccgggttcaagagagtctcctgcctc

SEQ ID NO: 1661 - DNA, 4001 bp, Homo sapiens
gattctcctgcctcagccccccgagtaactgggattacaggcatgcgccaccatgcctggctaattttttttgtagttttagtagagatggggtttctccatgttggtcaggctggtcttgtactcctgacttcgtgatccacccgccttggcctcacaaagtgctgggattacaggcatgagccatcacgcccggcctcttttttttttttttttttttgagacaggttcttgctctgtcgcttaggctgaagtgcagtgcagtggcaattttggctcactgcagcctcgacttctccagctcaagcaaccctccacctcagcctcctgagcagctggaactacaggcctgagacaccatgcttggctattttttttgtagtttttgtagagacagggttttgtcatgttgcctagactggtcttgaactcctgggctaaagtgatctgcctacctcagcctcccaaagtgctggaattacaggcatgagccaccacgcccagccagaaatggcttgcttttaagaatgctaccaattccactgtaaaaggacagatttcctttttttttttttttttttttttttgagagggagttttgctcttgttgcccaggctggagtgcaatggtgcgatctgagctcactgcaacctccgcctcctgggttctaatgattctcctgcctcagcctccccagtagctgggattacaggcatgcgccaacacgcccagctaatttttgtatttttagtagagacagagtttctccacgttggtcaggctggtctccaactcccgacctcaggcgatctgcccgcctcggcctcccaaagtgctgggattacaggcatgagccaccgtgcccagccatatttccctcttttacagtggaagtgtggaatgcatttcctttagctatatatttcttatttagaatatttgtaggatattgactaaagaacaggtatcaaaaaattgaatgatctacaagagagataagagagttcccttactaaagatgtttacatagaagctgggtaaaaatttactacatagggtttgtaagaaggatgcatggctctagtagaggattccctatgatcagcatgatttagcattgtgtctggcatatagtaggtgctcaataaatatttattgaatgaataaatacatcatttctatgggcctttccaaacttgagaaattgtgatccataaagcctcccctcaccattccagttctccttgctttcttccttctctagattgtagaaacaattatgaaacactaatattatgaaccactaatttaatggctcttaattacatactgtattgtcttttattgttccctagttatgttaggagtttaaattctgcctccccaaaaagagtgctagttaccagaaatcaattctatttaactaacgtttattgggcactatatattaactactagcacctgtcctacaaaaccttctattctaaaaggcatagaaacgttaaagagagacagtgcactaagtgtcctaataaaggtatatacaaaacgctatcgtagacgggggaacaattcattttgcaagaaaggcggcccaggaaaactacaggtagcatttcagctagtcttcatagataacaggagtttgtcaggctcttgggataatattaatagattagggggaagttgatgctatagcaaagacagatacaagaggctgtctcgttttctgctttaatgtctctccccatgcgcgatagaaaactgccattctctagtatacaatcaatacagaaatggaagcccaggggagaaacggtagggagccagaagggggctgatccaacaacctgacggaaagcgttgtctatttcgcagcctggccggggtgaacaagtttggcaagtgtcggaccgaaccaggtcaagccttacctgctgcccctccccaaagcggagcccaagccgcgaccaacttgaaatgtactgggcttcctcaagtcggtggcgttctaagcccgcctcccggagctccctattggtgagttttctcggccaatgcaggagaagccgaggagggaagtccgccctcttgaagcctaggaagagaaggagggagggagcgagtacgcccggaaccgaagcttgcgaagcgggtcgcagagagagatgggcgttgcagaatcagctggggtcacttatttccggtctcactccagatgaaggagccactagccggcgagagttcaccgagggaacgtgacactcatatctcatcgagggaccgtgttgagggagcccctacagagaggccaaaggaggagagggcctacggagaaatgaacctctgtaaaagctgctctttagggatcagtctttttgtgactctagcttcatagcttggtctctccattactccagccttcctttcaatcatacactgcctctctccagcaccaccaatggatacttcttttctaaaaatgtttttctgtgggttgctgccgtgtctgtgagaaggtgggcagagggttcaagaaaggaaggatttgggatcagcgtaccagggttggggagacagggcaggagcccagctttttctgcattttccactactttccacttcctgcgagctccttgggaaagccagcagagtggaaggaggagtcctattttcacagaaagcagaaacaagggagaaaggttcagaatggagatgaaatctaggagttagtcaagaagaacatcccagatgtcagagaaaatggcctgtagactgggaggctgtaggtgtagtggcaagctcccagtctttgccataggacagaaacatagctgtgaagctttggagagcttgcttaaccttattaagtctgtttcctcatctgtaacaagaagatgatagttcctatcttataaagttgtgaggattgaaaatagtgtatgtaaagcacatggcacatagttgacacgtgtccaagaaataactagtaaaaatgggtagcttcctgcaaatatttctctctctctcccatccccgggaacattattttcagtatcttgcatctggggggcctccagcctctgaattagctcaggaccctgagtgaactttttaaatccttaggatttttctttttctcccacttcccttggtgccttccagctggacacaaactcattcctaaaatatgtggatggaagctatggtaaccatggagacagggcaggtggcaaggagaggcagagacagtgtgagagaccaatagacagataggaagagagaagatataaggaatgtttcagacagagatcgtcaagcaagatggaaaaaataagacgtctaagcaagactgagattaaagagatgcaatgtgagagagtgtattacaaggttcgctcttcttcctgcccctgtcctatctccctgcccacaataatacggggtggaggcacctggaatgtcccttgccttatctaaaagtgctcccatatccaccttcctcatacttatctaagaggtctacataagggagctgaggtccaagtttctctgcgatgggtgttccgtttttgagagatggggcgggggtgtatctgtgtctgactccaggctggaccgtgatctccttcacaattaaactacaggaagaaagccacatctcttgcctctctttgcacagtatggacaccggctgtggatccaaaaagcctttctacacctttcttacacagtgtgccatgtgccgtgtatggcaggtcaggtctggcgcacaggagcgcacaaacacaccaagtgcggagaatggggatctgctgaatctcagcgaagaatctggatgatggtccctgtctgggtcgcggaggagtcccctaaggaacacttaggtttgttggggctgaggggaggtcggctgagaaaaggaagtcaggattggagcctctaggtttttgagggtttatgtgtgcatgagtgggggagcagtttggtgcctgacgcc

SEQ ID NO: 1662 - DNA, 4001 bp, Homo sapiens
agaccaggagatggaggctgtagtgagccatgactgtgccactgcactctagcctgagtgacagaacaagaccctgtctcaaaaaataataataaaagtaaaactaaataaaactagttttaaaaagtcatttgtggcagcaccttgggttcacagagcagaatgctagaggcgaaactatagagatgggcgagagccacatgttacaggcttttgaatgccagttgctaaaatgtttagatttcattctctaagaggagggcggagttccctgctattgtagatgttcggattcggcactctctaagagcagtgcaatgcctataaaggctcttgagcagggagagacaggttcagacttgtgcttagggaaggtaacagtgcatctgagctggaacggacgcttgagattaccctgtaagtcaaatttacttccagtacagacaggtagactggtgtgtacaggcaagaaggcctgaatgcccagccagtgggattctgatccttctaagctctggccaaccctttcccctctcggtggctgctaccaatgccctgaaaagactagggaaccaggttagctctctttattccccagctcctgcctccttttggcccaatctacttcctgattaacaccctatcttgctattctttgtttctatgtctttctggtgaatatgggcaggctcaatagtcagtaccctgtggctgggcatggtggctcatgcctgtaattccagcactttgggaggctgaggtgggcggatcacctaaggtcaagggtttgagaccagcctgaccaacatggtgaaacctgtctctactaaaaatacaaaattagctgggtgtggtggtacacgcctgtaatcccagctaattgggagactgaggcaggagaatcgcttgaacccaggaggcggaggttgcggtgagctgagatcgcgccattgcactccatcctggacaacaagagcgaaactccatttcaaaaaaaaaaaaaaagaagtaccctaaatatgaagttcaaagcttaataggattggattttaatacttaacatttactgagaccttcctctgtgctaggcactgtgctgagtacttaatagacagcatttcagaatcctcacagctaccctgtgaggtaagtgatttaatcctgttttacaaacaaagagactgaggctcaaagaagatatgtctaatcagtggtagagctgaaatgttaggcagcagtctgtctgcttctgaagcctacactgcaagccgttataattccatccgtcttaaagtgaaacatggttggctgaaccacaaggtagtggcctgtggaaacgctggggaaacccatgccccagaactgggactaattccttctcccactcccccaggcttacctgcgagccatcgatgtgaagatcctgcagcagctggtgaccttgaatgagggcatcgaggcagtgcgctggctgttggaggagcgggggacgttgaccagtcattgcagcagcctcaccagcagtcaatatagcctgacaggcgggagcccaggccgctcaaggcgaggcagctgggacagcctgccagacaccagcaccaccgaccggctggacagtgtctctattggcagcttcctggacacagtggcccccagcgagctggatgaacagggcccacctggggctccacgttccgagatggactgggcaaaagttatagctggtggagagagggccaggactgaggtggatgtggcagccaccaggctagggagcttgagagctgtgtggaagcccccaggggagaggcttcaaggtggaccacctgagtcaccagaggatgagagtgccaagctgggcttcgaggcccactggttctgggagcagtgccaggatgatgtgaccttcttgtaacaactattccacccttttgtaatcctgtggctcttttatccattagatgtggtctcccccaaaattgattctccctcagtctgagactaggaagaggctgcactgaaatcagttaccatggaaacctggctcatcatttctctagtccctagggagtctctgcctttatccctcaattattgggtccctagagctagcttgctctttctttctttctttctttttttgagacagggtcttatgctgttacccaagatagagagcagtggcatgatcacagctcactgcagccttgacctcctgggctcaagcgatcctcctatttcagcctcccccatagttaggaccacaggcatgcaccaccatgcccagctaattgtttatttatttattttttttttgtagagatagggtttccctgtgttgcccaggctggtctcaaactcctgggctcaagggatcctcccgcctcagcctcccaaagtgctgggattatgcccagcccctagagatacttctatagagatattgactctaaaggattgacctatggcttttggtatttagtatctctcactactccccccagctaagtaaggatttaaggaatttaggactccctggagttaacagatgaagagatgggggcataattacttcacccaaagtctagaagccttggcctctctcttggccaagatggaggattgaggagggacatggaccttcaggactaaccctctatggattggccctcccagaagcgtttgggctggtagacccaccccttcctacctgctgagtgatgtcatttcctgccaggatgggtagccctttgtacgggtccttggatggtagtaggtcatataggggcatctgagcccctgctgctaagtgagatcacattatttatcgtccataccattacttcttgtgaacagtaacatgtcactcctcctggcaggaaagtttctcattgtcagatgtttgtgcttcttttcaggtcttactttttaaatagagtgttctcattttatcctaggggatctcacttcctctgtggctccatccctgcatccctgtctgggccagcactcctgactgcttttagggagagaagctttcaggggcctccatttatttctctcaagtctgtttggctcaccctgccatggtcccctgtcttaccctgtccctgtgttgcccctattcctgtattccatttttttgttttgttttgttgttttttttgagatagggtgacagggtctccctctgttgcccaggctggagtgcagtagtgctcactgcaggctcgacctcctggactcaaatgatcctccttcctcagcctcccaaggagctaagactacaggcatgcatcaccatgcctggctaatttttgtatttttttccagagacagggtttcaccatgttgcctagggtgcacttgaactcctgggctcaagcagtccttccgcctcagcctcttaaattactgagattacaggcatgagctgctgtgtctggccctattcctgtattctgactccatatctcccttccaggaggttcagcttctgtgtgtccatgccttttcagtttctccaggccttttatatgcaaatgagtcctggcctcctctgccctttgttgatgggagccagggagagagaacctcaaggtctcagagctctgggggtgtaccagaatcttggataggggaggtgtcatcctttctgactttgtgactgcccttcccccaccctgtccccagccttccaccatttggtcacaaggatgcctgcctgaggtcgggacacaaggaatctccttgtctaggctgcagcgtgggggcgtggcagggaaagacagaagctctttggtcccggggccccatcctggaaaaggagagggagcaagggaaaggcctgtttacttcctcccttagagcaagccctgactcccggaaactgaggagagagcagagcctgggtctctgagcctgggtcccagagccctgccgaattacaaattatatcatagaaggaattcagggaagctgccaacctggggctcagaggg

SEQ ID NO: 1663 - DNA, 4001 bp, Homo sapiens
aggggatggttataaaataaatcaatgaattgactgcctactattatgaatgattacttttgagatcccactacatacaagacacttcacaaacttttcattgaatcctgacaagtagaaatcattagtcccagtctatagataaggaatcgaggactccaaagtcacacagctagaaactggcagagttgcagttcccacttaggcagtagaccctgctgccagtggaccatgccctgagcagaatagagtgactgtacaccagaccctggcccactgaccgtggtgccatccactgccacatatactttgctgcgacttgaatacacctctacgtccaggacccgccggggaccactgcctctgcgccgtgggggctccaggcggcctagggcctcatctgtggggtacaacaggtcatggagatagtctcctcagcagagtctcaccgcttagggtctgcctgccactccagctgtgagatccaaggccccctaccccatccttagcctagccctaccatagtcttgctctggctctgggtcttcattggcttcactgatggctcgccgagtgtccaggatcaacttgatattgacaatgacagtcaccagcaggaaaagcacggcccctgtctgaggggaggggtagggatgattaagaggagcacctccttcagatcctagagggtctttctgaaaggagggccctggctgcagtgaagacatccagagaaactgggtcctgtcccttcctctgtctgcctagctctactcccctgaccagggcctagtttcacagccactttccccagggaacctcccctgacacttccccctccattagggccctccctacccagtgctcctgtattcttctatttgagaccttgatttccttggtcccctccattgttggtttctagagatggagccaggcccagggacccaagcgggggatcagacctgggtcctggccctaactgcctcacaggggtgtgcctctctgcaaagccagcctgatcagacttcaggcttccgtcagaagcttagaagttgtacttgggttccgattccagaactttgggttcaaatcattacctatagggacatgacacatagaggtctcccctctaggaacctgctgcccctttcccactggggctggccaacaggggtcccagtgcctgatttaggtggggaggaagctgggagggagcgctcggtggggagggtttgggacatctctatacctgacagaatctccgcagggcccgctggtttgtcagtttatacttccaggtaaggtaccagctccgcttcttccgagccccaaagggcttgatgagggggctgggcttccagtcgtccataccggattggcgggtcaccaatgtcctggccagcccatgacttcaggaatctgaagggaccagagggccacatggggtaagatgctcctcccaaagtctgatgccttctggggagatgagggaggacctcccagcaactcttccctgcaagcacccatactgtgtgacatggggaaagtggctcaacttctctgggctggcaggaaacccttcagtggggttggatcacctggaaattccctgagactggagtaactctctgaatcaaggctgtccaagggtggaggccaaataatcggctcaaagttcgttagcccctacaaggaccaagttccaggccttcccaagcctgtggtgagcaaagagcgacctctcctgccccagtcttcaaccctcgtcccatcctatctgccccagcttctctcctcctcccagggcccggagccgcccgagggctcaggagacctgcaccggcagcgctacccgttccggacacccacgcggaggcactcacggcttaggggccccgggccccgctcgggccccgctagggccctcactgctcggcccggctcgccgcggcctccgcctcctccatgccgcttgcggccccgccccggcctggcccgcccccccgcttccgccgccgccgccgccgccgctgccgcggggtgagagggcgacgggcggtgcttagggcggcggcggcggcggcggcggtggcggcagcggcgtcggggtgtaagcagccagcgagtaaggcgaatgctcagaccgtgctaggcagcttcgcagcccggctggctggtggggctgcctgcacgagagcagcccgctccccagcaccgccgatggcaagcccgactccagtcagaggcctagcaccttggaccagatcacagggcacgccagggtcagaggggctgcaacccttggacacagggcacacaccacccgccccatacccgtcctgggcaaggccgttacctagtcctggggcatgcacagctattggaggccaagggagattaaaatccaggttctgtcactgttctaagcaccttactgatgatgtttaattccacaacaaccccatgaggtaggcgctattatcattattattgttttttttttaattgagacggagtctcgctctgtcgcccaggctggagtgcagtggcaccatctcggctcgctgcaacctccgccttctgggttcaagcgattctcctgcctcagcctcctgagtagctgggactacggtcgtgcgccaccacacccagctaatttttatatttttagtagagacggggtttcaccatgttggccaggctggtcttgaacttctgacctcaagtgatccgcccgccttggcctcccaaagtgctgggattatgggcagtgagccaccgtgctggctataggcgctattactatccctgtcgcagataaagaaataagacctaatatcacaaagctaggagaggtggaattgaaactcagcctagctccagattctgctcttaaccactgcactctgctggcaacaatacataagaattgccaggtttaaataacatcatacatagaaagcagttagcttaacacaatggttctcaaactttagcttgcgtcagaatcacctggatgacttcttaaaacagaggtgctgggccccatccctagagttttagattcagtggtctggggcagggtgggattttgcattcctgagaagtttctaggtgatgttgatgcttgtttgaagtggatagccatagaacagttttaggcaggggagcaatataatccaatttctgttttaagagaacctttactttttttgtggagaatgggttggaagcagacagaggaagccagaagaccagttagatttttttgagctttctgtattccatctgcttcctgaatggtggggtaatatcccccaaaatgaaatgttaacagtacttgtcttaggagttaaagaaatacatgatttttcctagtaagtatgtataagaatggaagaaaacccaacacattttattacatttgaaaagatgtcccggctgggcaccatgactcacgtaatcccagcaggttgggaggccgaggtggggtggtcagttgaggtcaggagtttgagaccagcctgcccaacgcggtgaaaccccgtctctactaaaaatacaaaagttagctgggcgtggtgacaggcgcctataatcgtagctactcaggaggctgaagcaggagaatcgcttgaacctgggagacagaagttgcagttgagattgcaccactgcactccagcctgagtgacagagcaagactccgtctcaaaaaataaaaaaataaaaataaataattaaaagatgtccctcagggttccttcctgaccctcttttctcctcaaactgactcttcatggatgatctcattctctcatgacctctgttaccaatctagatgcccaaactgacattggcagttctaacctctttcctgagctccaggctgcctgatgtccagcaggacatcttcacaggcccctctaacgcaacagcacaacttctggaatcatttcctttcactcctagatttcctgtgggttcccctcctcagt

SEQ ID NO: 1664 - DNA, 4001 bp, Homo sapiens
tttactagcattatccacatttacttggctgtttctgttgacctcccactgctggaatataagctccatgagggtggggactctgtcttgtttcccattgtatcttcagcacccagagaagtacctggcatacagctgttgctcaataactatttgctgaattaatacaaatgttaaggctgagattggaacctgagtaaccttccttcagagaatcttcccactatgttatatgaggggcagagaagccggggctagaagcagggttggagctagggagtaggggtcagggtcaggacagaataactgaccttgacagtgcagatgagcactcggccgggcgctaccatgttgaggaatagcaccatggcctcatcctcatgaggtgagtacgtgtcaaacacacgttttgccatcacgtggccctggcaggggatatacttctggtgagttggtgtcatcagcaagagcccagctccagccctctgggtcacccacccctagaaactcaccgtggcctggttgaggacaatgacatggatgccccggccctgctcccgggcctcatcctccagcacctacacagtggcagagacaaagtccagcttttcactctggcattcaaggtgtctctgtcttaggggtacttaaaacaccagctgcttgaaacatcacctcctgcctatgtttctgttcacacagttcttttccaactcagctcgaaggccacctcttccagaaagcctctatagcactcccatcagaagagatcacgtctttctacaaccctcccctccatgactttcatggctcttagagcctctgctgtctctgcttcatcctggaagtatcacaatcctccaccacactgaacccctcaaggtagggccaggtctgattactttcaggtccccagtgcccagcacaaggctgaggccaaagaaaggaccaggggatggttataaaataaatcaatgaattgactgcctactattatgaatgattacttttgagatcccactacatacaagacacttcacaaacttttcattgaatcctgacaagtagaaatcattagtcccagtctatagataaggaatcgaggactccaaagtcacacagctagaaactggcagagttgcagttcccacttaggcagtagaccctgctgccagtggaccatgccctgagcagaatagagtgactgtacaccagaccctggcccactgaccgtggtgccatccactgccacatatactttgctgcgacttgaatacacctctacgtccaggacccgccggggaccactgcctctgcgccgtgggggctccaggcggcctagggcctcatctgtggggtacaacaggtcatggagatagtctcctcagcagagtctcaccgcttagggtctgcctgccactccagctgtgagatccaaggccccctaccccatccttagcctagccctaccatagtcttgctctggctctgggtcttcattggcttcactgatggctcgccgagtgtccaggatcaacttgatattgacaatgacagtcaccagcaggaaaagcacggcccctgtctgaggggaggggtagggatgattaagaggagcacctccttcagatcctagagggtctttctgaaaggagggccctggctgcagtgaagacatccagagaaactgggtcctgtcccttcctctgtctgcctagctctactcccctgaccagggcctagtttcacagccactttccccagggaacctcccctgacacttccccctccattagggccctccctacccagtgctcctgtattcttctatttgagaccttgatttccttggtcccctccattgttggtttctagagatggagccaggcccagggacccaagcgggggatcagacctgggtcctggccctaactgcctcacaggggtgtgcctctctgcaaagccagcctgatcagacttcaggcttccgtcagaagcttagaagttgtacttgggttccgattccagaactttgggttcaaatcattacctatagggacatgacacatagaggtctcccctctaggaacctgctgcccctttcccactggggctggccaacaggggtcccagtgcctgatttaggtggggaggaagctgggagggagcgctcggtggggagggtttgggacatctctatacctgacagaatctccgcagggcccgctggtttgtcagtttatacttccaggtaaggtaccagctccgcttcttccgagccccaaagggcttgatgagggggctgggcttccagtcgtccataccggattggcgggtcaccaatgtcctggccagcccatgacttcaggaatctgaagggaccagagggccacatggggtaagatgctcctcccaaagtctgatgccttctggggagatgagggaggacctcccagcaactcttccctgcaagcacccatactgtgtgacatggggaaagtggctcaacttctctgggctggcaggaaacccttcagtggggttggatcacctggaaattccctgagactggagtaactctctgaatcaaggctgtccaagggtggaggccaaataatcggctcaaagttcgttagcccctacaaggaccaagttccaggccttcccaagcctgtggtgagcaaagagcgacctctcctgccccagtcttcaaccctcgtcccatcctatctgccccagcttctctcctcctcccagggcccggagccgcccgagggctcaggagacctgcaccggcagcgctacccgttccggacacccacgcggaggcactcacggcttaggggccccgggccccgctcgggccccgctagggccctcactgctcggcccggctcgccgcggcctccgcctcctccatgccgcttgcggccccgccccggcctggcccgcccccccgcttccgccgccgccgccgccgccgctgccgcggggtgagagggcgacgggcggtgcttagggcggcggcggcggcggcggcggtggcggcagcggcgtcggggtgtaagcagccagcgagtaaggcgaatgctcagaccgtgctaggcagcttcgcagcccggctggctggtggggctgcctgcacgagagcagcccgctccccagcaccgccgatggcaagcccgactccagtcagaggcctagcaccttggaccagatcacagggcacgccagggtcagaggggctgcaacccttggacacagggcacacaccacccgccccatacccgtcctgggcaaggccgttacctagtcctggggcatgcacagctattggaggccaagggagattaaaatccaggttctgtcactgttctaagcaccttactgatgatgtttaattccacaacaaccccatgaggtaggcgctattatcattattattgttttttttttaattgagacggagtctcgctctgtcgcccaggctggagtgcagtggcaccatctcggctcgctgcaacctccgccttctgggttcaagcgattctcctgcctcagcctcctgagtagctgggactacggtcgtgcgccaccacacccagctaatttttatatttttagtagagacggggtttcaccatgttggccaggctggtcttgaacttctgacctcaagtgatccgcccgccttggcctcccaaagtgctgggattatgggcagtgagccaccgtgctggctataggcgctattactatccctgtcgcagataaagaaataagacctaatatcacaaagctaggagaggtggaattgaaactcagcctagctccagattctgctcttaaccactgcactctgctggcaacaatacataagaattgccaggtttaaataacatcatacatagaaagcagttagcttaacacaatggttctcaaactttagcttgcgtcagaatcacctggatgacttcttaaaacagaggtgctgggcccca

SEQ ID NO: 1665 - DNA, 4001 bp, Homo sapiens
aaggtttgaaaggaacaggtgtacaacttagtgaaaaatcagctttctgaatgacaaccaaaatctcatgaaagtcaacagagatcacaacaaatgtaatagaatataccattagcatacatactgctccatgcttcctttaaatgaattttaaaggaaagtggaaaaaatgatcaatcagttaacattcataaaaagagtaacagttttctcacatatgtgggcaccgcagaaataagcataattcttaacaagtcatgagcctgactttgtacaattcatattctaattttcccatctataaagactatgtcacaggtattttaagtgaatcatctcagattcttctactgaactgtcaagagcttcaaaagcatttaacaaaattatctcacatacacacaaaaataaaacattacttcacatacacacaaaaataaaattgcacaatgggaagactgtttaaataatacttactattaactgaaagtaagagatgtaatttctacttctaaaatgatgtgttaaaaatattccaaaaaggtatttttctttcctttttttgaattgttaactaagtaaatgtcaaagagtaaatacaagattgaattcctgacataaatttgttgtttctgtcattcactctttacatagtggcttttactgtgctgggcagatactgctaccctgggtttaggccatgccttatgcataagaattcaaacgttttcagaagtatcattttactttatctttggcaactatgaaggtgacaggagcagctttaattttcaagtgcagaaaatgacaatataggaaaaaagtcatttgcaaaagttttaaatgtaagatatccaagtcccggagttcatatcatttaactttccaggtgactagagtaactaaaaaagtctcaataattctgcatataaacagacataactccacacaaaatatgaccaccattagccaccatatatctaaaaatcaaagtgccttgatttatttgaaatcttcatcaccaaagatggttttaacaaatttaagctggacatcttccactccaaaaggcttgctgttctacagagaaaactctaaaaaggttttccaacatttaaagttgtagttatctagagtatatagttgattttaaaaaaattaaaaagaggactaatcctagcaaaaatttgaaaagttaatagtttctaaaatctggaaatcgatcaacagatctgttgcagcaaccagtacaattaccctctttattaacatttataaaaactattctgcattgtgactcaaccttatttttcactgagcattttggtttttgtataagacgttctcattaggtatgaaaaacatttttattaatatgtatatattatatatgtacagttctatgccttgtttcagatttaagatgtttttataactacatgaaatgttctcaataggaatttccaaaaagcaaaaatattcattcgagctgaactctaaattaactgtatttactaacgataccctctgaatcagaagagctagtcacagggagggacctactgcaaattcaagtaagcttgtgctttgcaaatgctttcctccttccctgctcagtccaactctccccctcccccgccacaggctgcatatgcgattaagcatttatgcatagtcaacccgacacactctatttccatattaaagcttctaagaaaagaactgtgctggtacccacctagaacatagtcactgcagtccagcattgctgtgaaatcttctagaggagcagagagtccaaacaaggaagaaacaggtagcagtttggggtggggaaagaaggtactactatttctaacaaatctacagtatgttcttaagcgaaaagaggggggttgcgtagggtggaaagtggattaaggggaaaagcaaaatacaacttctgttacaccatagcaatcttcaactgaataaggaaacttcagttgctcagaggagttttagtctctcctaccagctaggactgacattgtcaaggcaactgaagcatgaaaaagttcctctttttgtaataaaatagaaacaaagattgcagctggcagtttccataatgaagcttaatcagtatgcgcgtgattagggccttatgcaaatctctcctcgttagcacagcagccagcactttgaagtccatgaacaattcatttacagaatatactgaaagcactccctgcataatttaaatcgttgcataaatatttatcaggctatttgcatattaattggcagtgcatgaagggaaaaattatctcctgagtgccagcataataattaggaggataaaatgagacttcttccaatggcctggcttcttggacctaactggagatagtaccaagggagaagggaggtacaggagacagagttctgttaaaatgccactgaaatgacacgtacaaattagaaacaaccctacagacttaagcacctttaatcttattcctgctggcaacaatgacttcagtaataagaggatttgcaaaaagctttctacacaatccaaataatcccaaggaaacaattagcaaggtagaagcagaacacaaggctgtcaagatggtgctagtctactgatagggaattttccaattcttaacacacttccgtcaagagaaagtcccactttaaaacgaggcaacagtaaacccagaagcagtgcaaggtgtataaagtatcttaaagagtatagaaattcattatctacaaatctttttatattaccaaattaacagaatagattagttgaatgctacatattatgcagtatccttcccccatgaaaataaatctcaagtagaaagaagacagtttgttacttagaatctctattgtcaaagggtgggccatgtaaattgtggaattacttggtattctcaagtatatttcacttaatgaacatacatacatatatataatccttactaaactatatgtttattcaatttaaagtatatttacaaggtaagtcatcaacccaaaattttttaggcattacaatgacaacagcctaatcatcacagacaattcaggagatttataaaatctccatggagtaataagcattattacccctttctttccttatatattattaaagtaaggaaactgaggcacagagaactaaaacactttatccaatgtcacactagtaattcggaatcaggatttaaaactagaattttctgatatcagaatctgtgctcttggctattcctatgcattatggatgagttaaacacgtagggaattgctgagaggtggtaaagcagcagactgaatggtttgttttccgtgtagtgaagaaaccagtaaacggcagcaaagacattgtgtttaaaagtcaggtgtgtacagatacacagaagagtgcactagatttgaggagagttctgaaaggtgtcagcccattaataactgtttttatttagaactagtcttcaggaaatgaaagacagattttaacaaggggcctttaaaaagattcccttgcaagtcagtagaggaccaaaaaccttaaacttttggatcagcactctgcattaccagtttttctgttttactgaatcacaaaatgcttatgaggagagactttgggggagaaacttaacacagccatttaatacctgtaatacctgtttaagttccttccttcttcgagccttaattttatcacctataaaatgatgatatccctttcatgaggttattgtgagataaatgctttcatgcttctcagacaagagcgtggactggaggaatgtgatgcagttgtgccagggcagacatcaagtcactggataaacatgtccatcttttgaaagcatcaatcttatttaatatttcacaccactttgtattaaaataagaatacattatagaagagaacacaaatttcaaatgagtttttaaggtagaatatgttggattatacaaattctcct

SEQ ID NO: 1666 - DNA, 4001 bp, Homo sapiens
tctgaaaataaaatacaggacagatttttccccctaggcccaatactactgcaaagtataagaaagtctttttaagagaaaacaaaccatcacagagttgatacttagctaggacctgttttaatgctagtaaagccccaagagagtttgttttgcccgcagaggaggggaaagtgtgtggaagttggtggaggtagtcattttggttattagtaaataaatcaagcagcagagaacatgaggcctaggcaactgctagagaagccaaggcccagcttcccccctctcttcccagcacggcctgggtttgatctcagagccctgcggattgccaaggaaaaaaaaaatcatatcgaaccacaaaagcacatggggcgaatgtaaaatataaacacggcgttgggctgtgagtggctgttattaaaggtctgaattactaaacatgagaggcggggaaagccaggcggccatttcaataatataaacctccccgaattagacattattcaaatgagaagaggttcagctaagcagagagtaaagacgacccagcacacagcgagaaaacaccgccacagaagaagggagggggatccccgtccctccccaccgactcccaacaggagagaggaaatcgagaatacgatcaacttgtcaggccagcccattctggggcaggagggcagccctttacatccaagttctcgggaggcctctgggcgcttctggggcctcggagcgagaggccccggagggccacccgccccgtgcgtcccggtcaggcgcagggggtggggggaacggagggggggcagcggggaggggcaaagggagacggaggtcagaccacgccaggcacctccagcccaactcgcccgcgaagccccggccgacaacgcaaaggggctgccgaccgccggccgggggcgcgcgggccgccccagaggacatcccctcggaaggaacttgccccaaggactccttccaatccagtccaccccccagggggggcacgcagacccctgcgcgggttccccacccccgccgccccaggccacctcgcagcgcccacgaccgctcacccctacccacctagagagcaggcctggcttgggtcaggccaccacattggggaccagtggggcgaggccgaagtgcctggggccgtgacccccgggctcagccccgcgcggggcgcgggcagggagctctccccgcgcgcacccccggttgccctgagggccgccccccaaggcgggcagcgcccccccgcccgggcccgctcccgggggaagacgcgtgcgggtgtccggccgccggggtccgctccggccccgccgcctccccggcattgtgctcgccgccgcctccatcccccttcacgccccccaccccgcgcccgcccggccccggccgcccgcccgcgccctactgcgccccgccggcccagcagctatgaatatgtaaaatgtctttattgtcctctccctctgccccggccccgccgccccgccgcggacccgctcgggttcgggcacggcggcgaggaggcggcagcggcggccggcagaggaggagggccggtgccgacgggcagacggcgagcggcggcggggtgggccgggtgcaggaggagggcagtggatcgcagccccctttgccccttgtcttccccctccgcctggccgctccgagcctctttccccctccgctcagcgcccggcgggggctcaatgctccccggccccccatctccccgccgttaattataataatcctgagtactaataaattatgctaagtcgcgggggggggcagcgggagccggggttgagtatgaatatgaatatgtaaaatgctgtaatgattacctgctgctgctgccgccgcggctgaactctcatcttgactcgctgctcctccgtccgccattttgaatattttaaccaaaatcgcccggtcgataaaccctccctcgctctggctcccctcccccctcccgccctgcttgcctcctccctcctctccgccccctcccgctccttcctctccccgggcgcgcgccagggggcgcgcgaggccggctctgttcgccccggccccctcagaagagctccacccccttcccgcgctctgcgcacgcgccttcggggcgctgtggcccttcggtagctaaagcagcgccctcaatcagccaggcaccctgtggcttcatttttcgtctcggctctgcgcatgcgcgcctttctcctgccgccagaagtgtcgccggcgcatgcgctccctctagctcagaaccagattatatagtatcccgggcgcctgtgtcttcttacacttctcccttttcctcccgccttgcttccctcctggcttcgctccggtctcccccagtggcctgtggcattgtaaaagcacggcaaggagcgcagcggccagaaacgtgggggcgcgtggaagggcagtgagcggcccgcgtgccctgtgctccgcactttcttcagggtttccgcgcagttgaaacattggcaacaatggataagccgctcctcgctaggtaatttccggccctctgggcaggtaggggcggaaacgaccgccacgggagccgggcatgaggcacctgctgagccacacgcgggcctcccgctttaaatttgaatccgagctaatccccgcccccggctctgctagtgcaggagacccggccccggcaaacgcgagggggagtgtcgtgtgattgttttaattagccctaaatctcttctgctctacttgcttctaacgccaggctggcttcctcgggagctaggcgtcttattaagtcgctaatttccgccctacccttcctttctgccttcacgcccctctaacgccgctccccccaatcgaaacagaccccatattctgaggcttccccccgcgccttcttcccgccttggaacaccttttaaaacctagcagtaagctgatgactaataaaaatgtcgaaatcgtaacttcatcgtgaattttattttgctgtgtttctcagagtaaatatggtattggggaaaggtttcgcgttgcacatatctttcttggtaactagacataatgttgctgagttttctttatcttaaatggcgaaattccctggacaaagtcccaggtctaattattttacgaatttttaaagccctatttttgtttgtttgtttgttttttaagaatagaaaggtgtatttcatggtaagcaaagtttaaaaaaaatcagctctagttaatctgtcttgagagatatgactgaagtttaaattgggtagaactgctggttctacaattaaaaacaaaactgatttccaagtgagtgcaattattttaatgggtaaagttttaatcatcagtcctagaatgctcgttggactcctttaactgtgcaagtacagttaaagctattgtcagtgacaggcaacgatttgggggtgggattgatttgttcgtggtaattaagccttagggtgtgtgcatgactgtttgaaccaaataattagaccgccctgtaatctaattatttagagccacgccaaccagcacacttaaggaaatgaaatatttaactagttaatctggaaatatggcctaagttattttcaccagcattactgtaagggaagtctcagaattgacaaccttattggaaatagttaagtacatgcccctgctctggggaccacaaatttgaaatcatctccattaagaaaaagagctcaaataccctcatttaatttcctgtcttctatttaatcctagttttgctctttggttcaaaaagtatattaatatgaccttcggaaagtcattgaagctagtgtatgtgttatgcattctttactgtttcacttctataaaaggaaattttcatggaaaggatttttatttaaggaaggatagttctgtgagaacaaaaatagcttaaaatagactgtatcaaagtttcattttcctcctaatgagttatt

SEQ ID NO: 1667 - DNA, 4001 bp, Homo sapiens
cgggcggagttagaaggaccccaggagccgagaggctccacgaataaataaaaaccgtaaaaaaccaagcccggagaaaggggaaagcggggtggggcgcatccttataggagagaagaggcgtgtagcgaataaagtgacagccccccaccctggacccgcaggctcaggagtccacgcggggagaggggatggagaactctcctcgcttcgtcctctctcccggggaatccctaaccccgcactgcgttacctgtcgctttggggaggccgctgccgggatccggccccgaacagcccgggggggcaggggcgggggtcgtcgaggggatgggggcagagagcaggcggcgggcaggatgcccggggtgagttggcgagttccggatcttcgctcctctctcccggggctcgggcgacgcagcctaccgggctgtcttcgccgctcaccggagagggtcgtccgggtgtttggttttgttcgaaagtttctgggcttttttttttttttgtaaaatccaaagcaaccgaacaaaaagagtccaggccgcgcgggcgggctgcgcgcccgcgccctgcagcgcgccggcgggggcccggcccgcggggtcactgcactgagccgggcagtgtgtggtggtggtggtggtgcagcgccgccggcgggggcggtgggggcgcggagggtggcgatgcgccgcccccgccaggccctagctccccaggcgcgtatacatcgtccatgggcgggtggcccgcgccggccgcaggggtcatgcgcttctccttctgccgccggttgcagaaccagacgcgcaccacctccttctccagctgcaggctgtctgccaagccggtgatctcgtgcgccgagggcttggggcacttgagaaagtggctctcgagcgcgcctttgacccccacctcgatggacgtgcgcttcttgcgcttgcggccctgcgccgcgatcttgtccaggttggtggggctgccgctggacgagtcggtctcctccagccacttgttgagcagcggcttgagcttgcacatgttcttgaagctcagctgcagggcctcgaagcggcagatggtggtctgcgagaacacgttaccgtagagcgtgcccagcgccagccccacgtcggcctgcgtaaagcccagcttgatgcgccgctgcttgaactgcttggcgaactgctccaggtcgtccgagctgggcgcatcctcgtccgagtgctcgcccaccgatgagccgccgccgcccgcgcccgggtgcaggtgcgccgccgccgcgtgcaggccgcccgcgtgtgcatgtccgtgtgcgtgtccgtgggcgcccagatgcggcggcggcgacggctccagctgcgcctcgtggccatcctcgtgcagcgcgtggtgcaggcccggccccgcgccgccaccgcccgccgccagcatcccggccaggccgccgccgccgccccccgggtaggccgcctgcgcgtacagcccgagcggctggggctggtggcccccgctggccccgggcgagggcgacatggccgggcccaagtggtgcgctgtgctgccctgcgcccatgccgcgcccgcgtgggccgccccctggtgcaccaggcgcgcgtggaaacctccgccgccgccgccgtcgtcggctcggccggtgccgccgccgcctgccttgccgtgttctaggtgcgggccgccggcccaatcgccgccgccgcctcctcccgtgggtagccactgggggtgcgctaggcccacggggtggcccgcgcccgcgcccagccactcgtggtgcatcagcttctgcacttcgcggtacgcggcccctgcatgcaatcgctccgcggccgccgccgccgccgccgccgccgcggcgtccgggtgcataagcggcccggtgcccccggctccgccaccggggccccgcggcaggtactgcgcggtggtggccatgccgccccgcgccctgcgccgcgccgccgccgccgctccgctccgtctgcgggccccgccgcctcgctccgccggcttaaagccccgacccgctcggcgctccggagccccaccccgcccgccgcccattggctgcccgcggagctgcctcccgcctcccctgcccggcccccgccccgcgcgcccgcccgccaccctgcccggccgcccagagctctccattgggcgtcgctcccggggtcccgcgcgccggccgtgctgattggccgctggggcttcattcacggcccccctaccgtccgcgtacacactcacgccccgggggcgcggccgccacgtggggagtggcgcgggggtggccctgggaccgcaccccctctcgtcctggctgtgtgggccccgctttcccccagcgctggagactccgagcccggccggtcccacattccacgcgagctgaattcccgcccgcatcccgcccgggcagcagggattgccggctccgggaggcgctcgggctccgagaagcggctcagccccgcgcccctccctcctcagtaccgctgccggcggaccaggattcccgcgggtcctggcggctgcgagcgcgaggcggcgcggattcgcggctcggttccggcgcgactgctcaccgcgcccgcctcgcctcccgcggctgccagcgtgcactgggcgctcctcggcgcgtctgcccggcccgtctcggctttccttctccttcctctagtcccagcgtcacaactccgccgacctcctctgccctgagagcgcgtccggtgcgggcggagtcggacggactctggcttcacgcctcgcgcgggcacaccttctcccgggcactgaggcccaggtgagtaccgcgcgggcagctggggctgggacggcgggcggcagcggttctacagtcctacgcgagcccctggtacccggccgcgctccggggttccagaaggagaagatctcgaggtggagactgtggctccggggaaaacgctgctggcaagggcgctagttgggggtggacgttgggcccaggggtatctgacctgcgccgctgcagccttctcgctccttctcccagcttgaacggctcatcggctgtggtcgtggtgggatcacgccccgggagaggagaaggatgggctcagggaaggggctcgggctctccagaaatccggcgtgcaggccgggagctgtccagcctcgctaagagccctgggctagagtttgcccggacttgcctggagctgctgaaaagggaattgagattgaggaggccttgttggaaaggtgggcagtggaatttagctacctcctcacgccccagcccttgaggactccctgaaggatcttgagtggagtcggacctcactgcagttcctttgtgccttcttacccgaccttgggccccaggctgagggtactgagctgtgttttctcctcttccccacaccgaggcttgggtcccagggagtcttcagctgccagtcctccctcttttctctcctggatctagcctcaagtggatttatagcttacagggccctggggtcccagatcacagaactgagctgggggcccacctagggccccactgggcaaatcaggtctgtggaataaatccttagattgaaaaaagttgctgggggctcaggtggcagctgccattggaacgatccagggcggctgggacagagttgacagtgacaggggtcaccctgggcacagactttgatcatgtgggccctgaatgccctaggaccagccagggaaggagtgggacagagcagggcccttatcctgccattggccactgtcctgagcaggctccgtggtcccaccctagctgtaagagctgcgatggagctctgtgtctgaaccgagctagagatactgggctttcctggactctggcccagggaatggtcaccttgaggcagcccaggtctttcacctttcccaggcctgggaggtaggaggaagactgggaattccgcagtgaagtccatgctcgt

SEQ ID NO: 1668 - DNA, 4001 bp, Homo sapiens
ggtataactccagcctaagaagtctctggtctgcaaaatctgcatggacaaatccatttcaaaggggacttaagtctgtgcaggagctgtattttaagggaactgaattgggaacacagatgtttcttcagttagcagagttggcagaacagcttctggaccaaatccgagttcctaatgcgggaaggggccttggagagcatctacttcaacccactcattcaactgctgaggaaactgaggcccatgaggcagttaagtggcacacccagcaagtggcaagagtggcagtgttctgatgacaagtactgtgcgttttccattacaccatgattcgctttaaaaaaaaaaaaatcctaggctgacttcaaccttggaagtcctgttcattcttgtgaagcgctttctccctcccctaccgagttcataaatcctcctcgccctcccactccaattcctttaactcccaccgctcttccagctgtggcttccaacgactttggaaaacagaagtggaccatcgcctcaactttctgggggcgcaattaaatttgtggtccccaaacaagatcgcagctggctttcccagtgcctcaatgtgcccatcagggaaatggggctcatcacccctgctgcaccgagtcagagagtgggcgagctaaaactgatgcccctgaagccgcctaccacctggcacacagtaggcactcaagtgattgctgaagccgtgcccagcaccaagcccggggaaagcacctacaggagaggagcaagtgaaaaggccggctagccagtctggcgagcctgggcagcaaaggcggaagggctggatgtttacatacagccgccgggaaggcagctcggctccaggcaggagcccgactctcggggcgatccatttcactcggatggagggcgaccagctagctatacgctggctctagagcgcggctcaaccaacttcccctacgctaaaaggacgaacccacaccttccgcgggattccgcccgggcttccaacgtggagacgacttttactgagctggtttaacagttgcccacgaacgcttaagcacgcccagacccactcaagtacaggccaagaagtcggtgggatcggggagggcgggggcttcgggcctgggcggcgcaaaggctccccaggaaggctgcgggggccccccggagctgacggcgcggcgcggcgcggcgctgcgcggccccggactgggctgggacgcgcgccgagggacgaggggccgaggggccgagggacagcggggctgggctcacccatgaagaggcagaagaggtcgaggcagatgagcagcacccgcttgctgccgctcctcctcgggttgttgttgagcgccgggctgccgccgttcttgctctccgggacgatcgctttgtcgtacttgtagttttgcatggcgctggctgcggcgcgagcctcccgccccgcgaagacgtcccgcaacagcagccacacacccaggcgcccgggtcgcctcctggccgaggctgctgcggatagtggcgggtcggccccggctccgggcgcggcggctagagtgcagccggggctgcctgcctccaactgcagaaggtggtgttttctgctcctcctgcgcgcctctgctttcctctgtcaaccctaaatcgttctaaagtccaaggggaagagagccagatcccgagcagaaacttttgcagagctgcgcagcttggggcgcgctgttgtggcgcgcgtctgagtgcgcgagcgagcgagtgggcagcgcgggcgctcggccaccttcctccgcagctggttccttaatgaatgggagctgcgctgagcccagcaactccggagcgccagccccaactctaactttgcctcctcctcctcctcctcctccggctcctcctgctcctcctgctgttggtgctgctgccgcggcggctgctgctgtgatcgcctgggtttgttttctgcacttttatttcacgaggtcctttaaaaagagaagacgtggggggagagagagagagggacctccttacttggctcggatgggattccgaaagcacagccccttccttaagctgcctaagacgtaggataattaaggccacattttcccccacccccttcaaaaaaaaaaaaaaaagtcctaaaaggaaaagttactctcaaaccagagaaaccgggagcccctagcgttcagaaacaccaaattgtcaccaaagaaaaaatatatataaataaaaagaaacattttcttgctggccttgggtcaagtaaaagttagggctgtacagctaaaatgcatttttcctcacctacaaacctgaggctttcaggtctttattgtgacttgaattgtattaccctgaaaatataatttttaaggaaaacaagttgtttgtttgtttaagatcttaacatccaacaccgggtactacgctagattttgagaatactaaaatgaaaaagactgcacgactgtggaaccacatctcctggatttcaatcctgtgactctgtgcctcagtttccccgtatgtaactagagataactgttccttttcatatagggtggttgtgaagacttaatttgttaatccgtataagctcctagaacagtgcccagtacataggaagtgctctgtgagggttagcaattaccttttttctgggtgaaggagtctcaggcaacccctctcttggccccaagagtaattctactactatggggaattccagggcagccaaaatgctctctgcttgagtttcagacaatctaacatttttccttagaggctggcatcttatttttaattattttatgtgagttaatcttttttccagatagagaataaacatttccagggcaagggccttcccttgtatcttctatagtgcctagcatggacctgggcacagtggacaataaatggatgttttttccaggtggttctttgtgtgcattcagaaatggaaatatttgtagctttttgatacattatatgaatcatgttctttcttacactgacttgttttgggttttgataactttatatgcagccaccatcaaccctttctggtacaattgccctttctggtacaatcctttcacactccacacccctgctctcctgcacgctctgcctataatgcataccctttcctcctctagttagggaaatgcttctcttgctttagtatcctctgaaatgtcacctcctctctgagtactttcttcattcctgcacagaattaacttcactgtcaactctttgcttctaactatttttttttcccccgagatggcgtctcactctatcgcccaggctggagtgcagtgcctcaatcttggctcactgcaatctccgcctcccggattcaaaggattctcttgcctcagcctcctgagtagctgagattacaggctcgtgccaccacacacggctatttttgtatttttagtagagatggggcttcaccatgttggtcaggctggtctcaaattcctgacgtcatgatcgcctgcctcggcctcccaaagtgctaggattacaggcatgagcctatgtcagcctgatttggtgttacagatggtaaagactagcaaactgtgtaggttatcagcgccgcggcatctctctagtacctagcacgggatttgctgtgtactgaattaagctcaagttagcaccggttagtaagtggggcttgcaaagaaagacaacattgctatcttctggaagcaagaagatctgactctcccaagaagttttggagctgaagcatccaactgcaaatcacacacagcactctcaattcaaatagcacaggtaaaagccagggtagttcagaaggcagatgcttgagatagctttttcttgagaaacaccttctcttgaaaagttaaaagagtggaaacaaaacaaggccaggttcataattactgacattctaagaggaattcaggattccagggtctttgcctact

SEQ ID NO: 1669 - DNA, 4001 bp, Homo sapiens
acaaccacacctaccttatccatatttcttccttaacctacaatagcccccaactaatctacccactccactttctccttctctacttcgtctttcatactgatgccagaatgttgttctcaaacaaaaactttatctcattctcctacttatgtgtcccttagctccacaagaaaaagtccaagctccttaaaaaaggaaaataaagtcttctacaaagcaagccatctcttcagtcagctctccagccttaccaaagcacttcggttcacagcccactgcccactttcaaattcctactgccatactccacctggaatgacctttcccacttcgtacaccctctgctcattttgttttgatttttggtgtttttttttttttttgcgacggagtatcgctctcgtcgcccgggctggagtgcaatggcgagatctcagctcactgcaacctccgcctcctggtttcaagcgattcttctgcctcagcctcccgagtagctgggattacaggcgcctgccaccacgcccggctaatttttgtatttttttagtagagacggggtttcaccatgttggccaggctggtctcgaactcctgacctcaggcgatctgccctccttggcctcccaaagtgctgggattacaggcgtgagccaccgcgctcggttctgctcatcttttaaaacccagttcaattcatctcctccaagaagcttcatcgactcccccaggattcactcgccccatgatctgactgcactttgtacatacctccactagagcatttatcactctgtattgtaattatgtctgtgtccagctccctcactagattgtgaggtccatgagggagggcggtgtcttattcatctctgtatcccctgtgcctagcgaatacagatgcagaaaggccatctccagatcaagaggaaattaacccaagattggttatatgggattagatctctggaagagaagcgcccatcacctgcagtgggcccccagatgactggatcttgtgttcaggcatttcagagacaggaacatagaaatctgacacagccgcagccaggtaaaacatcgcagaagggcctgcaaagagaaacacaaggtgttaacaaatcggcgaggtacgatataggatcagctccttctcaactcgggttccccagctgagatccgtgggtaagcaggaggtaaggggataagtggctggaaagaaaggctgtgcttccaggcaaaaggggtactcctagggcacgcacctagcggattgagtgcctgggccgcagcctgcaacagatgcaaatagtccgccaaagtggtgaactctactgccaggaaggtgcctgcagccgcagcctcctggtagctcctcagagcctcagcaaaacccggaagtgcattctcctcggcctccaggctcagcaagcccgaaagggctgggcccgaaggccgcagagcggacagccaagtctggggtgggaagcggtgggcataggggaaggcagagcgagcgcgatacaagaacaggaccccgtagccggcggctaggaaggcctcggccgaggttgcaccgcgccgcccgctgctgaagttgtccaggaagcgcaccggccgcgcttccagtgggaccttggtgccgcctgacgtaaccaacaccacccgccggccctgcgcgcccagcctggccgcgaagcgagccataacctcagcccagcgcgcagcaccgggaggctgggggaactcggctaccggatccatttccgccatctgcagcgcagcggccggcgcctgcgcacgtttcgcggccgccgcgccacgccccttctcgcctacctggtgtacgcgccgcgccgtactgagtgggcggttcactacccttcttttgacactaggtcccgatctcgccaagtctggaaatgcgtagttgttctgccccagagcccagcgaaagtgacactgcaacgagggggatccccggctgggtgggcatctggtagggtcacgttccctcacgttcgtttcctagcctgggtgaagaactggccatgtttgacccttaccggccactgtacgggcctttctggacttggactccttgggagtcgtttctcggccatttgacccgtgggacttgtgggttttgtgctgctttttctttctttcttccccttttccaacttcagcaatacacccagatgttagtcgagtcacgtcccgccgccctctgcccttgaaatgctggcaagtacgcagccccgcgatcgtcacgtgacgccggggttcagcgtatccttgctgggcaaccgtcttagagaccagcactgctggctgcaccatgaatgtgatctacccactggcagtccccaaggggcgcagactctgctgtgaggtgtgcgaagccccagccgagcgggtgtgcgcggcctgcacagtcacttattactggtaggccctgaaacgtggcacctgggcgctataactccctccctctctccctttcccgggtctggcttgggtaccttgcgttagccgttgcccctgactctgcaagggacacctcaaaacggctttaagacaggcccctaagactcccgtggcctcgtctgtctcatctcccacttattcgtcactcatgttttctgaaggcgtactctgtgttatgcactattttaggtgctaaagttactggggcagctcggtagatcagttccttcaaagatctaacattccaatgtgggagacaaatcagtaaagaaacaggccgggcgcggtggctcacgcctgtaatcccagcacttcgggaggccgaggcgggcggatcgcctgaggtcaggagttcgagaccagcctggccaacatggtgaaaccctgtctctactaaaaaatacaaaaattaggcgggagtggtgctgggcgcctgtaatcccagctactcgggaggctgaagcagaagaatcgcttgaacccgggaggcggagctcgcagtgagcggagatcgcgccactgcactccagcttgggcaacgagagtgagacgatagtgaatggggcagtatgtggaaagctttccctgtggaagaaacatttgagctgcattttgagagggcagtcagaacctgctgtgtacaggagtagtgaagaagggtagggcattcccggcatccgggactgctagggcaaatggcaaaagaacagagtttgctaagggccgagtggagaacgtagtagtggagggagcagtcagtgattttcaaactgcaggccagggccctttagcagtttatgaataagtcacaatcaccatttagagaaaacaacaacaacaaaaaagagcacagaatgagtagaaagtatcaggttaatcctacctgaattgtttcttaaaacttttgtcttagtgttttatgtggacatgtgtgtgtgtacaggaaaaatgtatttcttactataggttgagtcaaaattagccggatgtggtggcgtgcacctgtaatcctagctactcgggaggctgaagcaggagaatcgtttgaacccgggaggcggaggttgcagtgagccgagatcgctccattgcactccagcttgggcaacaagagtgaaactgtgtctcaaaaaaaaaaaaaaaagttggaacatcattgtgataggtagtagaagtttaaaccaagaagataaaggttagggctagacagtgacatgagatcaagggtttggaatttatctcctgggaaaccatgaatggttttgagctgacatgctctcatttgtgttaaggaaagaggatgggctgcagtgtggcagatacagaggaaggtagacactgacggctgcataacagatcaagaagctgttgcagtaccttctcatactggcctaggtgtccttcctcagtgctctcaaagcactgagtatgtcccctatcctaacacttaggacatggactgaaatcatttatttatttctttcattaggctgtatgccccacaaggg

SEQ ID NO: 1670 - DNA, 4001 bp, Homo sapiens
tcatctctaagtcctacagcagtgtaggacctcaataaactattctacaaagtcggcaaatgccccacagataagagtttctcctaataaaatcctacctgtatcacccaataaatgactaagaactcctgaaggttccaaaaatctaaaatcacaaccacacctaccttatccatatttcttccttaacctacaatagcccccaactaatctacccactccactttctccttctctacttcgtctttcatactgatgccagaatgttgttctcaaacaaaaactttatctcattctcctacttatgtgtcccttagctccacaagaaaaagtccaagctccttaaaaaaggaaaataaagtcttctacaaagcaagccatctcttcagtcagctctccagccttaccaaagcacttcggttcacagcccactgcccactttcaaattcctactgccatactccacctggaatgacctttcccacttcgtacaccctctgctcattttgttttgatttttggtgtttttttttttttttgcgacggagtatcgctctcgtcgcccgggctggagtgcaatggcgagatctcagctcactgcaacctccgcctcctggtttcaagcgattcttctgcctcagcctcccgagtagctgggattacaggcgcctgccaccacgcccggctaatttttgtatttttttagtagagacggggtttcaccatgttggccaggctggtctcgaactcctgacctcaggcgatctgccctccttggcctcccaaagtgctgggattacaggcgtgagccaccgcgctcggttctgctcatcttttaaaacccagttcaattcatctcctccaagaagcttcatcgactcccccaggattcactcgccccatgatctgactgcactttgtacatacctccactagagcatttatcactctgtattgtaattatgtctgtgtccagctccctcactagattgtgaggtccatgagggagggcggtgtcttattcatctctgtatcccctgtgcctagcgaatacagatgcagaaaggccatctccagatcaagaggaaattaacccaagattggttatatgggattagatctctggaagagaagcgcccatcacctgcagtgggcccccagatgactggatcttgtgttcaggcatttcagagacaggaacatagaaatctgacacagccgcagccaggtaaaacatcgcagaagggcctgcaaagagaaacacaaggtgttaacaaatcggcgaggtacgatataggatcagctccttctcaactcgggttccccagctgagatccgtgggtaagcaggaggtaaggggataagtggctggaaagaaaggctgtgcttccaggcaaaaggggtactcctagggcacgcacctagcggattgagtgcctgggccgcagcctgcaacagatgcaaatagtccgccaaagtggtgaactctactgccaggaaggtgcctgcagccgcagcctcctggtagctcctcagagcctcagcaaaacccggaagtgcattctcctcggcctccaggctcagcaagcccgaaagggctgggcccgaaggccgcagagcggacagccaagtctggggtgggaagcggtgggcataggggaaggcagagcgagcgcgatacaagaacaggaccccgtagccggcggctaggaaggcctcggccgaggttgcaccgcgccgcccgctgctgaagttgtccaggaagcgcaccggccgcgcttccagtgggaccttggtgccgcctgacgtaaccaacaccacccgccggccctgcgcgcccagcctggccgcgaagcgagccataacctcagcccagcgcgcagcaccgggaggctgggggaactcggctaccggatccatttccgccatctgcagcgcagcggccggcgcctgcgcacgtttcgcggccgccgcgccacgccccttctcgcctacctggtgtacgcgccgcgccgtactgagtgggcggttcactacccttcttttgacactaggtcccgatctcgccaagtctggaaatgcgtagttgttctgccccagagcccagcgaaagtgacactgcaacgagggggatccccggctgggtgggcatctggtagggtcacgttccctcacgttcgtttcctagcctgggtgaagaactggccatgtttgacccttaccggccactgtacgggcctttctggacttggactccttgggagtcgtttctcggccatttgacccgtgggacttgtgggttttgtgctgctttttctttctttcttccccttttccaacttcagcaatacacccagatgttagtcgagtcacgtcccgccgccctctgcccttgaaatgctggcaagtacgcagccccgcgatcgtcacgtgacgccggggttcagcgtatccttgctgggcaaccgtcttagagaccagcactgctggctgcaccatgaatgtgatctacccactggcagtccccaaggggcgcagactctgctgtgaggtgtgcgaagccccagccgagcgggtgtgcgcggcctgcacagtcacttattactggtaggccctgaaacgtggcacctgggcgctataactccctccctctctccctttcccgggtctggcttgggtaccttgcgttagccgttgcccctgactctgcaagggacacctcaaaacggctttaagacaggcccctaagactcccgtggcctcgtctgtctcatctcccacttattcgtcactcatgttttctgaaggcgtactctgtgttatgcactattttaggtgctaaagttactggggcagctcggtagatcagttccttcaaagatctaacattccaatgtgggagacaaatcagtaaagaaacaggccgggcgcggtggctcacgcctgtaatcccagcacttcgggaggccgaggcgggcggatcgcctgaggtcaggagttcgagaccagcctggccaacatggtgaaaccctgtctctactaaaaaatacaaaaattaggcgggagtggtgctgggcgcctgtaatcccagctactcgggaggctgaagcagaagaatcgcttgaacccgggaggcggagctcgcagtgagcggagatcgcgccactgcactccagcttgggcaacgagagtgagacgatagtgaatggggcagtatgtggaaagctttccctgtggaagaaacatttgagctgcattttgagagggcagtcagaacctgctgtgtacaggagtagtgaagaagggtagggcattcccggcatccgggactgctagggcaaatggcaaaagaacagagtttgctaagggccgagtggagaacgtagtagtggagggagcagtcagtgattttcaaactgcaggccagggccctttagcagtttatgaataagtcacaatcaccatttagagaaaacaacaacaacaaaaaagagcacagaatgagtagaaagtatcaggttaatcctacctgaattgtttcttaaaacttttgtcttagtgttttatgtggacatgtgtgtgtgtacaggaaaaatgtatttcttactataggttgagtcaaaattagccggatgtggtggcgtgcacctgtaatcctagctactcgggaggctgaagcaggagaatcgtttgaacccgggaggcggaggttgcagtgagccgagatcgctccattgcactccagcttgggcaacaagagtgaaactgtgtctcaaaaaaaaaaaaaaaagttggaacatcattgtgataggtagtagaagtttaaaccaagaagataaaggttagggctagacagtgacatgagatcaagggtttggaatttatctcctgggaaaccatgaatggttttgagctgacatgctctcatttgtgttaaggaaagaggatgggctgcagtgtggcagatacagaggaaggtagacactgacggctgcataaca

SEQ ID NO: 1671 - DNA, 4001 bp, Homo sapiens
ccagagagagacggctttggtttgaatctcatctccaccaaacactagttgtgcaaccataggaacattttttaacctctctgtgcctcagtttcttcatctgtaaaatagggatggtaaagtacttacctcatagatagctgtgaggatcaaatgaggaaaatacatgtaaagcccttagcactgtgcctggcacaaagcaagcactacataaatgctatcagtttccatccatacaaactcaaaggctgactacacccagagaacagaaaggccaagcaggcctgaatagacagtctgcagagtttcagatcatcacaggacagtctggtcaaccctgagaggcggcagcttctctgaaatcatcctacaaacctatccagcggacaaaggcccagaagaggggagggtggagaacagaagagtagagaaggaaggaagggagccagggacagaaaggtactctaacacccatcctctatgacccaagccccctagctccccttcaggctcctgcagcctctcagctcctggatagctgctatattcttataaacagaaagagcaaagaagtcgggggagaaagaaaaagaggcaccttcagactgtgactcccccatcggactgaggatttcttaagggcagagtgaatcttcccctgagactaggagttccctctttctccatctatatcttctaataccccagtgctctaaatgatatttagaggacctggattcaggacagagcatgacgaataattgcactttcccaaaagatcaaactcggcatttttctgccccatatctttcctcattctcccctaatctccctaggcagactcagacagcatgaactcacagctgcttctcggaaaactccaggtgccatcccaagggccagttaacctgtcatccctccctcgtctccgccatgaaccacagcttttgttccagaaagtctgccaattccatcttacccgtgaagctcccccaccccccacgcccgaccaccagatacacacgcctgcacgcccaggcacacgcacacacacttcagtggggcctcagggactgttggctgcctgccagcccccacctcttgcccaccaggaggccaaggcaagcgggggggggggcacagctgttgcagctgacgatggcctcaaccccagggctgcagctgtcattgacacgggagggaaggggaaggatttgccccacacaccagccgtctgcgtaactggagccaggcacgcggccgaattgaccccaaactccctgaggagatccctccaccccctcaccttggcagactcttccctcaatgccgagtagcggcgatgcacgcctgggggtgcgtgtgtggttgtgcccagggagaaccgcacgtctgctgcactgcccatgtgcgaccttgagcggtgatgggggagagaaaagacaggccctgaggactgagacccccagctcacacccagtgggcccaaagagtcaagggatcttcagctcagagaagagacatcttagcaggacacagagctgtcacaaatgtctgaagggctgccgtgtaagcaagagagcagacgtatgccctggtgctccaggggtcagaatgagccaggggagaaagttccagagagcggttttccgtctggcataagaaggatcttctaatggcaagagttggcttacgatgcaactggtggcttttaaaaagttgagctccccatcaaagaggtattcgagcagaggctctccggccatctgacacacgtggcgcaggagggctccaggcactgggagatgttggaagggatgatgtctagaggcccttttcactctgagggtctttgttttttggtcttctacccagcacttttcctcgggtctccccataatctggactgagtccctggttaaaattcaagccaggcatacccctatgcctaggaagctttaggaggccctaacactgtcagaaacacaagccagagaaaatactttgccccaagagtctattccaaccctgagattttaggacccaagcaacaatcccctggaatatctggaagcctcccctagtgatacttcctccctgtgccttcctacttggaacccttgagggagtccagagtgaagggacacagtgagcctacaacagaccatacgaggtcactggagggagagggaagttcctgcatgttccccttttctccctgcaactcagccccaattccacgatgaatccaatgattctatagtcgaacccaagcattcccaaccattaagaaaaaaaaaaaaagccaagcagtggcaaatggcttggtgtactgtgggccgtattttactaattgaggggttgtctcttctggtcaggatgggagaagtaggagaaatgccaactactgttgcctgtctccatcctctgcttcccttcatacccatatacaataattcctggcgagcgtggagatggcacttaagtctctaccaccccagacacccgtgggcttctcttcttcaagctcaacatccccttccctatttcaaccactgcccctccacacatatctatatggatatttccattaacctttcttcatggtagttcatctccatttccctgatacagcaagcacatgaccaaagggaacggcaagggttctgatctaagagactttggtttggagagaaaacagccaagagccatgaaccttgagtggcaccatccatttcagtctcccctgtcttcaccccacctctctggcctgggtactgaggacaggctcgaggtctgaattcaatacccatcgctccacaaaatgtgggggaaatcccgaggttccctaaacatgggcctaattcaagcattaggagataagctccatctctcacaatggtttcaagaaaagggatgccaagtccataggattgccatggcgtctcaacttccagtaaggaagtttctgatgcttcattccaatctctcctgctgcctttctgcccgctgcctgaactcaggtggtccttgactctcaagagaactggagtgaatggctctccctaccagtgggccctgtaggacatggctaagcaagggatgtgcaggcctctctcaggggtgtgccctctgtcaaggaagcagaaatcatggcctatgtcctaccacagcggggacagagcactggctgtctgatgactcgcctctcagcagccctcggaggacaggtgttccctcccaaactgcccaagtaagctgggtgactctgaccaagttatctgagcctcagtgtcccaccctgaacaggaggaggaccctgaggtcctgggcagtcttttgttggaaggaagtctccttcctcacggtccatcaggaccccgtcctggcatgcccagcctctggcgctgcagtacctggagtggacgccatccacaaacggcccccctcggcccttcagctggtccacctcttggcgcagcttctcaatctcttcagacaggcggccctgtgccagcagacccggggtgggggcgggagtgggggccagggaggggcagagagggagggtgggagtcagagagggacaaagaggacagcagagttggggagaagctgaagaatgtactgcaaagtccaaagccaggggccccaggccaggcccacagatgacaccaaaagagaagaggtccaaccagagagtgagtggaaggatgggcaggggcagggccaggagggggtctgtctggggagggctctgctagcctaggcctgccgacccctcactactgcacagatgcacagcagatgaggctgggcagcagagggccccagcaccccctcagacctcacagacattgccgaggccaggacggaggcaaatcctcccagaatcaccaggctctggctgcaccagggtttgaagctccctccaaatcctggggtggagcccctcactgggccctgcctctctgctgtccacctctgccctatgcttctgg

SEQ ID NO: 1672 - DNA, 4001 bp, Homo sapiens
aacaattgcagcaattgctcaatcctaggctaactgcaaagccaccagcaccactcccacttgttcgctttgcaacagatattgtagcagctgctacatggcctccaccagaaacaagagaaagcataactgaatctgcttctttttttattaattccgaagtggaaattcagcactggcaaacagatgggcaaaacctaagtcatatgcttgtaccctagctgcaaaggaggctgagaaagcaagcatttggcattttagcttctaaagcaggaggtggtttcttgttttcgtcaaaactgagaggctgaggaattcctcaaacacagcaacaaacatcaaataataaattttcatgctttaacttgctcaatatcaatataaactttcccttttgaaagtaaacacgaaagacccaagcttccttctaacagagtgcaactatttctctaataattgaacatgtacctacaatctcttgaacaatgaaacaataaaaaattctcaatcacagcatgtactctaagtctaagaattctgggttatgtccattcctctacgaagttcttcactatactctcttgacattctgccatatatcatttaaaaattaagttaatcaccctcaataagccctgttttaaaaagagggataaatggagaggaaagaaggaaagttgttaagatacataagtatgcacaggacaatacaagagaaacaatgtgtttggatgtcaaggctctcctttctgcaagtggccagcaggtcactattggcatctatggccatgtgccctcagctaacacctctgctagtcagggttttgccttgtgagatgaccaaatattcattcctgacagagaaatgtccttgataatctttttgtgtgagcgtgccatggtcattgttaatttctttcatttaacaaaataatagactttattttttgagcagttttagctttatggaaagatcgagcagaaagtacagagttctcacatactgtcacctttatcccacccccagtttacattagggttcactctttgtgtggtacaggtctaggagttttgcaaaacgcataatgtcatgtacccatcattacattattaccaatgtattttcaatcccctaaaaatcgcctgtttcagaactatttatctccctacccatccccaaactcctggcaaccactgagcttttttgttgttgttgttgttacttagtttttatttcataatcataaacttaactcaactctgcaatccagctaggcatggaagggaacaaggaaaacatggaacccaaagggaactgcagcaagagcacaaagattctaggatattgcaagcaaatgtggtggaggggtgctctcctgagctacagaaggaatgggtctggtggtgaaaataaaacacaagtcaaactcattagaattgtccacagtcagcaatggtgatcttcttgctggtcttgctattcctgtacccaaagtgctccatggcttccacaatattcacacgttctttcaccttgccaaaggccacatgcttgccatccaaccactcagtcttggcagcacagatgaaaaactgggaaccatttgtgttgggtccagcatttgccatggacaagatgccagaacctgtatgctttcggatgaggttctcatcatcaaatttctccccatagatggacttgtcaccagtgccattatggcgtgtgaagtcaccaccctgacacataaaccctggaataattctgtgaaagcaggaacccttataacgaaatcctttctctccagtgctcagagcacgaaagttttccgctgtctttagaatcttgtctgcaaacagtttgatggagatgcggcccaagggcttgccgtcgacggtgatgtcaaaaaagacgacggagttgaccatggctgatagtacagggctcacagtgatggtggcgtctgcaaagataaccactgatctttttactgtctttatagtttgtccttttccagaatgtcgtatagttgaaatcacagtatgtacccttttcagactggcttctttcacttagcaaaatgtctttgttttttctgtatctttttgtggcttgatagttttttccttttagcactgaataatattccactgtaggaatataccacagtttgcttatgcagtcacctattgaaggataccttggttgcttccaagttgtggcagtcttcattaatttctttctttctttctttctttctttctttctttctttctttctttctttctttctttctttctttcttcttttttttttttttttttttttgagacagagtcttgctctgtcacccaggctggagtgaagtggcacaatctcagctcattgcaacctctgcctcccaggttcaagtgattctcttcctcagcctctggagtagctgggattacaggtgtgcaccaccacgcctggttagtcttcaggaatatttacaggactgtatagaattaggagccatcaaaggggatccctgaattctttctgtttttcttacaaataccagttttaaggtcaagatttactaccccatgcaacaatgtagccgcattttaaattttaaatttttgacagtttgtttaaaggtctcaggcaacctaaaaggctagatagaagtctctcatcctctaacgaaggatggattgtaaaatggaatactgctaagactctccctttgggtactaattctgcaaaaacctagaatctcagagacaagagacaagtatttggagtggatcattagatgtaatgacaaaaggagtcacttcaacgttcataacaaatatcaaagattgttgtattttttatatgggagacaccagacaagcttatacttagttactagttcagaggatacaccaccacatcgtctagcatgagtacaaccttataagccattgtctccagctggcactgtgattgagtctttaataaaatattcaccattgtataataataataattttggttggtgataggataaatggtggaccaggtgagtccaatgaatatctactcatttgttatacaacaagttcttttaatagaaggatgtagaacaggatattatggcagtatatataaggcattcaatgtacccatggagagtggcgatcagagaaaaatgatgtcaggtaaagcaaatgtaattcaaggataaaggtagattccatttacaaaattccttgttgcctttatcatagaggagctccagtaaaatcaacaagtctgacaaaaggtgactggtttattcacccaggatatgttattgtgtgcttagccttggactttgttgcttgtgtgttggacacctaatagtcttgacagctaaataggcttttgtaagcgagagtggtaaagtccaacatgttgctaaacctatgtgtattctctactgctaccaccaatgttgctgtttattagccttctgagcaagcaatgtagtgcctggtgaaagagattgtttcataccttcatatctatttgataaccttcctgatgatagtttggtgagcatttgtattaagcacaaatattcttacactctggctcattttctgtggttcatctacatattttttccccaaaactcattgccaccaatccttcagtgtttgtctttctgagtccctaattatcttttcttttcttttcttttttttttttttttgagacagagtttcactttgttgcccaggctggagtgcagtggtgcaatcttggttcactgcaacttcttcctcctggattcaagagattctcctgcctcagcctcccaagtagctaggattgcaggcacacaccaccacatctggctaatttttgtatttttagtagagacggagtttcaccatgtcagccaggctggtttcgaactcctgacctcagacaatccacctgtcctgtcctccaaaagttctgggattacaggtgtgaaccatcaggc

SEQ ID NO: 1673 - DNA, 4001 bp, Homo sapiens
aacaattgcagcaattgctcaatcctaggctaactgcaaagccaccagcaccactcccacttgtttgctttgcaacagatattgtagcagctgctacatggcctccaccagaaacaagagaaagcataactgaatctgcttctttttttattaattccgaagtcgaaattcagcactggcaaacagattggcaaaacctaagtcatatgcttgtaccctagctgcaaaggaggctgagaaagcaagcatttggcattttagcttctaaagcaggaggtggtttcttgttttcatcaaaactgagaggctgaggaattcctcaaacacagaaacaaacatcaaataataaatattcatgctttaacttgctcaatatcaatataaactttcccttttgaaagtaaacacgaaagacccaagcttccttctaacagagtgcaactatttctctaataattgaacatgtacctacaatctcttgaacaatgaaacaataaaaaattctcaatcacagcatgtactctaagtctaagaattctgggttatgtccattcctctacgaagttcttcactatactctcttgacattctgccatatatcatttaaaaattaagttaatcaccctcaataagccctgttttaaaaagagggataaatggagaggaaggaaggaaagttgttaagatacataagtatgcacaggacaatacaagagaaacaatgtgtttggatgtcaaggctctcctttctgcaagtggccagcaggtcactattggcatctatggccatgtgccctcagctaacacctctgctagtcagggttttgccttgtgagatgaccaaatattcattcctgacagagaaatgtccttggtaatctttttgtgtgagcgtgccatggtcattgttaatttctttcatttaacaaaataatagactttattttttgagcagttttagctttatggaaagatcgagcagaaagtacagagttctcacatactgtcacctttatcccacccccagtttacattagggttcactctttgtgtggtacaggtctaggagttttgcaaaacgcataatgtcatgtacccatcattacattattaccaacgtattttcaatcccctaaaaatcgcctgtttcagaactatttatctccctacccatccccaaactcctggcaaccactgagcttttttgttgttgttgttgttacttagtttttatttcataatcataaacttaactcaactctgcaatccagctaggcatggaagggaacaaggaaaacatggaacccaaagggaactgcagcaagagcacagagattctaggatattgcaagcaaatgtggtggaggggtgctctcctgagctacagaaggaatgggtctggtggtgaaaataaaacacaagtcaaactcattagaattgtccacagtcagcaatggtgatcttcttgctggtcttgctattcctgtacccaaagtgctccatggcttccacaatattcacacgttctttcaccttgccaaaggccacatgcttgccatccaaccactcagtcttggcagtgcagatgaaaaactgggaaccatttgtgttgggtccagcatttgccatggacaagatgccagaacctgtatgctttcggatgaggttctcatcatcaaatttctccccatagatggacttgtcaccggtgccattagggcgtgtgaagtcaccaccctgacacataaaccctggaataattctgtgaaagcaggaacccttataacgaaatcctttctctccagtgctcagagcacgaaagttttctgctgtctttggaatcttgtctgcaaacagtttgatggagatgcggcccaagggcttgccgtcgacggtgatgtcaaaaaagacgacggagttgaccatggctgatagtacagggctcacagcgatggtggcgtctgcaaagataaccactgatctttttactgtctttatagtttggccttttccagaatgtcgtatagttgaaatcacagtatgtacccttttcagactggcttctttcacttagcaaaatgtctttgttttttctgtatctttttgtggcttgatagttttttccttttagcactgaataatattccactgtaggaatataccacagtttgcttatgcagtcacttattgaaggacatcttggttgcttccaagctttggcagtcttcatttctttctttctttctttctttctttctttctttctttctttctttctttctttctttctttcttttctttctttctttctttctttctttctttctttctttctttctttctttctttctttcttcttcttttttttttttttggagacagagttttgctctgtcacccaggctggagtgaagtggtacaatctcagctcattgcaacctccgcctcccaggttcaagtgattctcttcctcagcctctggagtagctgggattacaggtgtgcaccaccacgcctggttagtcttcaggaatatttacaggactgtatagaattaggagccatcaaaggggatccctgaattctttctgtttttcttacaaataccagttttaaggtcaagatttactaccccatgcaacagtgtagccgcattttaaattttaaatttttgactgtttgtttaaaggtctcaggcaacctaaaaggctagatagaagtctctcatcctctaacgaaggatggattgtaaaatggaatactgctaagactctccctttgggtactaattctgcaaaaacctagaatctcagagacaagagacaagtatttggagtggatcattagatgtaatgacaaaaggagtcacttcaacattcataacaaatatcaaagattgttgtattttttatatgggagacaccagacaagcttatacttagttactagttcagaggatacaccaccacatcctctagcatgagtacaatcttataagccattgtctccagctggcactgtgattgagtctttaataaaatattcaccattctataataataataattttggttagtgataggataaatggtggaccaggtgagtccaatgaatatctactcatttgttatacaacaagttcttttaatagaaggatgtagaacaggatattatggcagtatatataaggcattcaatgtacccgtggagagtggcgatcagagaaaaatgatgtcaggtaaagcaaatgtaattcaaggatgaaggtagattccatttacaaaattccttgttgcctttatcatagaggagctccaataaaatcaacaagtctgacaaaaggtgactgatttattcacccaggatatgttattgtgtgcttagccttggactttgttgcttgtgtgttggacacctaatagtcttgacagctaaataggcttttgtaagcgagagtggtaaagtccaacatgttgctaaacctatgtgtattctctactgctaccaccaatgttgctgtttattagccttctgagcaagcaatgtagtgcctggtgaaagagattgtttcataccttcatatctatttgataaccttcctgatgatagtttggtgagcattcgtattaagcacaaatattcttacactctggctcattttctgtggttcatctacatattttttccccaaaactcattgccaccaatccttcagtctttgtctttccgagtccctaattatcttttcttttcttttcttttttttttttttttgagacagagtttcgctttgttgcccaggctggagtgcagtggtgcaatcttggttcactgcaacttcttcctcctggattcaagagattctcctgcctcagcctcccaagtagctaggattgcaggcacacaccaccacatctggctaatttttgtatttttagtagagacggagtttcaccatgtcagccaggctggtttcgaactcctgacctcagacaatccac

SEQ ID NO: 1674 - DNA, 4001 bp, Homo sapiens
gtagaactgttgagaaggctagagagccagatcaaagctaggcagccaggaaatgtaccccaaaccatgctgtagaactcatccagggaggaaaccactgtcaccaccagtaagaagtaacaccgaagatgcagagagcaacaattgcagcaattgctcaatcctaggctaactgcaaagccaccagcaccactcccacttgttcgctttgcaacagatagctgcaaaggaggctgagaaagcaagcatttgacattttagcttctaaagcaggaggtggtttcttgttttcgtcaaaactgagaggctgaggaattcctcaaacacaggaacaaacatcaaatagtaaatattcatgctttaacttgctcaatatcaatataaactttcccttttgaaagtaaacacgaaagacccaagcttccttctaacagagtgcaactatttctctaataattgaacatgtacctacaatctcttgaacaatgaaacaataaaaaattctcaatcacagcatgtactctaagtctaagaattctgggttatgtccattcctctacgaagttcttcactatactctcttgacattctgccatatatcatttaaaaattaagttaatcaccctcaataagccctgttttaaaaagagggataaatggagaggaaagaaggaaagttgttaagatacataagtatgcacaggacaatacaagagaaacaatgtgtttggatgtaaaggctctcctttctgcaagtggccagcaggtcactattggcatctatggccatgtgccctcagctaacacctctgctagtcagggttttgccttgtgagatgaccaaatattcattcctgacagagaaatgtccttgataatctttttgtgtgagcgtgccatggtcattgttaatttctttcatttaacaaaataatagactttattttttgagcagttttagctttatggaaagatcgagcagaaagtacagagttctcacatactgtcacctttatcccacccccagtttacattagagttcactctttgtgtggtacaggtctaggagttttgcaaaacgcataatgtcatgtacccatcattacattattaccaacgtattttcaatcccctaaaaatcgcctgtttcagaactatttatctccctacccatccccaaactcctggcaaccactgagcttttttgttgttgttgttgttacttagtttttatttcataatcataaacttaactcaactctgcaatccagctaggcatggaagggaacaaggaaaacatggaacccaaagggaactgcagcaagagcacaaagattctaggatattgcaagcaaatgtggtggaggggtgctctcctgagctacagaaggaatgggtctggtggtgaaaataaaacacaagtcaaactcattagaattgtccacagtcagcaatggtgatcttcttgctggtcttgctattcctgtacccaaagtgctccatggcttccacaatattcacacgttctttcaccttgccaaacgccacatgcttgccatccaaccactcagtcttggcagcgcagatgaaaaactgggaaccatttgtgttgggtccagcatttgccatggacaagatgccagaacctgtatgctttcggatgaggttctcatcatcaaatttctccccatagatggacttgtcaccggtgccattagggcgtgtgaagtcaccaccctgacacataaaccctggaataattctgtgaaagcaggaacccttataacgaaatcctttctctccagtgctcagagcacgaaagttttctgctgtctttggaatcttgtctgcaaacagtttgatggagatgcggcccaagggcttgccatccctggtgatttcaaaaaagacgacggagttgaccatggctgatagtacagggctcacagcgatggtggcgtctgcaaagataaccactgatcttttcactgtctttatagtttggccttttccagagtgttgtatagttgaaatcacagtatgtacccttttcagactggcttctttcacttagcaaaatgtctttgtttttctgtatctttttgtggcttgatagttttttccttttagcactgaataatattccactgtaggaatataccacagtttgcttatgcagtcacctattgaaggacatcttggttgcttccaagttgtggcagtcttcatttctttctttctttctttctttctttctttctttctttctttctttctttctttctttcttctttttttttttttttttttgagacagagtcttgctctgtcacccaggctggagtgaagtggcacaatctcagctcattgcaacctccgcctcccaggttcaagtgattctcttcctcagcctctggagtagctgggattacaggtgtgcaccaccatgcctggttagtcttcaggaatatttacaggactgtatagaattaggagccatcaaaggggatccctgaattctttctgtttttcttacaaataccagttttaaggtcaagatttactaccccatgccacagtgtagccgcattttaaattttaaatttttgactgtttgtttaaaggtctcaggcaacctaaaaggctagatagaagtctctcatcctctaacgaaggatggattgtaaaatggaatactgctaagactctccctttgggtactaattctgcaaaaacctagaatctcagagacaagagacaagtatttggagtggatcattagatgtaatgacaaaaggagtcacttcaacattcataacaaatatcaaagattgttgtattttttatataggagacaccagacaagcttatacttagttactagttcagaggatacaccaccacatcctctagcatgagtacaaccttataagccattgtctccagctggcactgtgattgagtctttaataaaatattcaccattctgtaataataataattttggttagtgataggataaatggtggaccaggtgagtccaatgaatatctactcatttgttatacaacaagttcttttaagagaaggatgtagaacaggatattatggcagtatatataaggcattcaatgtacccgtggagagtggcgatcagagaaaaatgatgtcaggtaaagcaaatgtaattcaaggttaaaggtagattccatttacaaaattccttgttgcctttatcatagaggagttccaataaaatcaacaagtctgacaaaaggtgactggtttattcacccaggatatgttattgtgtgcttagccttggactttgttgcttgtgtgttggacacctaatagtcttgacagctaaataggcttttgtaagcgagagtggtaaagtccaacatgttgctaaacctatgtgtattctctactgctaccaccaatgttgctgtttattagccttctaagcaagcaatgtagtgcctggtgaaagagattgtttcataccttcatatctatttgataaccttcctgatgatagtttggtgagcattcgtattaagcacaaatattcttacactctggctcattttctgtggttcatctacatattttttccccaaaactcattgccaccaatccttcagtctttgtctttccgagtccctaattatcttttcttttcttttttttttttttttttttgagacagagtttcgctttgttgcccaggctggagtgcagtggtgcaatcttggttcactgcaacttcttcctcctggattcaagagattctcctgcctcagcctcccaagtagctaggattgcaggcacacaccaccacatctggctaatttttgtatttttagtagagacggagtttcaccatgtcagccaggctggtttcgaactcctgacctcagacaatccacctgtcctgtcctccaaaagttctgggattacaggtgtgagccatcaggcctggccccaagtcccta

SEQ ID NO: 1675 - DNA, 4001 bp, Homo sapiens
tagaactgttgagaaggctagagagccagatcaaagctaggcagccaggaaatgtaccccaaaccatgctgtagaactcatccagggaggaaaccactgtcaccaccagtaagaagtaacaccgaagatgcagagagcaacaattgcagcaattgctcaatcctaggctaactgcaaagccaccagcaccactcccacttgttcgctttgcaacagatagctgcaaaggaggctgagaaagcaagcatttgacattttagcttctaaagcaggaggtggtttcttgttttcgtcaaaactgagaggctgaggaattcctcaaacacaggaacaaacatcaaatagtaaatattcatgctttaacttgctcaatatcaatataaactttcccttttgaaagtaaacacgaaagacccaagcttccttctaacagagtgcaactatttctctaataattgaacatgtacctacaatctcttgaacaatgaaacaataaaaaattctcaatcacagcatgtactctaagtctaagaattctgggttatgtccattcctctacgaagttcttcactatactctcttgacattctgccatatatcatttaaaaattaagttaatcaccctcaataagccctgttttaaaaagagggataaatggagaggaaagaaggaaagttgttaagatacataagtatgcacaggacaatacaagagaaacaatgtgtttggatgtaaaggctctcctttctgcaagtggccagcaggtcactattggcatctatggccatgtgccctcagctaacacctctgctagtcagggttttgccttgtgagatgaccaaatattcattcctgacagagaaatgtccttgataatctttttgtgtgagcgtgccatggtcattgttaatttctttcatttaacaaaataatagactttattttttgagcagttttagctttatggaaagatcgagcagaaagtacagagttctcacatactgtcacctttatcccacccccagtttacattagagttcactctttgtgtggtacaggtctaggagttttgcaaaacgcataatgtcatgtacccatcattacattattaccaacgtattttcaatcccctaaaaatcgcctgtttcagaactatttatctccctacccatccccaaactcctggcaaccactgagcttttttgttgttgttgttgttacttagtttttatttcataatcataaacttaactcaactctgcaatccagctaggcatggaagggaacaaggaaaacatggaacccaaagggaactgcagcaagagcacaaagattctaggatattgcaagcaaatgtggtggaggggtgctctcctgagctacagaaggaatgggtctggtggtgaaaataaaacacaagtcaaactcattagaattgtccacagtcagcaatggtgatcttcttgctggtcttgctattcctgtacccaaagtgctccatggcttccacaatattcacacgttctttcaccttgccaaacgccacatgcttgccatccaaccactcagtcttggcagcgcagatgaaaaactgggaaccatttgtgttgggtccagcatttgccatggacaagatgccagaacctgtatgctttcggatgaggttctcatcatcaaatttctccccatagatggacttgtcaccggtgccattagggcgtgtgaagtcaccaccctgacacataaaccctggaataattctgtgaaagcaggaacccttataacgaaatcctttctctccagtgctcagagcacgaaagttttctgctgtctttggaatcttgtctgcaaacagtttgatggagatgcggcccaagggcttgccatccctggtgatttcaaaaaagacgacggagttgaccatggctgatagtacagggctcacagcgatggtggcgtctgcaaagataaccactgatcttttcactgtctttatagtttggccttttccagagtgttgtatagttgaaatcacagtatgtacccttttcagactggcttctttcacttagcaaaatgtctttgtttttctgtatctttttgtggcttgatagttttttccttttagcactgaataatattccactgtaggaatataccacagtttgcttatgcagtcacctattgaaggacatcttggttgcttccaagttgtggcagtcttcatttctttctttctttctttctttctttctttctttctttctttctttctttctttcttctttttttttttttttttttgagacagagtcttgctctgtcacccaggctggagtgaagtggcacaatctcagctcattgcaacctccgcctcccaggttcaagtgattctcttcctcagcctctggagtagctgggattacaggtgtgcaccaccatgcctggttagtcttcaggaatatttacaggactgtatagaattaggagccatcaaaggggatccctgaattctttctgtttttcttacaaataccagttttaaggtcaagatttactaccccatgccacagtgtagccgcattttaaattttaaatttttgactgtttgtttaaaggtctcaggcaacctaaaaggctagatagaagtctctcatcctctaacgaaggatggattgtaaaatggaatactgctaagactctccctttgggtactaattctgcaaaaacctagaatctcagagacaagagacaagtatttggagtggatcattagatgtaatgacaaaaggagtcacttcaacattcataacaaatatcaaagattgttgtattttttatataggagacaccagacaagcttatacttagttactagttcagaggatacaccaccacatcctctagcatgagtacaaccttataagccattgtctccagctggcactgtgattgagtctttaataaaatattcaccattctgtaataataataattttggttagtgataggataaatggtggaccaggtgagtccaatgaatatctactcatttgttatacaacaagttcttttaagagaaggatgtagaacaggatattatggcagtatatataaggcattcaatgtacccgtggagagtggcgatcagagaaaaatgatgtcaggtaaagcaaatgtaattcaaggttaaaggtagattccatttacaaaattccttgttgcctttatcatagaggagttccaataaaatcaacaagtctgacaaaaggtgactggtttattcacccaggatatgttattgtgtgcttagccttggactttgttgcttgtgtgttggacacctaatagtcttgacagctaaataggcttttgtaagcgagagtggtaaagtccaacatgttgctaaacctatgtgtattctctactgctaccaccaatgttgctgtttattagccttctaagcaagcaatgtagtgcctggtgaaagagattgtttcataccttcatatctatttgataaccttcctgatgatagtttggtgagcattcgtattaagcacaaatattcttacactctggctcattttctgtggttcatctacatattttttccccaaaactcattgccaccaatccttcagtctttgtctttccgagtccctaattatcttttcttttcttttttttttttttttttttgagacagagtttcgctttgttgcccaggctggagtgcagtggtgcaatcttggttcactgcaacttcttcctcctggattcaagagattctcctgcctcagcctcccaagtagctaggattgcaggcacacaccaccacatctggctaatttttgtatttttagtagagacggagtttcaccatgtcagccaggctggtttcgaactcctgacctcagacaatccacctgtcctgtcctccaaaagttctgggattacaggtgtgagccatcaggcctggccccaagtccctaattat

SEQ ID NO: 1676 - DNA, 4001 bp, Homo sapiens
tagaactgttgagaaggctagagagccagatcaaagctaggcagccaggaaatgtaccccaaaccatgctgtagaactcatccagggaggaaaccactgtcaccaccagtaagaagtaacaccgaagatgcagagagcaacaattgcagcaattgctcaatcctaggctaactgcaaagccaccagcaccactcccacttgttcgctttgcaacagatagctgcaaaggaggctgagaaagcaagcatttgacattttagcttctaaagcaggaggtggtttcttgttttcgtcaaaactgagaggctgaggaattcctcaaacacaggaacaaacatcaaatagtaaatattcatgctttaacttgctcaatatcaatataaactttcccttttgaaagtaaacacgaaagacccaagcttccttctaacagagtgcaactatttctctaataattgaacatgtacctacaatctcttgaacaatgaaacaataaaaaattctcaatcacagcatgtactctaagtctaagaattctgggttatgtccattcctctacaaagttcttcactatactctcttgacattctgccatatatcatttaaaaattaagttaatcaccctcaataagccctgttttaaaaagagggataaatggagaggaaagaaggaaagttgttaagatacataagtatgcacaggacaatacaagagaaacaatgtgtttggatgtaaaggctctcctttctgcaagtggccagcaggtcactattggcatctatggccatgtgccctcagctaacacctctgctagtcagggttttgccttgtgaaatgaccaaatattcattcctgacagagaaatgtccttgataatctttttgtgtgagcgtgccatggtcattgttaatttctttcatttaacaaaataatagactttattttttgagcagttttagctttatggaaagatcgagcagaaagtacagagttctcacatactgtcacctttatcccacccccagtttacattagagttcactctttgtgtggtacaggtctaggagttttgcaaaacgcataatgtcatgtacccatcattacattattaccaacgtattttcaatcccctaaaaatcgcctgtttcagaactgtttatctccctacccatccccaaactcctggcaaccactgagcttttttgttgttgttgttgttacttagtttttatttcataatcataaacttaactcaactctgcaatccagctaggcatggaagggaacaaggaaaacatggaacccaaagggaactgcagcaagagcacaaagattctaggatattgcaagcaaatgtggtggaggggtgctctcctgagctacagaaggaatgggtctggtggtgaaaataaaacacaagtcaaactcattagaattgtccacagtcagcaatggtgatcttcttgctggtcttgctattcctgtacccaaagtgctccgtggcttccacaatattcacacgttctttcaccttgccaaacgccacatgcttgccatccaaccactcagtcttggcagcgcagatgaaaaactgggaaccatttgtgttgggtccagcatttgccatggacaagatgccagaacctgtatgctttcggatgaggttctcatcatcaaatttctccccatagatggacttgtcaccggtgccattagggcgtgtgaagtcaccaccctgacacataaaccctggaataattctgtgaaagcaggaacccttataacgaaatcctttctctccagtgctcagagcacgaaagttttctgctgtctttggaatcttgtctgcaaacagtttgatggagatgcggcccaagggcttgccatccctggtgatttcaaaaaagacgacggagttgaccatggctgatagtacagggctcacagcgatggtggcgtctgcaaagataaccactgatcttttcactgtctttatagtttggccttttccagagtgttgtatagttgaaatcacagtatgtacccttttcagactggcttctttcacttagcaaaatgtctttgtttttctgtatctttttgtggcttgatagttttttccttttagcactgaataatattccactgtaggaatataccacattttgcttatgcagtcacctattgaaggacatcttggttgcttccaagttgtggcagtcttcatttctttctttctttctttctttctttctttctttctttctttctttcttcttctttttttttttttttttttgagacagagtcttgctctgtcacccaggctggagtgaagtggcacaatctcagctcattgcaacctccgcctcccaggttcaagtgattctcttcctcagcctctggagtagctgggattacaggtgtgcaccaccacgcctggttagtcttcaggaatatttacaggactgtatagaattaggagccatcaaaggggatccctgaattctttctgtttttcttacaaataccagttttaaggtcaagatttactaccccatgccacagtgtagccgcattttaaattttaaatttttgactgtttgtttaaaggtctcaggcaacctaaaaggctagatagaagtctctcatcctctaacgaaggatggattgtaaaatggaatactgctaagactctccctttgggtactaattctgcaaaaacctagaatctcagagacaagagacaagtatttggagtggatcattagatgtaatgacaaaaggagtcacttcaacattcataacaaatatcaaagattgttgtattttttatataggagacaccagacaagcttatacttagttactagttcagaggatacaccaccacatcctctagcatgagtacaaccttataagccattgtctccagctggcactgtgattgagtctttaataaaatattcaccattctgtaataataataattttggttagtgataggataaatggtggaccaggtgagtccaatgaatatctactcatttgttatacaacaagttcttttaagagaaggatgtagaacaggatattatggcagtatatataaggcattcaatgtacccgtggagagtggcgatcagagaaaaatgatgtcaggtaaagcaaatgtaattcaaggttaaaggtagattccatttacaaaattccttgttgcctttatcatagaggagttccaataaaatcaacaagtctgacaaaaggtgactggtttattcacccaggatatgttattgtgtgcttagccttggactttgttgcttgtgtgttggacacctaatagtcttgacagctaaataggcttttgtaagcgagagtggtaaagtccaacatgttgctgaacctatgtgtattctctactgctaccaccaatgttgctgtttattagccttctaagcaagcaatgtagtgcctggtgaaagagattgtttcataccttcatatctatttgataaccttcctgatgatagtttggtgagcattcgtattaagcacaaatattcttacactctggctcattttctgtggttcatctacatattttttccccaaaactcattgccaccaatccttcagtctttgtctttccgagtccctaattatcttttcttttctttttttttttttttttttgagacagagtttcgctttgttgcccaggctggagtgcagtggtgcaatcttggttcactgcaacttcttcctcctggattcaagagattctcctgcctcagcctcccaagtagctaggattgcaggcacacaccaccacatctggctaatttttgtatttttagtagagacggagtttcaccatgtcagccaggctggtttcgaactcctgacctcagacaatccacctgtcctgtcctccaaaagttctgggattacaggtgtgagccatcaggcctggccccaagtccctaattatctagac

SEQ ID NO: 1677 - DNA, 4001 bp, Homo sapiens
accactgtcaccaccagtaagaagtaacaccgaagatgcagacagcaacaattgcagcaattgctcaatcctaggctaactgcaaagccaccagcaccactcccacttgttcgctttgcaacagatattgtagcagctgctacatggcctccaccagaaacaagagaaagcataactgaatctgcttctttttttattaattccgaagtcgaaattcagcactggcaaacagattggcaaaacctaagtcatatgcttgtaccctagctgcaaaggaggctgagaaagcaagcatttggcattttagcttctaaagcaggaggtggtttcttgttttcgtcaaaactgagaggctgaggaattcctcaaacacagaaacaaacatcaaataataaatattcatgctttcacttgctcaatatcaatataaactttcccttttgaaagtaaacatgaaagacccaagcttccttctaacagagtgcaactatttctctaataattgaacatgtacctacaatctcttgaacaatgaaacaataaaaaattctcaatcacagcatgtactctaagtctaagaattctgggttatgtccattcctctacgaagttcttcactatactctcttgacattctgccatatatcatttaaaaattaagttaatcaccctcaataagccctgttttaaaaagagggataaatggagaggaaagaaggaaagttgttaagatacataagtatgcacaggacaatacaagagaaacaatgtgtttggatgtcaaggctctcctttctgcaagtggccagcaggtcactattggcatctatggccatgtgccctcagctaacacctctgctagtcagggttttgccttgtgagatgaccaaatattcattcctgacagagaaatgtccttgataatctttttgtgtgagcgtgccatggtcattgttaatttctttcatttaacaaaataatagactttattttttgagcagttttagctttatggaaagatcgagcagaaagtacagagttctcacatactgtcacctttatcccacccccagtttacattagggttcactctttgtgtggtacaggtctaggagttttgcaaaacgcataatgtcatgtacccatcattacattattaccaacgtattttcaatcccctaaaaatcgcctgtttcagaactatttatctccctacccatccccaaactcctggcaaccactgagcttttttgttgttgttgttgttacttagtttttatttcataatcataaacttaactctgcaatccagctaggcatggaagggaacaaggaaaacatggaacccaaagggaactgcagcaagagcacaaagattctaggatattgcaagcaaatgtggtggaggggtgctctcctgagctacagaaggaatgggtctggtggtgaaaataaaacacaagtcaaactcattagaattgtccacagtcagcaatggtgatcttcttgctggtcttgctattcctgtacccaaagtgctccatggcttccacaatattcacacgttctttcaccttgccaaaggccacatgcttgccatccaaccactcagtcttggcagtgcagatgaaaaactgggaaccatttgtgttgggtccagcatttgccatggacaagatgccagaacctgtatgctttcggatgaggttctcatcatcaaatttctccccatagatggacttgtcaccggtgccattagggtgtgtgaagtcaccaccctgacacataaaccctggaataattctgtgaaagcaggaacccttataacgaaatcctttctctccagtgctcagagcacgaaagttttctgctgtctttggaatcttgtctgcaaactgtttgatggagatgcggcccaagggcttgccgtcgacggtgatgtcaaaaaagatgacggagttgaccatggctgatagtacagggctcacagcgatggcggcgtctgcaaagataaccactgatctttttactgtctttatagtttggccttttctagaatgtcgtatagttgaaatcacagtatgtacccttttcagactggcttctttcacttagcaaaatgtctttgttttttctgtatctttttgtggcttgatagttttttccttttagcactgaataatattccactgtaggaatataccacagtttgcttatgcagtcactcattgaaggacatcttggttgcttccaagttgtggcagtcttcatttctttctttctttctttctttctttctttctttctttctttctttctttctttcttctttttttttttttttttttttgagacagagtcttgctctgtcacccaggctggagtgaagtggcacaatctcagctcattgcaacctctgcctcccaggttcaagtgattctcttcctcagcctctggagtagctgggattacaggtgtgcaccaccacgcctggttagtcttcaggaatatttacaggactgtatagaattaggagccatcaaaggggatccctgaattctttctgtttttcttacaaataccagttttaaggtcaagatttactaccccatgcaacagtgtagccgcattttaaattttaaatttttgactgtttctttaaaggtctcaggcaacctaaaaggctagatagaagtctctcatcctctaacgaaggatggattgtaaaatggaatactgctaagactctccctttgggtactaattctgcaaaaacctagaatctcagagacaagagataagtatttggagtggatcattagatgtaatgacaaaaggagtcacttcaacattcataacaaatatcaaagattgttgtattttttatatgggagacaccagacaagcttatacttagttactagttcagaggatacaccaccacatcctctagcatgagtacaaccttataagccattgtctccagctggcactgtgattgagtctttaataaaatattcaccattctataataataataattttggttagtgataggataaatggtggaccaggtgagtccaatgaatatctactcatttgttatacaacaagttcttttaatagaaggatgtagaacaggatattatggcagtatatataaggcattcaatgtacccgtggagagtggcgatcagagaaaaatgatgtcaggtaaagcaaatgtaattcaaggataaaggtagattccatttacaaaattccttgttgcctttatcatagaggagctccaataaaatcaacaagtctgacaaaaggtgactggtttattcacccaggatatgttattgtgtgcttagccttggactttgttgcttgtgtgttggacacctaatagtcttgacagctaaataggcttttgtaagcgagagtggtaaagtccaacatgttgctaaacctatgtgtattctctactgctaccaccaatgttgctgtttattagccttctgagcaagcaatgtagtgcctggtgaaagagattgtttcataccttcatatctatttgataaccttcctgatgatagtttggtgagcattcgtattaagcacaaatattcttacactctggctcattttctgtggttcatctacatactttttccccaaaactcattgccaccaatccttcagtctttgtctttctgagtccctaattatcttttcttttcttttttttttttttttttttgagacagagtttcgctttgttgcccaggctggagtgcagtggtgcaatcttggttcactgcaacttcttcctactggattcaagagattctcctgcctcagcctcccaaatagctaggattgcaggcacacaccaccacatctggctaatttttgtatttttagtagagacggagtttcaccatgtcagccaggctggtttcgaactcctgacctcagacaatccacctgtcttgtcctccaaaagttctggg

SEQ ID NO: 1678 - DNA, 4001 bp, Homo sapiens
aaagatttcccaggcccagagagtttaaagactttgctaacaatcatatgcaaggttgatgataaaactaggcctaaaactataatcttaaaaatgacaacaaaggtaaacagaaaactgaactgtggttgtgataccaatcgatgggaaacccacccaggggtgcagaggccaagaacccccgccctcacccacccccattatggggctaggctttcccgctgcctcatttaatagcacagctgcaagaaggtgcaggtgggatggggtacccatcaggtagattaaaacaacattcaaatctcaatgtagttcaaacctatctccctactggtctattgaaaaatctgtcttatctcaacccaacagctgaagactctggaaagtattcagagttcacaaccacatggcctcagaacattccttctccatcgagatcactgtcaccagacaccttcctgaacttacctgtagtgtatactaaccatatttagaatgcatatttagaattgtgatgtgactttaattttttaaggtattttcctagtaagaggattctgaacgtgagagacactaactcacctgtttcataatccagaggaatctgaatatctgtgatgtctccaaaaggaatgaacgcagcatgaagaactttgtcgtccacttcctctgccagtccacctgcaaataagccaagggccttctgagccactgatctccatactcttgcagaagtccttgcagcccagttagcatgctagccaggggacaggacccttccattcagttctttgggtaaacaaacatccccctctcatctctgcccacccatacttatgaaaaatattcctctcttcgcccttctttcagactctcatctagtcctgggattactgcaatagcttcacaactgacctccctgcctccattccatcaactccacaaagccaactagaatgatcttaggaaaatgcaaatttgaacccgtaacttttcgcttacactccttcaaaggcttcccactgtcctcaggataaagtgcaaactccttagcagtacccacctctccagcttttttgctttgcttcctaatttcctgggtctcccgaataatgacccacttgcccccaagtgtcaggctatttcacacctttgcgactcccttgcagtgaacggccttgcctctgcttcggttacgtagctaactcctgctcatcagctctggcatcgccgcatccagaatttgccctcgcttctccagatggatgggtcatttgtcccgcagccaggcccatattatcatgatccatcctcactacagcgcttatcaaaagtgtgctactgaggtaattccactttttttctggctagtctgggaactccttcctttatggcaggggctggggctgagccgtcgctgcactgaatgtttgtaaaacaaatgaacgagaggatccgaagggccataatactcctttaccgctcctcggggcccgctggagctcagcgggctaggaagtcagaataatcattccgtctcgggttcacgcacctgaggtgtgtggcaaggctgttcactgcaagggagtcgcaaaagcagaggcccaaaggtgtgaaataacctgaaccttgggggcaagtgggtcatttttcgggagacccagcgaatcgggaagcaaagcaaagaagctggagaagtgcgtactgctaagaagtctgcactttttcctgaggacagtgggaaaccttggaaggagtttaagcacagccagagctatcgccagcactaccgccagagacccggccttgacagcagctcgccgtcctcctggttcagagatgcgtcccaccccacgccccgacccttgggggtcgcgttcactcagactccgcctagcaacccctcctgctcacccacgtacaagacgcgcttggtggtggccatcttgctcgcgcgcttttccgccggaagccagcactcgacccgtcctcttccccactgtcccgccccgcccccaacgcttagctcttagaccccgcccaccctcgcgttggtccaaccggcatcccgctacccggatgcactgggcgccttgtgaggtgcgcagtggtaaaccaagggacgtggtcctcgcgcttcccagtgcgcaccgtgttgggggagggaaaccttggccgaatcaacccgattattatgggcaaacgataaactctggtgcttggccatcctgcgcgtctgtttttggacaacctgggagctaagaatgaattttaccttttgaaatagttggaaaaaataaaaaaactatattttcttggccgggcgtggtggctcatgcctgtagccccagcactttgggaggctgaggcgggcggatcacctgaggtcaggagttcgagagcagcctggccaacatggtgaaaccccgtctctactaaaaatgcaaaaattagccaggcgtggtagcgggcgcctgtaatcgcagctactcaggaggctgaggctggagaatcgcttgaacccaggtagcggaggttgcagtgagcagagatcgcgccgttgcactccagccagggtgacgagagcgacacaccatctcacaaaatatatatgtatattttcttagcacatgaaaattatgtgaaattaaaatttcagtgtccgtaaagaaagctttatggggacacagccacgctcattcctttaagtatgactgtggctgctttcctactacaagggcagaagagctatagcctgcaaagcctacaataatatttacaatctggctcttcagaaagaacgtttgtctactcgtgttaggttttgaaaagaaggcaagggttaaagaaagacacacacacacacacacacacacacagaaagagggcggctcgacagcaaacgcaggctttatgtccagcataataacctacagaagtggggaaccagcctaatgccagtgcccaccactgcttacagactgggcaatttataggtatgggcggtaggggtctgggcagtatgggttgctgcctagcaggatattgatataaagatgttctcatgatgaggcggtttggcccttgttccagtgggatgtcatcatggtgtcccttggacctttgcccaggaagatatgagagggatgtttctttagttgggcctttgtctgccttgtggtcgggtggttaggcaggatgtttctcacagcccaaacccctgtgaaatgtttcactttgaccaaggtctgcagaatagcagggagcttacaaaatggtgcagtttagagtaacatcttggactaaacccactaatatataaattacaggttgacatagtggtaggaaataatgggaccatctattttatatggagcagggggttaagaccttcctgaggtgacatttaagctgaattctgaaggaaaaggagccagagagaggaggaggcagcttccgcacactcaaggaactaaaagaccagagcctgggatggtggggtggagggcatatcaggtgggaaaggtaggcagagggccacatcatgagggtgctgtaagccttctggaagatttgggagctttgagaagctgctgaagttacaacaggagagttacatgctcacatcattttagacagtgctctgacactaggcccaggatgggttgattggaacccaggagaccaggaagttaatgtagtagactaaggaagagttgatagtggctctgttcctccaatccacttgtccagggtgattttttttttctttttttctttgagacagggtcttgctctcttacccaggctggaaggcagtgacatgatcatggttcactgcagcctcaacctcccagcctcaaatgatcctcccaccttagcctcccgagtagcagctgggagtacaggtgcacgtcaccatgcccagctaattttttttttttttttttttttttagagacagggtcttgccatgttgcccaggctggtctcaaactcct

SEQ ID NO: 1679 - DNA, 4001 bp, Homo sapiens
ttaaccataaaaaaggattttcgttataaattagggcatgttagagttgatcaagtgcatgatctggtacctgaacagtaataagaagaaggggctgaaagcttacttgccaaagcaaaaggcagagcaagggtttgatgtaaatttgggggaaagaactacagagaatttatgtgaaatgtactgctaaacatgtaagggcttaacaactgttagctattacccctagggagggtccttaacctttcttatcctcagtttcctcctctgtagaatgcagatcacccataccacttcacaggagtcttactggggattagagacccaaagctctaaagctgtgatataattatgtgctaacattgttactaaccacagtgaggccatgagaaagattctatattgaaatgagactaagtgttgacatactccactccccaggaaatatgattatccttggacaatcatatatgatcattttaggaattagttataaatatcaaccagcaggatatattatatgcactttaggattacaagtgtactttttaaaaaatctgcattcgcacaaacaagtgcatgaaaaagacaagatattgtaaagatgagtagtttctgttttaaagacctaagaagtgggggagtgtaagtagagttagaacatttaataaatcttcagttgttgagtccacaaaaacatttcttctcaagaaatgtaagaattaccctctggttttattttcctctaaagagcctaatcccccaggaaatatttctgaaagactccaggatggcttgccaagagccttacctgtggaaggtgcttcctttgtatcctattggaaccccatctttcctataaccgaaaagaaagagacttggagtgacagcaggtagcacaaggcctttccagtttaccatgcactggagccaaaaggactctcctaaagatggttgacagacataaagaaggcaaataaactagggacagacccttggggcattaccttctatcactgtcaccagcaatcattcaaggccagcaggtggttcaccgataccctcactgcagccccagaacacccctctggagcaggcaaagaagtcaaacacatctgaaactgacctgaattctccggtgcagaactgcctgaaagggacaaaaaatgaatgattcaatcactatgatgtcacagtcgtgagcgcctctaaatacgggaaagaataaacactggagccagcaagtccaccaatcggccagccagacgtccagacacgcagtcacacagactaacaacgtaaattaacacgggaacaatccaaacggcaaccagacagagcaatgcatggaggaatcaggtctcaagagcagtgagcggacggacagaggtagacaggctatttcaggcggctgactggagcccgacttctgcctcagctaatccagcggagctggagcacgtccttacctaaagttctcggccgtcttaggcacaacgtctgcaaagagctcgatcttcatgcggccaacttcctgcaatcagcgggagagtgtcagaaggcccagtccaagaccatgagggcttcacggagcagggggcatgatgggctgacccaccaccctgccgctcggtatctcccacctccgcctccctagtctaaccgcccagttcctccagaagcggggcgctaggattggggagactcctcctcctcctttccccccgcccggcaggtcggtaggttcgggtgcaatttcactttctggctggcttcccgagtccgctctctctgggtgagttctgcctgcctagccccgagcagtttcccttcggcgcaggtgtgggcagcctcctggatctcacctgaccgccaatactgacatcaaagaacaccacggggttaacaggacttgaatttgccaccgccatggctccgacccggaagcagaagtcgggagcgtgggattccggcgaacctaaagcccggtccgcggatttcgtccggggagcaggcgcggtagacgtggagcgagaccaggctccgcccccggaagctgtcgccccgtgcggtgtgtgctgagactgctagggtctagctgagagactctgcctggcactggggacgcgggagtgaggaggaggaaagccttgacatctttttggttaaggtcaatggtcaccccactcacgtggctgtactaagggcagtacaagttgatcttgctctagctaggacttttggactaggcagtcgccagggtcctccttatcggctcttgcagccaagccctctgcaccgccacacgtgctgtctgtcttctgcccgctagtgtgaacaccgtgaaggcaggaactctggtttgttcatcctcagcgtttagaacagcttggcacgtacaggcttgctaagtaaatatcccttcctctaagtcaggacaatagataatgtttgttctgccacaaaagctaccagttttgtcatttccaattcatttcccataaagcaactagagttttttattttttatttttaaaataactcttgtgcttcctatttattttaaaaataactcctggcttcccatatttagaataaaatccaattccgtgcatacgaagccctacagtgcatttatctggctatcacgtacctgacctcatcttgtaccacttgcccttagttactgtgctctgacctgtctgttcctccaggtcactgagatccctcctctctttagggctttgtaatagctgttacttctgtctgaaatattccttccagaacttaatgtgggttggcgggggattgtgggggttggttggggtatgcgtgtgggaagtaatgctccttgtagttcagggctcaccccagatgttacctcctgagaggcaacattagacctaatctaaagtagcccttggtcattcagatcactggtttgttttcttcatgccacccccacttccacattatcttcgtatggtatgtgtctacacctcatttcctgccacacacacataatcttcctccctgatagcatataaactccatgaaagtagagactctcctggtcctattcgcagctgtagctgcaatgtcgcctactgaatagcatatagtaggtattcaataaataatagatgcaatgaatttagtgaaagaaggggaccttgggcaaggctcattcaatataacagcatgcatttaataaaatagttattatttcctagttcctatgatcatctttctagctctgttgtctgagaaagcaaggattacatataaaaatacagtgtgtctcaatgtaaagggtcatttttatttctggttactgatcctctcctcttggtctcctccaactgaaaaagaagaaaggggaggagggggaaaaggaacagcagcagtcacgcttcagtataattttataccaactgttttagaataaatctttaaaattgataatatccaatgttgatgaggttgtgaaaaaaatagtacattgataaacctctagtgaaaataaatgatgatagcatttattaagcagttactacgtgctaaatactttacatgcttcatttcatttggtcctcacaaccctatgggatagagaactattattgttcccattttaggaatcaagaaattgaggctcaaggaggttgagtaacttgactatgaaaacagtatgttgacacactttttatttattttattatttatgtatttattattattattttttgagacagagtctcactttttgcccaggctggagtacagtggagtggtctcagctcactgaaacttctacctcttgggttcaggtgattctcgagcctcagcctcccgcatagcagggactacaggtgtgcaccaccatacccggctaatttttgtatttttagtagagacagggctttgccatgttggcctggctggtcttgaactcctggcctcaagtgatccacctgcctcggcctcccaaaatgctggga

SEQ ID NO: 1680 - DNA, 4001 bp, Homo sapiens
gcttacatggtagaatctaactgatgaataccaggtaaaggttctgtgccagaaggtagatagccagtgagttcatcaggtcttccgcatggctcagatttaaaaccagaggcctgagtccctggggagaggtgtcactgtgtctctgggaaaggggatgggtcttacctggcctcggctaggctccctaggtactcctgtaacactcctccgaccttccacatacaccacttcacagcaagcctggtcctcattgtgccgactcttgccagcattgatgaccctgccaggccagaatgaccacatcaggttggacaccagaccaggtcctggaataacccccaccttagacacacaccgtctcctgcgcccgctggccaagctgagaaaggtcacagccacctgggatccaggccagagggaggaggagaagggagggctggcaaggtgtaaggagtactgtttgggtggccagccctaccacttcacagaaaggccagcaggagcttctggccaaccgctatgtcccctgcctgcctcacttcccccatccctggcaaaaaaaaaagaaaaaagaaaaaggcattcctagtggtgcttctgggggaggggctagttggtagcagaagttttacttccctgctagctagaccctacatcccaccctcaaccactatcaactctcccagtgccttgtccccagcacctcatcctcatgggcacacccacccttatcctaaaaccatccagcgaaagtttctgctgccttaacaatgaggaagctctccagcccagatcgggaaagaggaactgaaatagagtagaagtgaaagcccacctggactgggcaggagccacatacccataaactcctcccacacaggaggctaagggaggtggtggtgggtccatgggccaccagccaccttcctcagcgaactgagcgcccccatctccctcggtgctctgcgttcccggcagatgcatttaaaatacacacagcccgggggccagccggccgctccgggcagggggtccgcttctttgccaggccagcacgagttggcaggctgaagggcatctaaatgggaccctcctctaccccgggcgtccccctccccgctcctggggaagctggcggcctcctggtgtcgcgggctatttctgggtgtggagggggaggggaactacggtaagagggacagggaactggggcgctggagccgggaagcgggtgagcgagtcttcccaaccgctatgtcccctattaaaaagaaccccgctccttcgtgaaaccccttttcccttagcctttaagctgccgggccgcgacggggaactggccaactcatccttcgccgggctctccgccctccgggctctggggcagaacagggtcctgaggcggcgtgggcgagggcagtcaatgagcgggaaggacgtgaagaaggtgacacaggctgccccccactggaaaatgggttgggagggggtgcggcccgaagaccagaggatagcaaaggtccacggaaaagggagctcctggcccggacgcggcgtggggaacgcgtcctagcgccggggatgcggagctggggagaggggtgggagccccatcctggtttgggtgccccagggggcgctcactcggcgtagcctgtgctccagggcaggcggcggcccgtgtccggggggctttgcacagcccggcccgcgtggtcatcggcgcgtcgcagccccccggggctcagctgcagaaaggtcggtctggagaagctcgctcgagcctcaacagccttcgcgggcgtcgcgctcccgctcccagccttcgcgggagggctcctgggcgcttctggagcggcggcgggcggcgccgaggcggcgttgggcaggtccggggatttggggcgcggaggcggagcgcccccggagctcaccaggtgcgccacggccgagcgcacccggtttagcatgctgcctccctgccccgccctcggccgcggccccgcccccgcccaggccccgcccccatggctccgcgtgggcggtgctcgcgccagccggcccttccctgctactggctcccggccagctgggcgggtcccgggcgaaacttgcccttgctctgggccaccccaggaaccggcccacgggtccccggcctctgccccgccccattccggcttggccccgcctccgtttcttaggggtaggttctgttgctgtgggaagggggcggagagaaggaaaccttatttcagccgtgcgctagattagacacagctagaatgtctccattgtgacgggggctgagggacaagggggtgcggtctcctcgctctcggttcggtgtggccagccagcccagagagccatggagctaatgacctcagagcaaaacaggcgcttgggagccgctgggtatgaggcgccaggtgtgacaccacctctggatggggctgctggagcgagagcgggcaagctggtaccgggtggggttgcgggattaatgacgcaggctgcagccgaccaccccggaatcaggagccggggtagattcctgggctcctgatgcgctgttccccgtgaagaccacctctagatctgggagagcggttgctactcccaccctcctttctctctcagaacccaggtctttcccacaatgcagaccttccctgaccacagcaggacaagctattaataggataataacaacataacaaatactatttattgaagaagtactgcatactagaccctttacaaagcacgttccatacagtattaggttatttatactgcacaccaatccttcaagatggttttttttctgtcagtttcacggatgaggcaggacgggacgcttcctgtcattttaccgtgacttgccccaggaggtcacacggtcaagtgaaagattcacacctatgtcggcctcctgacattcaaacctgctctgtcttaagaaccaagcttacttctccggatcagggaggaagggctagaaaggagatcaatggcagagagaggagtgggggttcctcccctcccatccttctcttagggccagggctgagagcagtccgggaatgctgagcaagttctgtgtctaccgccagggggagacagaggccaggctaagcccttgcctaagaagagtaaaagcacactcactggaagaccaggacagagcccaatgcctggttggctgcccgttcttcctaacttctcccctctgggagagggtggtactgacctgatgccacaagagctctgtctctaaacctcctatcagaaagttgatcgctaggtatccacagacaccacccatccacacatctcaaatggggacaacgccgttgtggccctcaagcaagttggaagtagccatcagggactacggcacccagttcacggctggaacttttctgggctctgtcggccaggtgcttcctgaccacataccactttgttccccaggctaaactgtgtccccagaagggatgactttcttggcagcttccaaataaagatcccacagtggtccttcaggttggtagacttactatgcctgctttgttacacctgagctttaggcagagagagacagaggaaaagaagtcacaggagagaaaaaaaacagaccccaaggcaaatagagcagcaaaagaagacggggacaaagaacaggctgcttctataggttttcccctgctatttgagaaaaactggaaccaactctcagataaataacagcagcagcaagccagcaactgaagaaacaaatataactcctggttgtttttattattcagtgtttctgggacagtttacttaccacttcttcgtgtcacccagctccctattccctgccctttctagcacccaccatggtgtggctgcaagctgtccgcaaagctaagccaagagacccccccagccccagcaccagatgatcagcagggagaataacagctccctggggctccagaacagcc

SEQ ID NO: 1681 - DNA, 4001 bp, Homo sapiens
tacactgactgatttccacagcccctatttggtagggaatgagggtgggatagggtttgggttgggggacattcccactgtgacggatggaaatgaaggccttcactcccaataatgagttttgggaattatgagggggtggggtatgaagagaagagggcatccccaaatgatacagaagagcccctaggtggtagatttgaacagggagctctgcagctggtttaggagggaagaggtttggggcctctgggcaagtgtcacctcaggtccaaggcggcgctgggcaaaactgtgcacagtctcatcaggctctttgccccggggcttggtcagctccctcagcccagcccaaaacagaggtttggagaaggggggtgaagggcggagtagccccctgcatggagaaaggcatagtgagggggaagctcctgacatacctccccagctccaggcgctggggtcatttccactcatttggcttccttttgctgggaaggctgacagggagatgaagaaatggaaggcaggtcgggcgtggtggctcacgcctgtaatcccagcactttggcaggccgaggcgggcggatcacaaggtcaggagttcaagaccagcctggccaatatggtgaaaccccatctctactaaaaatacaaaaactagccagacgtggtggtaggcacctgtagtcccagctactcgggaggctgaggcaggagaatcgcttgaacccgaaaggcggaagttgcagtgagccaagatcgcgccattgcactccatcctgggcgagagcgatactccgtctcaaaaaaaaaaaaaaaaaaaaaaaaaaagaaaagaagaaagaaatggaaggcatatgaggatgagggcacagtaaaaggagcggaggtgctggtgttacctgaggccagtgggtagggcatgcagggcaccgcccacgtagaggaacctgttctgggcagctgggtggtctccccggacaggcagcacttctgaatccaagccaagctcagaaacctgctctccacatgccctcagaagaggagaaactaagggaagatctgacccaccaaacatacttcctcccctaaactctattccccaatggaagccccctccacaacctctcctagacatcccacaagcctctcaccaggagcaaggtccgggcccctagggctcccgctggcctaattccccgaggtccaagctcaaagatagcaccattagggcctcgaacggagcgaatccagcctcccagacgctcactgctctccactaggaccacctggcgacaagagggagagacactgcagcaccgcctgtagccgccggcgagaggtcaggaggggaggggaagaggcatattcagagggccaggatccatctagcttttgatggaaatgggaagagcattaaatgaagctccctctggcacaagtggagcactcaccttaggggggcagggggcccggctcaggtggtaactggcggccaagccgctgatgcctccgcccagcacgaccacggtccggcccatgcggaaacctgggggaaagggggcgatatggacaggcagaccggggacaacctgcgctccagaagccccgccggttttgagttctatcccggccactcactgctttaggggaaactaagtgtgcacggatgggctggtggaacagcgaggtccccgtccaggggccaggactcacccacaataggtagggatgagagaaaatgagggagaaggagatcgaggtcctaagaccgtaccccgccggcgctctgctgggtgcagataagggccacaccctcgctatcggccctcgcagggctcgggcggcgggcagtacgcctgagttctgaggtgctctgcttgccacacctctgtaggccaacaagtgcttcaaatccgctactcccacccccagccttttcggtctctcctacgctccgtccactctgttctcgcggcacgcgcctaaccctacctctcctacatctggattggcgggacttggaaggccccggatcacgttcaccaataaaacattgaactggcagaggcggagcgacggcagctgtaagagctggaggttaaccgtgttagcgccgagctgggagtgagcggccgtacccgtcactgccctcctcaggaccgaggcggcgagcgcttaatgctggagttagcgttccccagcacaagcttaccaggtccagctagggtgacaaccctagagggaaggccgcaggagctttggtcgtagggagaatagatagggacacttaaggccagtccacggggaggcggctccataaacagctccttgatgttagcaacagaccgggcctacgggagctagggccgcccggcaacgtacccagtgtttgtcaacagtggcactcccccatcgccgaccaaaccagtcgccccagagcctgcacgcagcctcactcaagtatgcctttcctcttttcctcccagtacataaccttcactgctgggggacacaggtccgggtccagcaccatccccgaaaccttccccctcggctctgagagcgcccccacctgttagagagggaacttgggtcccaagaagactccaatttggctcagttctctatcaccccctaagcaaaaatacaaataagcacatcattttttcttaataaatttattcacaaaaagtgatattgcagagggtctgggggctgtacatgggcaggggcttggtgagctttgtacatggggctgggagacaagggagcctccaggtggaagggtattttttaataaaaaaaataatggagctacaaccaccccctcccccctccccgattaaaaagacacaaaaatagacgtctctgaggtaaacggggagcctggggcttaagggtgtttaaagggcttcacaggtgccagagcttagaggtgtcacaggcaccggggtggctcctgcatcagttggtagaacagcacgtagccctcgctggatgccacctggttttcactgacaggggagacactaggaaaaaaggagatcgggaaagggttgtggtcattcctgtttactcccttctccctacaagaccgaacctcagagcatccaggaaatgatcaggcaagacctccacctctcctttcacctggcactctgctctcctggagcttcatagaaggggagggtgtcagggctgagtgggaatggggcaggatgtaaataggaggctattctcaccgagagtcattgtagacatgccaaccagtctggcaccggcacagggctgtgtagtggccatagtggacgctgcctgagtggttgcaaagggcatacagctggtatacaggacttcctgcggggttggagatgatcaagttctataatcagagctgtgcccccactcctttggctccttaggactttccccaccagactcaccggctttgtcactggcaaagtcccctaggctcagtcgctgcagtggaaagtctacacctactgaactttttttgatggagcctcgggaggcagaaaatcgattcagatctaagccctggttaaggagcatttgggaggcagtgggcctctgaggggaacttcttctatcctgaaagctgtcctctccccactcccgacacactgggagcatcttgtggaaaagtgggtggcagacttttcctaaggaaaattcaattctctggaaacatggaggaaagagaatgtatgggaggtatcctaagagaagtaagaatctgaagattaggatatggagcacgaggattcgagggaatctttgtactgtcaactttttggtacttcgagttttctgccgacatcggtcacacacctgaataaatggcaaacagtgttaggttaatatgctcctaacctcaattggcttttctgacaccccgatccacatacaaatttagtatgctcttcattacagctggatcctcttggcttctcccctttgctctaggagtacta

SEQ ID NO: 1682 - DNA, 4001 bp, Homo sapiens
atgctattattttataatctaatattccctatagatctcctaactccaccaattagctgagtaagaaactgaacaagagaagttaaatggcttgcctgagaaggcataaattgtgggcttagctggagagtaaactaggtatcctctcttgcaatccagggagctttataccttgtacctgtcgctcttgtgtgaagaagtgccagggtgaaagtgcacaaagggccttcatgtgccaaaaaaaatctgcattccctatattaaaacacttaaatggaatgggatagaaaggctcatctgcgaactcatccaaacacaaaacggtctttgctagcttcacactcaagtagatcaatagacgttcttctgctgccatcttatgggcatagaagatcactacacatgggcttattttcatttgagaaataattttattcaataaacatttacccatcatctactatgtattaggctctgtgaagaaaacccaattaaaagcaccctaaagaagctcagaatgtagtaatgaaaagcaacaacataccatttaattaattagtaaaccaatcctaagacagtgttacaaaaaaagaacactgaagacagaatactagttttagcctggggctcaggtgtagcagggtagtcagtagtgggttttaatttgcaggagttcttacagtatgaatacaattttgttaagcaaagaaggtgagaaaaaactattctagaaagaaggtcacgcatggacaaaggaagagggtcatgaaagtaaaatgtacaggaaataggcctaatctttctacctgagtaaagtgacgcaattaccaggaagaagagttgagagaaagggataagaaaaatagagagaaaagtatagtcctgggtaggctgaattcagagtttggtgagtgctctctctacagaactaaaatgactaacgatcagcaggattttctatattgcctgattcagcatgtgtttgtattctgtccagaaattggtcctctgaacaagatcaactaggaaacttctcatcttatacacatggaaaaacattaacttccattaatattcaatctgattgtagagtgtgtagtaagtaaataacttttacccatacctgattgaactagtctcttcattttataatttcaaaggccaactcaagttgcaatctgccccttcacctatgtaaatgagcttctttctgtaattgccctaaatatccaacaatacttttttctgttttacttatttaaaacatatataatatttaaggcaaacaaaaaagatataaagaataataaaccatcacctgtgtcttactatccaacttaagaataacagtgccaattccagtttcttctttaaaagagaagcatgtttctacttcttgaaactcttaattgtcctctgctaccctaatcttttgggtctgatgtttataagtcagtgcacatgtttaaattcattagtaatgtgaagaaacactagagaagttccaaactggttatatcttattcttaccacttgccttctcccacttccccaaccataccaccaaatcaaagtatgcaaccaagccagtttcccaaagaaacatgcatctaggacattaaagctatcaaacaaagaaattttacctgctgcttctgacattccaggcccagcacttgctgatgtctcaactcagcacactggagttagcatccaaacacagagtactaacaaactatggcagaggcttgtctcaattccccagaacacccagatcaacttcctgtgcctctgatttccataaaaccaggaatggcaaggaactctattgccagatcaaatcattccaggtgaaagcaggtcaagctatctcagacacaccttgccacacacttgtgcagcaactttcccagaagcccaattttcaacaaacaggtggccactcctctgactgtccttctctaaacactggagcccattttatgagattgtaccagcaactgtccttttctaacatgggaaaatcaactgataaaaaacaagggagggttgaatgagggctgaaaattttggtccctcctacatgtcaccaatattcacagctctgaaaaatgaaccactttatcagaaggagattaaccgcaaaaacatggctgataagggcttttagtagcaggtgttgggtgactgtcttcactctgaagtggctgggaactgggatagaactatcagaggttctgctacataaggaaatggattcttgtcctttcttctaaatgcacgtgtcctgagggggagggggaaacactttaagcttccactcctgaactgttaagtggtgggctgagaaacgcatgacaaatgcccttatctctggaaaatgaagtgagatggtgttggcaacagccgtgtttagcaacagaaatacggaaaaaagaaaatagactcttttattcaaggctctaaatctcattgctttaactcttagtagacaccatctaggcctcccttcccagaactgtttggtggagattaacagtactaatgttatttttaaacagctttattgagacataattcacatgcccattaggtgtaccatttaaagatttttagtatattcagatttatgcaatcgtcactataaccgattttaaaacatgctcaccttagtatcaaaaatatccactactgcatagtattgagtgtacttgtttgcaaaacaacagaaattgacctcacttaggcaggaaaggaatctgtgggagggaattactaatatttttagcataaagaatatcactgggataggaggcccaggctcaaactttcctgcaagggtcaactgctaccattatcacattcagctcactagctcttgcctcatataaatgttcaaatgcttagattcctggacactgcttggtgaggggagaaaaggcataagaaggtacctgtgtatggctgccacttactttgtcaccacaatggagattttcccttagggctgcagaaaataatgtataacattataaataattggtaaggacatcagaggcaggacaagtgagcttaaatttaaaaattaagtctcctaaacttgagatatggaatccctatagcatgtagggtttaaaaattaaacatccctaaaatctaaaatggtattaatatttagcattttagggtggatcttatttccaaatgtattagctctggaaaagctaggaatggatcttaatgaaagtcaaaaaagcatttcactggtaatgacataaataattgtcatatatatctctaaattgttttgtagtttgcaaaacactttcacatagtctgtctcatttgatcctcacaatagctccatgagatagatttgggaaaatctaggttactcgtaaattatttctaatcctcaaatacatgcaaacaaggtaagcattatcccttttttacatatgaggaaagagtcagaaacggaacttgatttatttaaccaaaatcacacatataaaaggccgaactggactattcttttttttttttttttaaagagatggggatctcactatattgcccaggctggtcttgagctcctggcatcaagtgatccttctgcctcagcctctcaagtagctgggattacaggtgtcagccaccatgccccatttgaactggaactcttaaatcaatcctgtgcatttcccactaagtctagccattcacagttatctaggggtagcctcatctctcaggcagcaacatatcatcactattatttcaaagagacatattctgaaaaaaaattacatagaggtgccatatgacactgaaagcagtttgtttgtaaggcatattcagcctggtgaagcctcttgtcattttgctacctaaggattagggccaaagcactaaaagaatcaccttttttctttctattccagaattgttcagagtcccacagcataatcctaattctataagcaatccagagacctcca

SEQ ID NO: 1683 - DNA, 4001 bp, Homo sapiens
gccaccaaatgagtcttgcatatctttctctgacattaaagacataagcaacataatggaacatgagtggtatatgaaaatcaacattctctttattatagtctcaagccatttggacactggaagttggttagagtaagttgatggtattgtaggaatccacggccagtgaccactaaaattgggaagcagtctcttattaagccatctgtgttttagtttcctgtaactcagattttctcccactgtgacctctgtctaaaaggcagggatgaggggtggtgaaacgagggtagggaggttggatggcagctgttagaagtgagacaagacgaaagcagtacctaactctaagaaagcagaggaaaaacagaaagggaaaatgggggaaggtcaccaaacaggttattgttgactgctcaccacattgctctgggagctatggttatagtggtgaagagacattaataaggggatctttacaactaaaggtactactcagtataagagggaagggagcaaagataaacactaactgaagtaaggtgttcagttttgtggacctcaattggtagccagcaaaaaatacccaacagctagtggggtgaaagcattctgtggctccttgggaaaaaaaggtaccagtctatgtgttgaagagacactcctggaactcgatgacagtaacatatatatcggagcccctcttggtgctctcacaaaaacttgtgaataaaataacttcgtaacaatattcttttggtattctcatccctagctgaggtcttagaccaacatgccatataccaaattccactacatggtaatttatactggtaagaaagacattgaaaatgcatacaaaataattgggggaaaaaaaaacccacactagtctatccaggcttcttgcaaattttctccccatagctccctaaataaggaagctatggccgtccttcttcttactctgtatatacagcaaagcgcaatctagttcctgaaaaagtaactgttatattgcctgctacctaatatgcccatcagagcttctcatcccttgctattggtagcagttcttgcttttatcagcttcccacagaggaagacactaaatcagatgcaaatgcccatatgtaaatctcttcactgagacattcattagagaaaatggagaaaagtctcaaatggctctacctaggacatcacaaacacctccatacagctggttgtcaatggccaagagttagttctttggcttttaagcaagacatttcctgaaggtacttggtgattaaggagtaaggttccaagtggccataactccttgctcattgctcattttggtctttctcacagacagacatacaaaataggcaaaagcatactctacctcatatacatacatacatgaatacacacacagaacttgcaaaactgaagtttaatgtatatagttgtgtggccatttcagaggtttttctcttgaaacatagtattgactcataaaacacaagaaaggcagtgactaaaatagctgtagaaattgagaaaagccttgtaagataaagtgataaggactgtaaaatcttactgttaagcagtttacaaccgatagttaaaagctaaaaggcagaaactgtagcccgacatatttaagtctgcttttacttaagactacattaagtattatgaaccataacctcttgcagagaaacttacagggtctttacttgcaattttttttccctgtactgattcccatatgctctgaaatccctttgctctaaacctaatgccccaagttatatatatacacattctctacctttgacacagctatgaacatacgtaaataaaaaatgctgcttactcggagcgtcttggcagtcggggagggagatgctgggggagaatcagactgagatttcctattccgagtgaattctttacttcgggtatataaagaggacatggttcctcaggatgcagatagacactcaaccactggattcttcacacaaagctgggaaatttccctgtaggttaccctcacagaatctctccttttgagttgatgcaagatgactttggatagaactaaataaaggataaaagcagccctgtaaattatagtcttgagctctgaaccagtccccagttacacagagtctgagttccatcaatattttcaattcagctttgaccacaggttctcaggactggtagcttaccgtagagggtattgtgctgagcaacaccttttatgcctagattgagtccttgattctcctcaaaggacacttcttattgagccttgctctccaataaaacctgagtctaggttcctgatgacaccagattaaatcccggaggaaagacgaccttggatcctgccggcagcgagtctgggaactactatcactttatccagagggaagaaatacaaatcctgtggaaatcatgctgtctttccttagcttgactccactgggctgtaaggcatttggaactactatgataaaatcaggtcaaacaacttaaaaaacaaaaacgaaaaatgataaataaggaaccaagagtttataagaaggaagcagtctgaggaagtcaagtttccctaagtcctcccagacgaagctgcttttacatataaacactcacagtcatacacacatcttttcccctcccctcttctattttctgacattccaaatccctattcgctcagtgaggaatgctggagaggagccaagggcaaagattcactttcaactcagaattcgggttaccacttgtaggaggaaaagaaagcctgccagcttctaggaataaagggaggctctttgggggcatgctcagaggcaaacctcaccaaccttccagtgtcccctgcctcagagtaggcagcagtctctaaggctgattgctccgaatactatgagaagggggatttttcaacttctagatctcttaagtaacaacgcccagacagaaaaattagtcaaagcaccttcaggcccttaatgttcaattttaatgagatgccattcctgttgcaccgtgaggaagcaaactgaagctctggctcactgcaaagaaagttatctgtccattacagaccttactggctggatctgtaagtataaagcttaccagagtttcctaagatgccacaatcgggaaaatgacaatggaaagtggtataaaggtgagggaaaagaaagaagggtcagaaatgaagagagaaaacagacagtagtgcaattgcaaggctacaggactcagtagtacagggaaaacgaaattaaaaagagaggaatttatttgcatagtgttgaaggattttggatttgacctggaagaaacatctaaaatttaatcttttgcactttgttgttaccactacactaaccaaaatttctaggccaaatgttttctaagccaacgggtttatccccaaagtaacaaccctcttttctctggactcttggaaactctatcctgctttccctttttccacatgaaatttatacttttcacttcaaactttctcaatatgctattcttttctaactgccttgacaacttctttattcctatgattaactttgtgaaattaaatcaagggaagtgatcaactacttggaagttggtctgaggaatataggttgaaaagagttttacaaactcattcttttagattgagaatgaatcagaacccctttattaggggtcctggaaattattccatcttccttaagaagactgataaattctatcataaaccagaatacagtgtgtctcaaaggccaactgttgccaggtgcaatggctcacgcctgtaatcccagcactttgggaggccaaggtgggtggatcacatgaggtcaagagtttgagaccagcctgaccaacatggtgaaaccctgtctctactaaaaatacaaaaaattagccaggcattgtggggggcacctgtagtcccagctactacacag

SEQ ID NO: 1684 - DNA, 4001 bp, Homo sapiens
gttgcagtgagccaagatctcgccattgcactccagcctgggcaacagagcgagactctgaatcaaaaaaaaaaaaagaaaaagaaaaagaaaaacaagaattcaccttcccaaagagttcagaaatttaaagtttagaatttaatgtggttctcttagcttttatctcattttacattcagctccttattaagtgagatagagatctctgtgacataagtctgaaaaatccatgcctatgggccacttctttactttctaactttgcacaaataattttcctgagcttcagtttcctcatctgtaaaatgagaataacaacactacctgccacacctacttcaaaggatcactgctgaaactcacatggggtaagacatatgaaatcaaacagcaaagcactctacaaatattggttactacctcaggtggggaaatattatcagcaggaaaaaaaaatgggtacaaaatagggtgaaagagtttcttctacctgaaatagaagggttgcaaacatagtgagaagtaactttttaagctattggctaaatatatttagggaagtggtctgatataaagttgagttattatttagaagtagattctcatgccaatacattcactttgcacagacggcagaagaagaaaaatacaaaagattaagagtgggtgtccggctctcagctcaccaaaataactgatgaagttccatttgaggagagaggggtagttagtcatggcagtcagtagacagagaatattgctgcattaggtgacagaagtaaaggtgtcgttaccaagcacagattatccacaatccatatagtatagctatacatggggcatgggatttctatagagcactttagaaaaaaaaatagaaaaatagaaaagctattccataagtatcaaacagaggtaattcagtaacttagttctccataggaagctctcagggaggtagcactgctgagaaggaagttaagatacctaaaacaacgaggtccagcgtgttctaggagctgtagcctagaggcaacacaaactgttttgaagtactacaaatcaacaaaacaagaggtgtggtttcagacctgcttgtctttacccagtaaagggctttactctttaagtgatataagatattctataacggggacacacaacaactgaattttctgaaagggcatcaaacaaatgacactgtgcctatgagtgacgcggtgtgcaggcacgccaaccagacataagtgaagataactaatctacagggataagaccagggacaaaaatcaccagtaaccatgacaacacaagtaggtggagggaaatacaaacactgaccaagcagcggggtgacgctattcctaagaccctggggtcagaaaaagacttgattagtggaggaagctggccaagaatgaaaccgattagcccaaaagggcagtgtccatgcagaaggagtcggcggcaacactgatactccccatggggtggctcgcagggtcaaaggctcatctgtaggagactggacgcctctaagaccaagaaaggagttacctggtgcagggctgtcaagccgtccacgttgaccgtgttgatatcagcacctcttgccagaagctttctcacctcgtcggtgtccccgctagagcaggcggccagaaagacagcaccgtcctcgaagcggaccctggggctcccgcgcctggtcagcggctgccgccccgcgcctcgtcgctccgcaggctcctgctctgtcagcgagccccgccagcgccgaagctgctctgcccgccgcattcgcgccgactctgcccgcttccctcctaggtgctccagttccgccattgctccggcctcggcagctgctgccaaaactaccaacactaaattactgttggggctcgagttgccgctgccgcctctctcagagcgcttcagcccggagcagagggcggagaccctcgcgccgccatctttactcctcccgccagtagtaccgcccgcacgctccctcggcttcaatacgcaggcgctgcccggcctcgggtcatcacgggactcgtagtaagaggcctgccctaagtgcacttggtggccgtaagggaactacaaatccctggatgcatcagaaaaaaggcgaggaccggcggctctctctttcgccacgggacccagtggggtcacctttgccctaaagctggaactgtctcctggactggcgtcagcctcttcctctgggcattttgggagttgtagtttattcttgttatgactagtaactaatcttatctccctaattatcacatcaattctttggagtggaaaaaaggcggtaattattcctgttttctggaggagagaactaaacattaagtacctaaacgactggattctatatcctagttctaagtctagggttttattaacatgtgtattaatcacggtaaatgtgaatgagcgtggggaagaggagcatacatacagatacagtattacatgttttacataaatactgtcaacttactccaggcccagaaaagatcttgaaaatgatgcattcagatgtagtgaaaagagtttaagctgtgaatttaaattgaattcacagccgcagacaaattacttgacttctcttagccagttttcttatgtgtaaaatgggaataacatctcacagggtagtcatgtggatcaaatgaaataatacatgcaaggatgcctaatactatctttggcacatattggatcccaataaataatttctcttccttctccctcctcctcctcctctactcttttcatataccttaaatttttacaagacagaatagatgtcttccatgatttttatttcttttcttttgagacagagtctcactctgtcacccaggctgagtgcaatggcgcaatcacggctcactgcagactcaacctcctgggctcaagcgatcctcccacctcagtctccccagtagctaggactacaggtgcccaccaccacacccactatttttttatttttttgtagagacaaggtctcaccatgttgcccaggctggtctggaactcttagacacaagcgatcctcctgcctcagcctcccaaagtgttggtattacagccctgagccactgtacctgtcccatgattttttttttcaaagctagagaaagatactatcaagcatactaaatcatactaaattcctaaggtagcaaatagaacatttttatattcaccaagactgggttataaaacatgtatctgtccgattgttttgttttgttttgttttgtttgagacagggtctcgctctgtcacccaggctggagggcagtggcatggtcgtggatcactgtagcctcaacctcccaggctgaagcgatcctcccacctcagccccccaagtagctgggactacaggcctgtgtcactatgcctggctaacttttgtattttttgtagagacagggttttgccatgttgctcaggctagtcttgagctcctgggctcaagtgttccacccacctcagtctcccaaagtgttggtattacaggcatgagccaccgcatccggccagtccgattgatttaataagtataacctccagtgctctagccctgaacaaaatacaattaaatgtgttacccataatgaaagagtacatatgcaaatgttagattctttaaacgtttctgtatgtttaaaatttttcatttaaaaaatgttgcaaaatgattggggtattgtaaagggaaactttattatattctgtcatgtgaaaatttgcctgttcctcaatttcccctgaaatgaagtggaaatcatacattaaggaaacaattaattattgaattgaaagcctcaaatgaaaagtgacatataaatgtaaaaaatattatgtttaataatactgtgtctaaacaccatatgctttagtaggatattcttaaatacattataaatactaattaaacctcatgtcaaatctgt

SEQ ID NO: 1685 - DNA, 4001 bp, Homo sapiens
tctcaggaaggcttccagactgggaggaattctctagatcagacttgccagacaaatccttctctgaatcagaaggctcttcaggaacaattctggcagcagtctgaattgttgctgtaaagttctggggattataaggatctacactgcagaaagagttccaaaggtgaagcccttcagggtcttgttcaaggtctgagtctgacagtgagctatcactatcaaaaccatcatcctcagcttcctcatcccaatcctcaccttctggatcagaacttgtttccaggtcactggatgcacctcccaaaatataatctatcagtttgttactacaagctggtctggcagaaatgggaaggtcaccttctaggtatgagtaatcaactacacttattcggccctctccaggctccttttccataggtatctcactagatggacagccctcagaagggctctcttcttccaaagcaagtggaacctctgtagttaataattctattttttcttcagtggattcctgggtgtttccaggaatgtctccagcagcaggaacaaactgtgttgggttatctctgcagtgttttggatccatccggagaaggctgtgttcctcctccaggctgtggtagccattatcctggtcaggggtgggtaaatcttgccccttgctagcctgttgaaggaattccagccgtttcatgcgaagatggtgaatttctggtaggccttccgtagaaagaggtggacatccctgccacgaggccggaatgagttctgcactcagcggctggggatgacaatggtcctctctcaggcagctgctctctggggttagtgtctggaagccgactacctcgctatttccatcactgttctgatagctgacttctagcctaggaaagcagtccaggtaggaagggttcagcaaataggataccacactgaaattgtctatgcgttgaatgtttagaggcccagagggcgaagagccaagttcccggttagagtacagacgggattgaaggctactgggcaacagctccactccccacagctgctgctctaagagaaaagcctgtgctgcagggtccaaagcacttcccttggccttaagctccaattttaggtctgggggcgagtattgccagtggatcccctcctctagccaatcaaggggactggtgaccgaggggtctgaggagtcgagctgcagcgaactcaaagatttctgcgctgtgggggcggctggtttctcccgtcccttcagggctctcagggcgctgtagactccagcaaaatctagccatctggtcggaaacattccaccgaaaagttggctccaaattagcaccttctgaagcaatccggggagcggcgcaaggagctgggagagcagtttcgtccagtaactgacccgagtctcgggctgggcagaggaaagcagtgtggggttcccggagttttccgggccaagaggcgtcgggaacttagaagagcctgcttgcgatcgccgagggaaaaagggtggccagaaccggaagcccgcccgagggccaagccgtttccgcgatccgcctgtccccggctccatctcctttttcttgacagtctctcaggtagggccgcggcgctcagcggctggaggtcgacgggattcggaggaagcctacagagtctcggccttgcccagcggtggcgtcgctgctccaggccgatcttcgagccagcagaaaagccacagagggcagcgaatgcggcagcgggcggcagaacacagggaagaacagcccgcgcaataggcggcgactgatgcgacttccatcctggcggggaaggaggttccctagtcggctcgacgcttcaacaccatggataggagtccccccacggcctcggcgatggttttccgactgacagagggttgaaaagcccctgagcaacgcgataccggaaggactgggtaggccggctggtgcggtggaagcgaagcccaaaatggccgcagggcccgcgcgccggcaggacacccccctagacgccggaagagacgcaggactgttgggcgtctacgtccctagcgccgcgccgcccaacgtcactcgcaaaatccccggggggcgggcctttccgcccacttccgtgtggccgccgattggttttgccagatttccctgtcggcttccttactcgaggtagagccgcacggcagcgtgaggttgcatcagccggggcgggggggggggggggggggggggggggaatgcacgcatgcgcagtcgtttctgtgtggtctcctaggagaccgccccaacagccctctaggttaaaggtcttggggaggggaggggttttcaaaataacccgagaatttcccggaggcgttttgatggcctaatacacactgacgtgtgtacagtcatcccctctcatgaaatggggattagttccaggaccccgtagacaccagaatccgcagacggtcaagtcccttatgtaaaatggtatagtgtttgcatataacctgcatacaccttcccagatatttaaaccatcccctagattaagtataatacctaatacaatgcaagtgctatggaactagttgttatactgtatttatttgtattatgttttattatctttatttttcccgaatattttcaatccatggaaggttgaatgccccgcgggccaactgtagggttatcgtagtcttagatttttattatttatttatttgagacagggtctagctctgtcgcccaggctggagtgcagtagtgcgatctcggctcactgcagcctcaacctcctgggctccagtgagcctcccacctcagcctcccgaggagctgggactacaggctcgcaccaccacgcccagctaaattttttttttttttgagacggattcccactctgtcgccaggctggagtgcagtggcgcaatctcggctcactgcaacctccgcctcccgggttcaagcgattctcctgccccagcctccctagtagctggtactacaggcgtgtgccaccacgcccagttaattttttgtatttttagtagagacagggtttcaccatgttggctaggatggtctcgatctcctgaccttgtgatccgcccgcctcagcctcccaaagtgctgggattacaggcgtgagccaccgtgctcggccaatttttgcatatttttatagagacagggtttcgtcgtgttgcccaggttggtttcaaactcagctcaagtgatctgcccgcctcggcctcctaaagtgctggggttacaggcgtgagccactgcgcccagcctgacagatatttcagggttctcctattgttcagtactatgtagaccatcaacctgagatcttatgtaaaagttgggcagtgctgcgtacatacatgtctggtgtggggcaaactaaactcacagagaagcagctcagtccccagaactatttactctcttttatgcttccaagcaggcaacatattcaattcatatttattaatacttccttagcaaccagaaccacagaatacaacagccaaaaaggaaacatggaccactatcctttgaaaaaaaaaatggctggtaattttaattgctgtatttgattatctcttgtgagtttggtcttagttcatttctttatttctgctaaaactctgtaatagatacccctgaagtcaagtaccaattacagagggagggtggcagttatgagcactagggacagcagaaaaatctttagggagctgggaggagaccagcagctcctcctgccttactgggcctgttcaaggaacaaccacttctttttttcttttttgagacgagtctcgctctgttgcccaggatatagtgcagtggtgtgatctctgctcactgcaacctccgccttcctgggttcaaactattatcctgcctcagcctccctagtagctaggactacaggcacatgccaccacgcccggctaatttttgtat

SEQ ID NO: 1686 - DNA, 4001 bp, Homo sapiens
caattagtttgtctcctttgactacatccagatgtaaaccgggagggggcttacctgccctgaaaaataaaaatagaaaaaagcattttcaggatgggtttataaatgctatttacaaccattgtcccattcaacattgcagctctcctaccagcctataattagttcatgttcaagcagaaatgtcatccacttcactgttattacagctccattctacgtttgacacttacttccctagtgattcaattgctctgcaacagattttagtagatctgtatttagagcagcaccaagaaacctatattttaacactggatcttcacctcagagaaagaactgcatagagagtgcaagtacgatagctggggtggtctagtcacctggagtttgaatctgaaatccacccctactccaatatcatataaagaccgaataaattagttgctgtttggggctcatcaagattagtctcatcacagagtaagcaaagagtactgtcctgagctctgaaaccaaatcagaggtgcataattagggaactagggcaattcaaaatcatgccccatgaaaccaggtaccaaatgaatatgttacccttgaaacaggtctttctacaacagcatgattaggggacgtttcctctatatcctacagccataccattcaagggagactcatatgtcaaagcacctaacggtgcctggtacctaccagatcctaaggaaagggtaggtgatctcaaaaacagtgctttctaactatgtttgctatctcggcccaaatttgaaatcaatacagcgagggatcaaaatggatacagaatttgtagactgaagcaactactacaaaagtgcaaagcgatccagaaaatagccacacatttgcttgctttttgggtttgctaatttgaagttagaaaaaagaaccacctcactagaacctttagatttgcacatgaaaaaacgtatccttgtctagctaactgaagattcaacacagtcatctcacaatcctgccccaacccctcctctatggaaaggacaatgcaccggacaaaaggccattttgtccaggaaaaaggaggaatgttacatccaaaacatactttctgaattcctactatgtgcctgactcaggcctaggagctgggaatacaaagatgcagtctttgcccttgaggatggcaatacaacgggagacagagacaagcaacaaacaatacactgcgatgagctacagcagaaaaaaactcttaattcagaagcgtttccttgtaaggtaattcatatttattcaacttgtaccctactcaaagaccaaattaaattatttcattattcccaagaactttcgaagggataaaaagggttcatgccaaccattactaatgcctactagtgccacagactgggagctccctgagggcagggatggcgctaacctaccctcgtattctctgtggcagacagacaagtgccgcacgagggatgcagcaaccacagagggatgcggggcttggaggtagggttggggccggggctggctcgagcgcgctcgggacgtacaggaaggggccagatgcgatgctccacgagagcaccaggcactcagtcaagagttgggcgtaagttcgggccaaggcctcgaagcgctccggcgactggctaatcgctcaaaggggctgcctaagtgagcgcctttgagcccccaaccccgggtttcttcagttcctgggcctgggctccaggctctcggttcttcaacacgtcgcccggcccggtgcagcaaacagtttttcctcaaccattccggggtttctgagccgttcggctcgcagcagaaaagtaaaaaaagagccgcccttccagcccaggctagctccggccgggccactctagccctggccgccccgccactcaccaggttgggcagtcgaacagcgggaggctagagccggagttcgcggctgccgccatcttgcgtctccccctcccatttggcgcgccctaagcacgccgggaaactggaagaccgagaagggaaaagcggcatcccagcagcctgtgcgtacgcacgctcacgcacgcccgtacggggggcggtgcttctagtggggacagaggagcttttgggattttttttttttcagcgtttgtgcgagttggccgtctctggaagtctccagtggttagggttttccttggccaggaggtgtcaaaggaaaaggggctttgtagggaggggagtcagtctttccctacgtcctcctgcaaacgcttcttggctctaaaatcttgggactaagccgtgcgcgatggctcacgtctgtaatcccagcactttcggaggctgaggcgggcggatcacttgaggtcgggagtttgagaccagcctgaccaacatggtgaaaccccgtctctactaaaaatacaaaaattagtcgagtgtagtggcacatgcctgtaatcccagctacttgggaggctaaggcaggagaatcgcttgcactcgggaggcagaggttgcagtgagccgagatcgcgccattgcactccagcctgggcaacagagcgagactccgtctcaaaaaaaaaaaaaaaaaaagtaaagaaagaaaaaatctggggactacatcctcctccagagtttaggttaagaccgtcagccttttgccctcaaagcggagaagctaaagggcaaaactcggagattggagtgattattgtttctcttcagcccttctccaaaaagtggcaccctactcacttttttctaattcacgtttaggcctgtagattgtcagggaatctgcattaggggtcacctagtctgtttatgaaaactctggacaagcaggagccaggagcaggtccagtcagaaagcaggggtccaaatcatcactgtgcttggctcaaatggttaatttttttaaaaaggattttttgcttttggttatagggcaaggaagcataaggattgctcgcttgccctagatcaccagctggttttaagagaccattagcagggcctctggttttttattttttatttttttattgatcattcttgggtgtttctcgcagagggggatttggcagggtcataggacaatagtggagggaaggtcagcagataaacaagtgaacaaaggtctctggttttcctaggcagaggaccctgtggccttccgcagtgtttgtgtccctgggtacttgagattagggagtggtgatgactcttaatgagcatgctgccttcaagcatctgtttaacaaagcacatcttgcactgccctttatccatttaaccctgagtggagagagcacagggttgggggtaaggtcatagatcaacaggatcccaaggcagaagaatttttcttagtacagaacaaaatgaaaagtctcccatgtctacttctttgtacacagacacagcaaccatccgatttctcaatcttttccccacctttcccccttttctattccacaaaaccgccattgtcatcatggcccgttctcaatgagctgttgggtacacctcccagatggggtggtggccgggcagaggggctcctcacttcccagtaggggcggccgggcagaggcgcccctcacctcctggatggggcggctggccgggcgggggctgaccccccccccacctccctcctggacgggagggcctctggttttaatggcattgtctgttcagcagttacctgggcaagtatgtattttatatggatcatctcacttaatcctgacaatactcttgagttaggtattattataattccagaggagaggcttagagagattgagttacccagcttcaccctagaacaagtggagtgggatcaaaaacctaaacctatatgatgccgaaggccatgctcatgagtcactattctctcttacactttgatgttggtataattatatttattattagcatgcaactgatgcccctctttttcacttttgtagacgcgttg

SEQ ID NO: 1687 - DNA, 4001 bp, Homo sapiens
tagaaaaaagcattttcaggatgggtttataaatgctatttacaaccattgtcccattcaacattgcagctctcctaccagcctataattagttcatgttcaagcagaaatgtcatccacttcactgttattacagctccattctacgtttgacacttacttccctagtgattcaattgctctgcaacagattttagtagatctgtatttagagcagcaccaagaaacctatattttaacactggatcttcacctcagagaaagaactgcatagagagtgcaagtacgatagctggggtggtctagtcacctggagtttgaatctgaaatccacccctactccaatatcatataaagaccgaataaattagttgctgtttggggctcatcaagattagtctcatcacagagtaagcaaagagtactgtcctgagctctgaaaccaaatcagaggtgcataattagggaactagggcaattcaaaatcatgccccatgaaaccaggtaccaaatgaatatgttacccttgaaacaggtctttctacaacagcatgattaggggacgtttcctctatatcctacagccataccattcaagggagactcatatgtcaaagcacctaacggtgcctggtacctaccagatcctaaggaaagggtaggtgatctcaaaaacagtgctttctaactatgtttgctatctcggcccaaatttgaaatcaatacagcgagggatcaaaatggatacagaatttgtagactgaagcaactactacaaaagtgcaaagcgatccagaaaatagccacacatttgcttgctttttgggtttgctaatttgaagttagaaaaaagaaccacctcactagaacctttagatttgcacatgaaaaaacgtatccttgtctagctaactgaagattcaacacagtcatctcacaatcctgccccaacccctcctctatggaaaggacaatgcaccggacaaaaggccattttgtccaggaaaaaggaggaatgttacatccaaaacatactttctgaattcctactatgtgcctgactcaggcctaggagctgggaatacaaagatgcagtctttgcccttgaggatggcaatacaacgggagacagagacaagcaacaaacaatacactgcgatgagctacagcagaaaaaaactcttaattcagaagcgtttccttgtaaggtaattcatatttattcaacttgtaccctactcaaagaccaaattaaattatttcattattcccaagaactttcgaagggataaaaagggttcatgccaaccattactaatgcctactagtgccacagactgggagctccctgagggcagggatggcgctaacctaccctcgtattctctgtggcagacagacaagtgccgcacgagggatgcagcaaccacagagggatgcggggcttggaggtagggttggggccggggctggctcgagcgcgctcgggacgtacaggaaggggccagatgcgatgctccacgagagcaccaggcactcagtcaagagttgggcgtaagttcgggccaaggcctcgaagcgctccggcgactggctaatcgctcaaaggggctgcctaagtgagcgcctttgagcccccaaccccgggtttcttcagttcctgggcctgggctccaggctctcggttcttcaacacgtcgcccggcccggtgcagcaaacagtttttcctcaaccattccggggtttctgagccgttcggctcgcagcagaaaagtaaaaaaagagccgcccttccagcccaggctagctccggccgggccactctagccctggccgccccgccactcaccaggttgggcagtcgaacagcgggaggctagagccggagttcgcggctgccgccatcttgcgtctccccctcccatttggcgcgccctaagcacgccgggaaactggaagaccgagaagggaaaagcggcatcccagcagcctgtgcgtacgcacgctcacgcacgcccgtacggggggcggtgcttctagtggggacagaggagcttttgggattttttttttttcagcgtttgtgcgagttggccgtctctggaagtctccagtggttagggttttccttggccaggaggtgtcaaaggaaaaggggctttgtagggaggggagtcagtctttccctacgtcctcctgcaaacgcttcttggctctaaaatcttgggactaagccgtgcgcgatggctcacgtctgtaatcccagcactttcggaggctgaggcgggcggatcacttgaggtcgggagtttgagaccagcctgaccaacatggtgaaaccccgtctctactaaaaatacaaaaattagtcgagtgtagtggcacatgcctgtaatcccagctacttgggaggctaaggcaggagaatcgcttgcactcgggaggcagaggttgcagtgagccgagatcgcgccattgcactccagcctgggcaacagagcgagactccgtctcaaaaaaaaaaaaaaaaaaagtaaagaaagaaaaaatctggggactacatcctcctccagagtttaggttaagaccgtcagccttttgccctcaaagcggagaagctaaagggcaaaactcggagattggagtgattattgtttctcttcagcccttctccaaaaagtggcaccctactcacttttttctaattcacgtttaggcctgtagattgtcagggaatctgcattaggggtcacctagtctgtttatgaaaactctggacaagcaggagccaggagcaggtccagtcagaaagcaggggtccaaatcatcactgtgcttggctcaaatggttaatttttttaaaaaggattttttgcttttggttatagggcaaggaagcataaggattgctcgcttgccctagatcaccagctggttttaagagaccattagcagggcctctggttttttattttttatttttttattgatcattcttgggtgtttctcgcagagggggatttggcagggtcataggacaatagtggagggaaggtcagcagataaacaagtgaacaaaggtctctggttttcctaggcagaggaccctgtggccttccgcagtgtttgtgtccctgggtacttgagattagggagtggtgatgactcttaatgagcatgctgccttcaagcatctgtttaacaaagcacatcttgcactgccctttatccatttaaccctgagtggagagagcacagggttgggggtaaggtcatagatcaacaggatcccaaggcagaagaatttttcttagtacagaacaaaatgaaaagtctcccatgtctacttctttgtacacagacacagcaaccatccgatttctcaatcttttccccacctttcccccttttctattccacaaaaccgccattgtcatcatggcccgttctcaatgagctgttgggtacacctcccagatggggtggtggccgggcagaggggctcctcacttcccagtaggggcggccgggcagaggcgcccctcacctcctggatggggcggctggccgggcgggggctgaccccccccccacctccctcctggacgggagggcctctggttttaatggcattgtctgttcagcagttacctgggcaagtatgtattttatatggatcatctcacttaatcctgacaatactcttgagttaggtattattataattccagaggagaggcttagagagattgagttacccagcttcaccctagaacaagtggagtgggatcaaaaacctaaacctatatgatgccgaaggccatgctcatgagtcactattctctcttacactttgatgttggtataattatatttattattagcatgcaactgatgcccctctttttcacttttgtagacgcgttgggaggattatctgaccagtttttccttttttaaataaatcaattgctaagttcctgttcatccagaaagaggc

SEQ ID NO: 1688 - DNA, 4001 bp, Homo sapiens
acggggaaagaagtattttcaacaagtggtgtggagataaatgtgataactacacacaaaataatgaatttgaatccttaagtcataccctatataaaaattaactaaaaatggccaaagacctaaatgtaaaggttaaaattacaaaattcttagaagaaaacacagagtaaatcttcatagcctcatatctgggaaaggatccttagaaatgactccaaaagcacaagtaacaagaaaaaagagaatttagacttactcaaaatttaaaacatttgcgcttcaaaggataccaccaagaaagtgaaaagacacaaggggcttatatcaaggacatataaagaattcttacaactcgataaaaagacaaataacaattcaaaagtgggcaaaggatctaaagagtcatttctccaaggaacatatacaaatggccaataagcatgttcaaagacacttgacatcattagtaattagggaaatgcaaatcataaccacgaagagatactagttcacatccattaggatggctataatcagaaagtcaaaataagaagtactggtaaggatgtggagcgatgaaaatcctcacataccacaagtgggagtgtaaaatagtgcagccactatggaaaaaactgtggcaatttatcaagtgactaagcccagaattaccttatgaccgagcagttccactcctacatatacccaagagaaatgaaaacatatgtccacacaaaaacttgtatacaaatgttcatagcagcattattcataaccaaacagtagaaagaactgaaatgtccatcgagtgaggaatggataaataaaacatggtataaccatacaatagaatattattcagccataaaaaggaatgaagtactaacacatgctacaacatgaataaatccttgaaaacattatgcaaagtgaatgaaagaagcctattacaaaagacgacatattataatattccattcacatgaaatgtccagaatagggaaatctagagacggaaagtaaattaatggttactcaaggaatccctaaaggaatagggggtgacagttaaagggcatgggatatctttttgagatgataaaactattctaaaattgactgtggtagttgcacatgtctgtgaatatactaaaagccatggaattgtatactttaaatggggaattacatggtgtatgaattatatctcaatagagctgttttaagctctggtctctaaaatactttcaaatcaaatacccaaaacattgctgagagacactaaaagtttaaagatcaattgcagcaatgccactgaccaataatcatataaacttcattccaccaccaatgtgtatacaacacatacacagaatccactagttttgtctttatgtttcctataacttataatactaaattagattaataaaaattttcaaggaacatgtaaatgaaatactaaaaccaacacataaaatgaaaaagaggtagtaacaatagcttattaagatggccacagagggttggttttaagaacagttcaccgaatttttaatacaatacagtaagataatttgtagttttcccctgtaatgtggttttgcttgtactgtttcaaatgcatcttcccagaaaatctagtctctattcatttctctcctcaagatttcaaataccaagtagaacactgaaatcttaatatacatactcattatcataaagccttcctcttcttgcccttcttcattaaatcagtgataaactaaacttctgaggtgataaccaagttatttcaagttgttcattgttaatcctctacatttaaggataaataatttgaagtagcaggaatcatttctaacaaataataattttataactataattttccttagaggaaaacatccctaattactgctgctaacatacttgaaatctaaagtaagatctcatataggattcatgctacaaattatagaacaagcactgtatcatagcaacccagcaataccactacagtgacacgctgaggatgcaatccaagattctaatttaagaaactggcacagaatataggacatgtagctttttttggcaatacccctagaacattaataactaaaaatctaaaatcagcttttatttgaaactttagagagcaggctattataaagtaacaatggaaatgtttattaacaaatgattcacagcactgtgactaaatatgacttattaaggttctgtgatttcattaaaattgaaaatggtgggaaaaaattgtagacatcgtatttcaggaaattagaacacatacgcactgccagtttgataatgttctaatatataaatgtatgtattattttaagaaaacccctacaatactaactaaaactttcaagaacttaaatacatccatgttttaatcaattaccattcaaatgtaagtatatccgcaactactgctattttttatttcaaaaaattaactgggctgggcatggtggatcacacctgtaatcccagcactttgggggggccaaggtgggcagatcacttgaggccaggagttcgagaccaagctggcccacatggcgaaaccccgtctctactaaaaatacaaaaattagccaggcgtggtggctcgtacctgtaatcccagctactcagaagactgaggtaggagaattgcttgaaccaggaggcagaagttgcagtgaggagattgcaccactgcactctagcctgggtgacagagcaagaccctgtctcaaacaaacaaaaacaaggtgttcaagtctctagagcaggacctaagctctacagacatcccacttccttctaccatcagcataaacgggctttgggatggtggtggtggggaaatccaagaaccctggaaattatataaaatattatatatattttttaaaacggcacattctttaaattggattttccaagagattcacatataatttccatgaaattaaatattagtactcttagaaattatttcctttccattaaacgtaagaaacttataaccaaggtttcaaatgagttgattcagtatttccagaaataaaaactttattcacaaacaattctaaattgattctaatattttttcattcagaaatttgctatttgtaatattctattaacagaaaataataggctattgaacaacatacacagtatgatcccactcatgggaaaatatgggaagatgctcaaaaatttaaaagagatttcctctgggtgggaatttttactttctaccattgttaagattctcctttgagttgttttaacagtgagtctgtaagtttttacaaaaataataaataaataataaaatggggtagtttaaaatatgacacttcccattacatattctttaaatgagtttattttagaaaaccatgaaaactgagattcgctgatgactcacagcaagtattgtattataacctaaaatagtcattcctgttctatagaagttacttctccagatcttaaaaaaattagttcttaaaaatatatagagagtatccaggtgatccaaattaaaaacagattatcaaaacagatgaagtaccaaaaccagtgactagatatacggcagctaggtgaaggctgagttatttttacctttcctatatgaataatcaaaattttttatgggccaggtgcggtggctcacacctgttaatccctgcactttaggaggcagaggcaggcagatcacttgaggtcaagggttcaagaccagcatggccaacatggcaaaaccccgttatctactaaaaatacaaaaattagctggctgtggtggcgggagcctataatcccagctactcgggaggctgaggcagaagaactgcttgaacccatgatgtggaggttgcagtgagcagagatcataccactgtactccagcctgggggacagagcgagaccctgtctcaaaaaaaaaaaaaaaagtcttatga

SEQ ID NO: 1689 - DNA, 4001 bp, Homo sapiens
cactccaagagtcagggcaaggtagggtctcaatagggttctggagctgttgtaggtcaactgtgatttgatctggggttttctttagactccttgccaaactaaggctggattcacaggcccaaagacaaatgagaaccagactggccttgaaggggatgctgcagctttttcaaatgaattgaaaaatctgaacatcagatgatagggatttccgtcaggttgcaaattttatctaaatatgtaggagcattatcatcttgttccaacatttctatctcataaaaagcaaggacattaaaattataaaattaagcatgagtaatacacaaagaataaactagaacaccaggaaataacatcgaaaatcctctaaacctagtgggaaaagtgagccaaaaagagtgccaagttctcctgcaaggcattaggcacggataccaatttgaattcctgtacaaacctacaaagtccctggaatcactgcctggcaaactaagttcccattcgactgcaaagcaacactacctactccttcgtatttccaaatagaccatgtgtatcggctcagacaacagaatattttaaatctattccttgagctaaaggataccatttaaagctaacgatcctgtgaataagatactacactggtcaaattttaggctttttctttataaatacatccaaaggccagctaactcttaaccgttgtttgcattcggattcctggtctgatgactcttaggggcaatcaatgggaagtgaagttgagaagaaggtgggtgcagacggctttataactgtaaaagtaaaggactagctaaaagtggccgaacagaggagctgacactcgggaaagtgaaggtcggggaaggttcgtgcggttgttaaagcaagaccgggaaagggcaaacctggaagaggagtgaaggactctacttcacgggacgcaagataggaagtgcaggttaagcaagcgcgcaggtggggaagggtgttggcctcccctaggatggaaagagttcaggtgggaattagaaggaaacagccaagacttcacagaaaacctgtttgaataaggaggagggcgtgaggtgacgccaaggcattgtggggaactcggctcacacactaccagtcccaactgagcaggagaaacccagcaggaaatggctctgctggcgcagaggcaagcgttgccagcccctgcgctcgctgctggggctgcgccctcggaggttacctttgagctggggcagcgggtgcagctctgcctggctgccctggctgcgaaactgcgacgagccctgggagcgcttctgcctctgcgccttgcggaccgatttccgggtgaagccgtccactttctccgaggccgagatggcggcgctggcagcccccgccggcggcgacgacgacgacatctccgcggccctgacgcttggcagctccggctgctgcttgcaaggcacgggcagcggcggagacggcaggaggaggcgggggagaggcgcggggtgctcgcgcccctgcgccccggccccacggccctccggccccgggacgccgccgagcttctcctcgccgcccgccaacgcctcacggccacatctcagcgctggaggttcctggtccccggcgcgcggcgagctcccggggctgacggagggaagggcgggggcggaggggggtgaagaagttgttgactctgggcgcgcagagcgggtggaagagagcccgaagtttagacaactgaggcgggggcacgggggtgcgggtgccgagcgcgcctctcgtcgcttctgcccccgtcgccagccagccggccggccagcacctcagcggccgctgccagcgcagcccgccctgcctggagcctcctctcagggcgctgccatcgcgggtcccctcggagccactgccgcggtgcccgctcttcccggtcaacgccggcccctcatcgcccggggcgctgccccgtagccccggccctctgcgtgcacacactcgctccttgccgcgctgggcggcccgaaccccctcccccacgcgcccgtcggccgcccacggagaaccccaggcgagcgaccgctacaacttgagaaggtggttggtacaggcgactggggagtgtgtgcgcgtgtgcgcgcgccagggcgcgcggcccggggaggggcctcgcaaggggtgggaaggaggagtttgactgacaacttccgcggggtcccgcccgcctcttggtgcggcggcgggggagggggcgggaaagcatgccagccctcttagccaatcacacggctaagcggcagcgacggcgtgaggtgcggcctcttgaggcagaggagtggggcgggctgtgtgacgggcttcggccacagccaatcgtaagtgaagacggcgagcggggtgcccctgcgtcagaacaaatgcggcaaatcgcttgggagggaggggaagcgctcctccaccagcgggcatttttgcgctcacgcgcgactgctccaggctgtcattgctctcctgaccgtctacgagaagactgggaaacttgagagggtgcgttcagagagcaaaatagagcgccccttcccttccctcacctctctgctggccaatgaagaactgaagcgattggtggggcgccggagggctggggcgcgaaagagcgccaggtgttacaccactgaaagggggcgcagcagaggtcaggtggcgagcaagcagtgtgattgacgggcgaggggcccggggaaggcgagaaggtgagctcgtccaatcgttgcgaggtctggacacctgggcgggtcttggcgccttactggccccaaaccgcaaaattggtagttgcggaataaatttgtagctcttgggaggttcggactccgcaactccagagagctactctcgcgtggggtttgggcagtctagcatctgctgcttcaaagagttctgcaagtccacgccctctaaaaagagatttctcattcccaatttagtatcctgctaattttcacccctccttgagccaaaggccctcaactactccaacgagaagagtacaaattcattggtcagtggtgtgtggatatggaggcttgccatgtactcttaccggaatctctttcttggagattccgtctagattttgaatttcttaaggacgaggactggtcatcttagtttttcgtgcagtgctttccatacggtggccgttaataattattaatctgaacagtcagcctccctttgcgccaatggacccaaatctgtaatcccctccctcgagctccagaccttttcctttcaacataataaaagtaattgtcgtatatttaaacgaagccacctgatgcatatgtacagaagattccaaatttggcaggaagttgaattctagacctagaaccaaacatactatcctcaaaacatttcctccttcagatttgctgggcggtgaaattgtacataatcctcccagtcaaggaggttcaaacctcagcagcgtttctgacacttttcgctttctcacatagtcaagctccagatcatgttaaatctactttcacaattggcgtttctcccaatgtgtacaaagaccgccaaacgtagttcacggctttcaaactcactgccacatcaatcttttaagatcacttttatcttacctgcgtgtttgaggaaccacccaatacctgcagaatagagtccaaattcaagactctctgcgatctgactcctgtctttccaagtgtaaattcctacatgtgcccacaaaaactctttttagttcaggcacatcattccacatactgatcccctaaaagaagttatgcatcctcaacacttagtctttgctgttccaacatcttgaaataatccacttttttttttcttttttgagacggagtcttgctctgtcacccaggctggagtgcaatggtggcacaatctcggctcactgcatgctccgcctcccgggttcaagcgattctcctgcc

SEQ ID NO: 1690 - DNA, 4001 bp, Homo sapiens
cctgggtgtctcatgaggatctcaagtttagtaagcccaaaagcagactcttgatctttcccccaccctaagtcagcttgtcctacaggcttccccatcttggtaaaatgaaaacttcacccttccaattgttcaggccaaaacctgtggagtcatctttggctcctttctttctctcttattccaagtctgatctgttagcaatccaccttcaaaatctatccaaactttgaccacttctcaacacctctactgttactctacagttccaagtcatcatctcttgtttaaattattgcaatagtttcctaacctgtctccctgtgaccatccatgacgccctacgatctattcttaatacagcaactaaagtgattctttaaaaatgtgtcagatcatgtcactcatctgctcaaaaagttccccatgacactctagccaaagtccctgcattagtcttactaggcccaataacttctgtacctgcccctcccttccaaactaaactcctaacttcttccccttgcttactcatttccagccacgctgatctgaatgctgtcccttgaacacaccagacatacttccacatcagggctttcccatttactgttccttctaccagacagccaaatggcaactgtcctcatctacctcagttttgtactcagatgtcactttttcaatgaattctttcccaactttgctttattaaaagtgcaagcccccacctccagtttttatcctacaccctactatatttttctctgttgcacatatcaccatttgatatgttatgttttacttgttaatttctttataatctgcttctcctactggagagtaggttccaaaagaacaaagaatttagtctgtttagttccctactgtatcctcagcacctagtaggtgctcaataactgtgttaaatgaatataggttgagcatcctaatctgaaaatgggaaacccaaaatctgaaagtttttcagcgcagacatgatgccacaagtggaaaattccacacctgacctcatgtgatgggttgcacaaaattatttaaaatattgcataaaattaccttccagctatgtgtataaggtgtatatgaaaaataaataaatttcctgtttacacttgggtcccaccccccagatctcttgtatatatgcaaatattaaaaaaaaaaaaatccgaaatgcttcccagtcccaagcatttcagataagggttactcaatttgtaaatgaactgtaggtgcctaacaaatctctgttcaatgtgtgaaggaataaataaaagggtagatgcgccagtcatatagccagccgcagctcacctagcctgaccaagtgagagatgctgcatcctgacgccactactgtaaggattaatcaaggacagcatgtaaaacttcaacgccgtgcgcggctctctctttccttccccttctctctttccagtgaaggggacggctccttccccttctctctttccaatgcagatccttcaaatcctaaaatgtcgaggcagccgcgtgctgtgggaccacgtcctcgccctctacacccgcattttgcagatgcgaacccaggctaggaagagagagaatcgccaaacccttttaaatttctcactcactcacccatcccatgccagatcaccaacggcagcggcgccggcgggtccagatgctgcagcgcccgagaagcgcaggtccatggcaggagagccacagccaagagccacaggcagccgggcgacgccatcttcgctgtgtcacatgaccgcgggcgcgagactccgggaaccgcgctccgcccgcctgggcgtggcgccgccggttgcagatcgcaacctgcgcatcccgaacggatgcccagcctgatgggcgtcggccctaccctggagctttcagcgcgacaggtcccccgccagaccccgctggccgagtggggctctgcgctctcgtagaccgccctctgcggtgaatcaaaataattgctaacatatattcagtgctgatcagatgctatcaggcactattcttacaacctttaactaattcactcttcataacaatgctgtatgcacttctccccctgacaggtgaggacactgaggcactgcgaattggcactgagtaaggtgcccaaggtcacagagatagcaaattggtggttccaaagtcgttgctcttcaccactgccctgtactgcctttgcaagaaacatgcacagaggaaggaagaaagaaggagggacggtttccagccaggaccaatcatggcagggtgtggggtttgttctggatattgaaggagaggtaggatttcaacaagcaaagatgaaattcagaaggactgagatgagctaaggtagagaggagaaagacaactgtgttttctagaaatgtcgggacttcaagacggacgaaagcatatgttggatgcataagagtgagggggaaacccatggccactaactggcctaatctcagctggattatttcaagggtctctcatcaaccatttccttttccattctctcctctttaattcattttatgctctattgccacattcatccctcaatccaccttcataatatcagttccctgctcaagttttttttcaacaaaacatcaaaaaatagtttaaataatttataaagaaattagagtgtatccactatacaatggaataatatgaggccagttttataaaaaatgagtatagggccgggcgcggtggctcactcctgtaatcccagcactttgggaggctgaggtgggcagatcatctaaggtagcgagttcgagaccagcctgaccaacatggagaaatcccgtctctactaaaattacaaaattagccgggtgtggtggcgcatacttgtaatcccagctactcaggaggctgaggcaggagaatctcttgaacccgggaggcagaggttgcggtaagctgagatcataccattgtactccagcctgggcaacaagagcaaaactctgtctcaaaaaataagaataaaaaataaataaaaagagagtacagcccaggcagcatagcaagaccccatctctacaaaaaaaaaatttttttttaattagccaggggtggtggtatgtgcctgtaatcctagctactggggaggctaaggtgggaggatcacttgagcccaggagttcaaggctgcattgagctatgatctcgccattgcactgagctatgatctcgctgttgccctgggcaacagtgagaccctgtctctctcaaaaaagaaaaatgaggtaaatttacataaagtgacatgaaaaatgcccttaatatgttgtaaaagaaaagtcgattacaaacccacggtctgtaatctcttctattccatgccattgggactagaggtaagttgttagttgaaaagtcgattaaaatgcagaatccactgggcgcactttgggaggctgaggcaggtggatcacctgaggttgggagtttgagaccagcctggccaacatgatgaaaccccatctctactaaaaatacaaaaaattagccgggcatggtggtgggtgcctgtaatcccagctactcaggaggctgagacaggagaatcacttgaacccaggaggcagagggtgcagtgagccaagattgagctactgcactccagcctgggcaacaagagtgaaactctgtctcaaagaaaaaaaaatgcagaatcataaagcattatacagtacagtatacagttttgttttaagaaaaataagcttattgtataagcattttattttaacttaagacttacaaattgaagtagtttcaggatttttctgtgaatatagcccgctcaatgaagtttcctgcctttaatgaactatttataatttctttaaaggtttctttaaactggagcaataactgaaagacacttgtgaagcaatctgaatgcaatttttttttttttttgagacagggtcttgttctgtcccccagac

SEQ ID NO: 1691 - DNA, 4001 bp, Homo sapiens
gacaggacccatgtgcaatgtggagctcgggacactctgagacacacctgatccctgaacagaaaggcctggctctgagggccatcctgcgtagttcctgtcacctagaagccaggcatgggcccacatcctgttcaaacagctctgagcaaatggatgtccaaggttgcaatggagcttgacctcacctgcagggatgggaaggaccccagaagcggtaccctggaatcacccttggagggtgcatgttcaaaatttggagtcagtgcacctgggctggggcttagagattctgggtttaagaagccctccagcgattctgctccatctagtgcactttgagaaaggttgggctggagatgacatctcctgccacacccaaactcctctccctgatcccaagctgagtcagggtgcttcgggcacatgatcacagccaatcatgtgtccacctttgtctacaggatgaagtccaaattacctgaggctaggcctcaagttactccaagaactgccctcccaaccttatctcctgcctcctgacccacgtcttcagtcatttcaggtctccaggcttctgcacgtgccatctcttcccctagaagtgtcctgctccccttcaagggcctggtcatgagataagaagactcacttctaaattgccctttcaaagatgccccatgagagctggctggacaggaccttccacctcctcctctccccttgtccacacacctgaagaacgctaccaccgtcctctgcgaccactgtctttgaaacgtactctccccaccctgggttgtgcatttcttattctccaggtgtaaacacacctagaggttcagcaaatgttgagagacagtgagagaaagagagaggtagagagaaggacagagtgaagaagagaggaaacgggtgagaaaggagaaagggtggaagagagagaagaggaaggaaaggagaaaggaaggggagaaagctgtgagctcgaacagcccagggttgaggagaaaagcactctggaacagacctgcccgatgcctaccagtctggaactcaagtgattgagcttcgtagttctcatctgaaaagtaggggaataatgcaatacccaccacctaggctgactgcagagttaaatgagacaatccaggccaagcgattacaagggtgcctggcactggcactcaacaccaacagcccaaaatgactattatttgttctcattgtagcccctccagcgtccgggcacacaggcgccttcagtaagcgttgattagacatgacctgtgacccaggcccgggacccctcacacttccagactcagactctccatttacacgtttggaaacctaccctaagcacggcgtgggaggaggcagtgtaggccctcggtccctgcagacctggggagattgtggagggaggagcgtcccagctcggggctaccacccactccaggcctcggcgtcctcggccacagctccctcctggtgactcagcccggcgcgggccgcctgtttggagggataatgataggacagctgctggggccagcgccgcgagggcccctcgcccggccggcccgggaaaaacgaagccatcagatgccaaggggccggtcggccggggcagggcaactcctggccaggccagctcgagaggccgcgctggtcgcctttgaggtggggggccactggctgcggattcccgagggccacccagtcccggcccggagcctcgtcccacgatatcgcgccacaaggagggcgcaggagccgggacagtccagcggccggaggagagggctggaaggatgtggcagggaagcccaggagccccgacccccagccgtgaagtttgccacctgcccccggtccggctcaccacgtccagatccgccgccagggcccagcttctgggtcaaggcccgccgggtcagctgaccgcgcgccaccgcccccgcgggaaccgcaggccccgcccccacgccgcgcgctgggctgaccgggcctggaggcgccgctggggccgcgcctgttgtccccgcccccaactgcctccgcgctcctccccggcatgggcggggcccccggctcccaacgcgcaggcgccgctgctatgctgagtgccgcgtctcgcgtagtctcccgcgccgccgtccactgcgcgcttcgctctccgccgcccgaggcccgcgcgctcgccatgtcccggccaccgccaccgcgggtcgcctcggtgctgggcaccatggagatggggcgccgcatggacgcgcccgccagcgccgcggccgtgcgcgcctttctggagcgcggccacaccgaactggacacggccttcatgtacagcgacggccagtccgagaccatcctgggcggcctggggctcgggctgggcggtggcgactgcagaggtaacagtagctgcagatcctccccatgcatcgtgtagagctgagcctgtccccagccgtgcaccaccccgctcgggcccggccgcgggcagcaccgacggattcgtccctcgctccccaccccaggtccaccccgcagctctgggaaccccgggacaactagacagtgctttgccctgactcctttcccccactctccttcccttgggagttgcagcgcgagagtctccccccagcctggtctgacccatcgcttcccacctccattgatgcccccgcctccaaacctgccaggtgcccacaaccggtccccacccaggctctcccccttttctctaccccttcgttaccatcatcacgcatgcacaccctgggcacccttttctcatcctggccttttcttaaccactagaatttgacctgtgcagctggcagtacctctgcctctctcagggagaactgtggcgatgccgtaaggctggctgggagagtaggagtgttagggagtgcggacgggtcagggtgtagggactttctatccactctatgccaggctttgacttggggccataggagggaaagtgattccagccctccacagggagttcagagtctaatgaggaagattgaagtaatgattgctggagagcccagaagagagagtactttagggagctgcaggccggggagaggcactagggaaggctcagcaaatgctggatggagctcagccttaaaggctcaatggtaggttggaggagaacaagagaaaggaacattagagtctgtgcaaagacttggtttggaaatgcaatgtgcgtgatgtgtgaaaggaaggccactgggcaggtggggcttgagtggaggatggaggggactgtccctcgtgagcctggtgcccttgatagcccttgggagggtgcctggcactcagtgagggcccagggaacgtgggctgttacccttaccatgcttcacccactggactatcctgaggctgttgctccccacccctgaggagaggttctctctgggtcctcctgagtcatagcgcttggggggtcggggggaaaagagggcaaatgtgaatctcaggcccacgctgtttctagttcacctggctgcatgttgttgtttttgttattattattatttgagacggaatcttgctctgtcacccagggtggagtgcaatggcacgatctcagctcactgcaacctctgcctcagcctcccaagtaactgggattacaggtgcacacggccacgcccagctaatttttgtatttttagtagagatggggtttcaccatattggccaggctggtcttcaactcctgacctcaagtgatctgcccacctcagcctcccaaagtgctgggattataggtgtaagccaccacgcccggccacgttacatactattaataatgaagattttgttcctgagttggtttttcttctctaacccttccccgcttccgtctttggggccaggagctcactgaaccaaagtcctcaggccaggcctgaggcacagttcatgccaagaatgcctggggcgttgtggggaaatggaga

SEQ ID NO: 1692 - DNA, 4001 bp, Homo sapiens
aaatgacaaactgagattttgtctccaaaacaaaacaaagaacaagaatgggtgggaaatactcaaaatgatctaatttttatttggttgctttgatgttctacaactgaaactcaatcacagacaaattagtatttcgttatttttccatccgtaactcgataactagagatttctgatggataaattgcacaacaggttaaaagttttcattcaggtgctctttattgctgatattccttggtaaccatccttgcagggataacagtctcatcactgtagaactttagcttctctttccgactctaggacacgggtccctgaagttctcactgatgtcacctcaacattttcctccaaccttgccccctgctgttatgttttttccctcacactgaacacttgcctgtgcttcctttaagttgcatgtggcctggacacagtcactcatgccagtaatcccagcactttaggaagctgaggcaggaggatcccataagcccagcagtttgagaccagctggagcaacacagcgaaaccctgtctcaaattgtctttaataaaaattttggaattattaaaaaatgaaataaataagaaaagagaaaaatagtttgcacccacatagtagattttagtgtccaagtgcctggaagagaactttggatttctctaccccactgggcacgccttccctagcagcaaagatggagctccagttcctcagacggtgatgagccacaggaagggcagggggtggggccaatgaagatcctcttgggctgcctgacttccctcagtgtacacatcagctcagcccgaagtggggtgaagatctcccaattgacacgaaccaaggaattcaaactctcctcaggggcaggatacgtctccaggcttaacttgctcagcccactggtgtggcgcagcaggtccttcagggcgtcaatagacatgcaatttctgccaaagtagaaggtggtgagctgggagcagcggctcaggccaggcaggatggcactgagttgggagtagtggatctgacagccctccaagatgagggttttgagagaggcagcaattttctccagcagagctccgaggggttcaagactgatgcggaacagcagcacgtagctgagattcagatgctttaggtaaccgaggcttgggtactgggagagacacttcatgtcttcttccaataggtagccataagttaattccaagttctccaaggggttctggaggcacctgtggagatcaagaagttagttctgggcagtgataccagttagatgaaggtagtgccttcatctaggaaaatgcctgcgtcaaacaaacacaagtttgttcccaccatctgatgatggtcctcatggaagttgctgcatgatgaggaccctgatcgttcaggggctgtcccattttagcctcagccctttcaccattgcttgtgtgattggttcaaggccataaaatctctaaagccttttttttttcatcttttagcagaaaacttcatctctgggccacaggtacccggtgggagatgtgaacaaagaactcaactgagcaaggtctagggacatcagctagagctacatgtcagcaggggctccctgacatgcctgcatctgcaaaccaactgtcactttttaccactctcacgcctactccctcacctccatcccggaagcacgcatttcccatgtcaattacctttcctggagttcaaaacaaccttttacaaacagggaatcagagacaggatcattcgtgatcactaagccggtgaggacagacgttctattgtgaaatggacaggtttgatgcgctttccctcctttcataccctcctctattatctctttgacatcatatcaacttgaaacacactttgtaacaggaaattcacacgtgcacccccaatagagctgaaacccccactaactagcttgtacatgatgtccctctctagcttctaccccaggtgacgcctctccccttattggagcgatcctgtgatagccactccaggacatggaacactgaatgggacaatgtgttgacattctgatgtccccttcactgtgacgttgccactggctggcacacagtacatgcattctaatgtttgctgttacagaacaaggctatgctgtggtctgcatacaaagtgcatgatcctttctcacctgatcagctgttccaggtgcccactgaagaaggtgatcaattttattttaagcaactgaaggtgttccagcctgaggaacacagagctgaatttggcaactaaccgtccttcgagttcattatctgacgtgtaatgatggcacctggagaaaacgagtttgcgaagattcttcatctccttcaggtaacaacgaagctttcttatcagacgtggccaggacatgttgcgaatttccagctcttgaatactattcaggtatattattttcaatgactttctgagatatttaatcggcgttagataattgaccagcttactacagcacaggtgtactaaacctctcctttggtaaacccactggaagaggtatctcaggcattcatcctggggtatttccttgaggcagatgtctatgaacacctttaagggctggtgctctcccatccttggacagtcctctgctgtctgcctcttactcgtggtctctgggaagcaggacagggcccaggctccaggccatctggcccagaaattctcgtcaacatcccgcaaatccagcacttgaagtttccacctcctgtgggtaaagtaagggagagactcagaatttagaaggactcatccctgacctttgctttcattgtcatcccataaatcagctgctcctgtcctcagtgctccctgttctctttgtcttttctcaatccctgttcccttttgattctgacttttgattccccacttctattccctttaccttccactgagtaaaggcaggtttctgttcccacagtggaccctgtatggtgagcagtcctttctctgaggatctggaaaatggccaaagcctccctgatcttcctcgccaacaccatcagaagactctgggccacacttgggctacttctctgcctgaccctgctgttctttccctggacacctgagccctatctaccagccctcctgggtcacctcacctggggcgatccttctgtgtaagcagcatatgaagcccttccagcaatgcttttaaggtctccaaatgaagcgtcttcatcagtgatcccagagggaggcaggtgaagggccaggcctgaaccatcaccgtcagagtctggaagtgtctcctgctgaaggcctccatgaagagtgggagatagagcaccctgggcagctcctccatggcagagatggacaaggcctggtctctcagcaggctctgccctgccagctccagtagtctgggtggggcctggatgctcatcctgatagatctgcaaggaaaatctctagaagacaaatccagggaaaatgtgtcactctcagggcaaagacaatcatctgcttctactggtaccaggaagaatgtcttccaaacaccaaggagggaggggtcatggagaccactgacttattaattttcttccattgctccactgaatcccagaaccaccggacagtgccactgaggatcctgaaagccaagctctacctctttgaagaaaaatttcttgtcacttaccaccctaaagcaatgagaatgagagtgtcctgtggccccagacagcctccattctcagtttacaccataaacatgctgggggaacactaaagggactccctaaaatcgatgccattattttttattttgaaaattttctaccagaaatggaccaggtgctgtggctcatgtctgtaatcccaacactgctggacaccaaggaggcagatcacttgaggtccgtaatttgagaacagcctggcctacataatgaaaccatgtctctactaaatataaaaa

SEQ ID NO: 1693 - DNA, 4001 bp, Homo sapiens
tgaaccatcaccgtcagagtctggaagtgtctcctgctgaaggcctccatgaagagtgggagatagagcaccctgggcagctcctccatggcagagatggacaaggcctggtctctcagcaggctctgccctgccagctccagtagtctgggtggggcctggatgctcatcctgatagatctgcaaggaaaatctctagaagacaaatccagggaaaatgtgtcactctcagggcaaagacaatcatctgcttctactggtaccaggaagaatgtcttccaaacaccaaggagggaggggtcatggagaccactgacttattaattttcttccattgctccactgaatcccagaaccaccggacagtgccactgaggatcctgaaagccaagctctacctctttgaagaaaaatttcttgtcacttaccaccctaaagcaatgagaatgagagtgtcctgtggccccagacagcctccattctcagtttacaccataaacatgctgggggaacactaaagggactccctaaaatcgatgccattattttttattttgaaaattttctaccagaaatggaccaggtgctgtggctcatgtctgtaatcccaacactgctggacaccaaggaggcagatcacttgaggtccgtaatttgagaacagcctggcctacataatgaaaccatgtctctactaaatataaaaaaattaagaatcatttgactccagaaggcagaagttgcaatgagccaagatcgcaccactgctctccagcctgggtgacagacttggactctgactcaaacaaaaacaaattgataaataagttaattaaaatgttagccaggtgtggtcatgcatgactgtaatcctagctactctggaggcagagaaaggagaatcacttgaagcccagaggcagagtttccagggagcccagctcagggccctgcactccagtctgggtgacacactcagagtacatcacagaaaaaaacaaaattcactggaactgtaaaagtggtgtgatggtattccacagcatttggaaggtatgtatagaaatgctaactgtagctgggcgcggtggctcactcatgtaatcccagcactttgggagtctgaggtgggcagatctcctgaggtcaggagtttgaggacagcatggccaacatggcaaaaccctgtgtctactaaaaatacaaaaattagctgggcatggtggtgagtgcctgtaatccaagctactcaggaggctgaagcaggagaatcgcatgtaactaggaggcagaaatttcagtgagccaaatcacaccatggcactgcagcctgggcaacaatagggaaactccatctgaaaaaaaaaattaaccagaaaccgtaaaagtgctaccatgctattctagagcactgtaactctaagatgaaggttcctatagacatcacttccacatactcacaattacccacttttggacagatcctaggggcaaagatgaatcccatgatctgagcaaaactgcactcttgagattgctgtgtgggatacctttaaggattttatgaaaatgaaagcatacttggagaatcacaataacaccaagtctatgaactgtaattgaagggcacaaaaacaaataacttcaaatgtcaagaaataaaaattcatgtcactgtaaatttttaatatatttttaaaaaacctgcttcgataagaattttaaaatgacaaaaaccaagcacaaatcacaatttgatggatgaagacaaaactacatttagaggaaaaatgaaagcctaaatctgttcatctcacgaaacagacagaaaaatattgtgtgccactttgggatgtgtgtcaccgtccctgactggctggctgctgatcagatgggcatgaccctaagcaggtggtgacttaccagcgctggactcacttcgcagagttctgggacctctcaggaaaccaaccagtagctccaggaatgagtgctgtgggtctcttctgggtaccctcaggagcttttatagacctttctaaccccacccttcccttctcaatcaccagcttccaatcagaaagtgatacctgattagatcttgcagtcacacccagttaatcctgattgagttttcagctttcttctgactaattgatcgaattagatacacatttatggaagtaaaagaataaataatagggtgaaagtccaaaactcattcattcatttattcctcaaatactgatgaagtttcgctaatacacgactttcatagtgatacagggaagggattaatctgttcctgatattagaccaaaaaaaaaaaaaccttaaggtgtccttattggaggatgtttggccacatcaaaattgtcaaaatgtttcagagctacaacagcctgaagaagatagtgatgtcattcccaagaaaacagaataaaaagctgtgtatatcgaatggtcacctgtgttttatgctatctaacatagcagatcatatgcacattcaggtagaagaaaggaaccactgagggtgtgatctatctcaagactaagtcaaggcttcactgaaggaaatcaggacaaagtgaccaagtgaggtggggactgagcggaatgagactaggtgttctaatgggaacctgcaaaggaaacaagacaatgtaaaacatggcggttatcttgtgggcatctagatgtcaggactcaaagtcctttgtcaagattgagtttatttattgattctttgattttcagactgggcctacatctgtcactcaggctggagtgcagtggcacgatttcagctcactgcagcctcaaccttctgggttcaagcaattctctcacttctgcctcccaagtagctgggaattacaggtgcactccaacaagccctactaatttttgtattttagtcgagatggggtttcaccatgttggcccggctggtctcaaactcctgacctcaagtgatctcctcacctcagcctcccaaaatgctgggataacatgcatcagccatctcacccaccctagattgagttcagaaattaaaaggagaatcatcaaaagagatagggcagacttaaaccataacattcactttgaaaacacagggggcaggtatagtcttggccctactagaaggtaaagggtgtttacccacaaaaatgatgggctcctctcagaaaaccagcttgcaaagatggaatctgagaatgtgagctggagcagaggccagagagaagattgtggctagacctgggaagggtggctgtcccaagctggaagccacccaggtagaaactgtgggctctacaggatgtgagagagaaatgaacgagggtccatatgtccgtcattgttctatcatttggaaacctttcctttagactctgggatcttcccacagtggaacatttcccagcaaccattggccccagtcattttccaggacccttcatccaaatcttaatctcacccactcccttcctactctaatttgataattcatgtttcctccttcttagagtcctttcctgtcgctaatattgaacatagagattcttatcagagcatcaacattaggcctacaaagaaagctcagacccaggcacagtggctcatgcctgtaacatcagcactttgagaggccaaggtgggctgatcatgaggtcagtatatcaagaccattctagctaacacggtgaaactccgtctctactaaaaatacaaaaaattagccgagcatagtggcagatgtctgcactcccagctactcagaaggctgaggcaggagaatcgcttaaacccaggatgcgaagttgcagtgagctgagatggcgccactgccttccatcctgggtgacggcatgacactgtcaaaaaggaacaaaagaaaaagcaagcaagcaagcaagcaagcaagcaagaaagaaagaaagaaagaaagaaagaaagaaagaaagaaagaaagaaagagggaaggaaggaag

SEQ ID NO: 1694 - DNA, 4001 bp, Homo sapiens
gccttggcctcccaaagtactgggattacaggcgtaatcctcttccgggactcattattgaaaatttcaccaagaagctttgaaagctgtgtgacagtgttatgcatcattcgcaagacacaggtgtttccaatacacacctcttacgcatgttcaaaatgaaccactttggctgtgcgcagtgactcacacctgtaatcccagcactttgggaggcagaggcattggattatctgaggtcaggagtttgagaccatcctggccaacatggtaaaacactacctctactaaaattacaaaaattagccaggtgcagtggtctgcgcctatagtccaagctactagggaggctgaagcaggaggatcgcttgaacccaggaggcataggttgcagttagctgagattataccactacaatccagcctgggaaattggctagattcaaaaaagagagagagagagagagaactacattggattagacttcttaagctccatccagttaatcatgattggatttttgtctttcttccagattaactatcaaattagatattcatccatgaaagtgaaatatttagggatatggtgaaagtccaggactcattcactgatttactccacaaacatggaattttagtaatatgtgacctttgtagttctgagtgtgagatagggaagagttgaatctcttcctgacattagacagaaagaaaaaaactcgaaagtatctttgttgagagatccttggccacatcaaatttatcaaaatatttcagagttaaaacagttttacaaagatagacatgacagtccctaagaaaacacagtagaaatcttcatgaatccaatgatcacctgggtggtataatttaatttttttcgtgtcggggtagctgagtctcacttcatcacccaggctggagtacagtggtgccatctcagctcactgtaacctctgcctcccaggttcaagtgatacttatgcttcagccttccatgtagctgggattacaggcatgcacctccacacccatgtctccgtttgggtggaagagttacaatgaggatgtgattggtttaaaattaaggtcaaagatcctctttggttaagattttttttctgtaatagggcctcgcaatgttgcccaggctggagtacagcagtggtatgagcatggctcactgcagcctcaatcttctgggctcaattgtttctcccatgtcagcaacccatacagttgggaagacagatgcatgctaccatgcccggctaattaaaaaatatgtatattttgtagaggccaagcaccagtggctcatggctgtaattccagcactttgggaggccaaggcaggtggatcacttgaggtcaggagtttgagaccaacttggccagcatggtgaaaccccacctctactaaaaatacaaaaattagccaggcaagttggcagttggatgtaataccagatactcaggaggctgaggcatgagaattgcttgagcctgggaggcagaagttgcaatgatttgagatcgtgccactgcactccagccttggaaacagagcgagactccatccccccttcaataaagaatattttatagagatgggtttttgccgtgttgtccaggttggtctcagacccctgggctgaaatgatcctcccgccttggtctcccaaagtgttggggttaaaggcatgagtcactgctcccttcaagaattttgaaatgacataaaccaaagcacaatccaattttttgaaataaagacaaaactgcatttagaggaaaaaatgcaaagcttcaaattgttcatatgagaaaaaaaacaaaacaggatataactctatgccatcttaggctgcactgtcaccatcccagaccagctgactgtaggtcagttgggagtgtccttacagagagattagtgacttaccagatctggactcagtttggagggtgctcagacctcaggaagaactaagcaggaactccaggcttgaagactttgggtctcttctgtgggtctttagaagcttttattgacctttctaatcacaactcccacccacacccctccacgtatccactgctagcttccaatcaacaagtgatatctgattgcatttctgaagctccacccagttaatcctgattggggttttggctctccccagattaatggattgaatcagatatccattcatatcagatatccatattaagttcatgaatcaagaaattgacagtgttagggatagggtgggaatcaagaatgcattcattcaagaccgggcaaggtggctcactcctgtaatcccagcactttgggaggacaagttgggtgggtcacctgagttcagacattcaagacgagccaggccaacaaggtgaaaccccgtctctacaaaaatacaagaattagacagggacgatggcacatgcctgtaatccagctactcaggaggctgaggtgggagaatcgcttgaacccaagaggcaatggttgcagtgaaccaagattgcaccattgcactccactctgggtgacagagggagaatttgtcggaaaaaaaaaattcattcattcatgaacttcacaaacactgatggaatttcactaatatgtgacctgcatagtcctgagtctgaagcagggaagggtctaatctttcccagatattagacagaaaactaaaatctgaaagtagtattgttgggagatctttggccacatcaaaatcacaaaaatgttttatagttaaaatagctttataaaaacagaggagtcgtccctacaaaatcaaaataaaaatctccatgtattgaatggtcttgtgggttttatatcacctaaggtagcaattttttcactcctgctggtggaagagaggtgccactgaggacctgagtggtctcagggcttaggttaaggctactctggaagaaattgcaaccatacttataaactttataaatttaatcagtgaagaagggagggggagaaacagacataaaccaagcttgcagtgcattcagcattcatcatgaggtcagcttgctctctgacctgcttcctcatggttgctggcagcctgctgtcccaaaatcatgtagaccttagattacagttgcccttaactgccctgcagacaacaatttaggccttgtaaaacattaactttttcatttgacatattctttcaggttctgcatgtcagtgaagctactgatggcaggtgatctgaagggccctgcaaggcaccaactcaccaaggaatgcagttttgacatcctgatgacttcatacctcttactgccaccaaactgcaccaactttccagcctcttgctatccatgatcctctgaaaactctcagtacttcttggggagatgaatttgagggtctcctcccagcttttcattttgccaccctgtgatcgttaaactctctgctgcaaaccctgctgtctcagaatattagtatgctactgtgctgcaggcataggaacctgatggtcctgtaaaaaaagtcatgtcaaaattacaaagggaagtgaaggtggaggctggtcagggttgagctgtgtgttttaatgggatccggggagtgaaccaagacttggtaaacatgttgggggttattgagggcgtggaggaggaatctttccaacattgcactgaggcccccttggtgttgatacttgtgaccaagaatgagtcttccaaaacagtgtatgtaattctcctgatttttcctttcaaaacctttgtcttcctttacctccctgaataatctcacatctattcccattgctttgctcatttcataataaaaatcctttttttttttaaaagaatctctttctctgtgaagtagaccatatattttattgccacacaagatgagtagcctggtattatggagagaaagggtcaaaaggatcccattccccaccagttgggggtgatataaaggtcctggttattat

SEQ ID NO: 1695 - DNA, 4001 bp, Homo sapiens
tcactctctttctgacagggtcttgctgtcacccagcctggagtgtagtggtgggatctcagctcagtgcagccttgacctcccagctcaaaggattcttcctcctcagcctctcaagtagctgggaccacagttatgcatcaccacacccagctcatcttttattttttgactttttgtaaagacagtggatttcgctatgttgtccaagctggtcttgaactcctagtctcaagcaatctacccctcttggcctcccaacatagtgggattataggtgtgagcctccgccccagcctcattattgaaaatttcagtgagatgcagtggtctccgcctgtagtccaagctaatagggaggctgaggtaggaggatcacttgaacccaggaggcagaagttgcagtgagctgacattataccactccactccagcctgggaaataggctagattgaacagagagacagagagagctacatttgattagaattcttaatctctacccagttaatcctgattggatttctgactttcttaaatattaactgatcgaattagatattcatccatcaaaatgaaagatttagggatagggtgaaagtccaggactcattcactgattcccttcacaaacatggagttttactaatatgtgtccttcaaagtcctgagtgtgagatagggaagggttgaacctcttcctgatattagacagaaagaaagaaaacttgaaagtatctttgttgagggatccttggccatgtcaaatttatcaaaatatttcagagttaaaacagttttcaaagacagagatgacagtccctaagaaaacacagtagaaatcttcatatatccaaagatcacctaggtggcgtaattctttttggtgttgagggagctgaatctcacttcatcggccaggctagagtgcagtggtgtcatatcggctcactgttacctcggcctccaagattcaagcaattctcatgcttcagccttccacgtagctgggactacaggcatgcaccccccacagccatgtctccatttgggtggaagaggatgtgattggtttaaaattaaggtcaaagatcctttttgattgattttgtttttgttttttggacagggtgtctctcttttgcccaggctggagtacaggagtggtatgagcatggctcactgcagcctcaatcttctgggctcaagtgattctcccacaccagccacccaaatagctgggactacagatgcatgtcaccatgctcggctaattaaaaaaaaaaaaagtagaggccaagcaccagtgactcacagctgtaatcccagcactttgggaggccaaggcaggtggatcacttgaggtcaggtgttcgacaccaacctggccagcatggtgaaaccccacctctactaaaaatacaaaaattagcgaggcatggtttcagatgtctgtgacaccagcttctgaggatggagactgaggcatgagaattgcttgaacccgggaggtaaaggttgcagtgagttgagatcatgccactgcactccagtctgggcaacacagtgagactccatccccaccctcaaaaaaaaaaaaaaacgttgtgtagaggagggcttttgtcatgttgcccaggttggtctcaaacccctgggctgaaatgatcctcccactttggcctcccaatgtgttggggttaaaggcatgagtcactgctcccttcaagaattttgaaatgacatcaaccaaagcacaatcaacttttttgaaataaagacagaactgcatttagaggaaaaaattcaaagcttcaaattgttcatatgagaaaaaaaaaggacaggatatagctctgtgccatcgtaggctgcactgtcaccatcccagactgactgactgtaggtcagatgggagtgtccttacagaaattagtgacttaccagatctggatgtagtctagaaggtgctcagacctcaggaagaaccaagcaggaactccaggcttgaagactttgggtctctcctgtgggtctttagaagattttattgacctttctaatcacaactcccacccatgcccttccacgtttgcactgctagcttccaatcaaaaagcaatatctgattgcatttgtgaagctccatccagttaatcctgattgggtttttggctctccccagattaatggattgagtcagatatccgttcatatcacatatctatattcagttcgtgaagcaagaaattgacagtgttagggatagggtagaagtcaagaatacattcattcaagggtgggtgaggtggctcatagctgtaattccagcacttgggaaggacaaggtgagtagatcacctgatgtcaggggttcaagacgagccaggtcaaaaaggtgaaaccctgtctctacaaaaatacaaaaatacaaaaattagctgggcatgatggcaggcacctgaaacccagctacttgggaggctgaggcaggagaattgcttgaacccaggaggcaatggttgcagtgagccagaattgtgccactgcactccagtctgggtgacagagggagattctgtcaaaaaataaaaaaatcattcattcatgaactccagaaacactgatggcattttactaatatgtgaacttcatagtcttgagtgtgaggcagggacggatttgatctgttacgacattagacagaaaaataaaatctgaaagtagtgttgttaggagatctttggccacatcaaaatataaaaatgctttctactttaaaaagctttataaaaacagaggagtcatccctacgaaatcagaataaaaatctcaatgtattgaatggtttttgggattttgtgtaacctaaggtagcagattacatgctcgttctggtggaggagaggtgccactgagggcgtgagtggtctcagggcttaggttaaggcttctttggaagaaattgaaaccacatctctaaagtttataaatttaatcagtgaagaagggagggagagaaacaaaaataaacgaagcttgcaacacattcagccttcatcaggaggtcttcttgctctctgaactggttcctcatggttgctggcagcctactgttccaaaatcatatagaccttagattacagttccccttaacttccctgcagacaacgattcaagcattgtaaaacattaattttttcatctgagatattctttcaggttctgcatgtcagtgaaactgctgatgccagctgatctgaagggccatgcaatgcaccaactcaccaaagaatgcagtttctacatcctgttgacttcttccctcttaccgctaccccaactttccggcctcttgctatccaggatccactggaaaccttcagtactccttggggagatgaatttgaggatctcctcctagcttctcattcagccaccttgtgatcattaaactctctgctgcaaaccctgctgtctcagaatattgctaagctactgtgcagcaggcataggaacctgatggtcctgtaataaagtcatgtcaaaattacaaatggaagtgagggtggagctggtcagggttgagctgggtttttaatgggaacctgggagtgaagcaagacttgctgaacatgttgggggttattgagtgggtgtaagaggaatctatctaacattgcactgatgcccttttggttttaatccttatgaccaagtatgagtctttcaaaacaatttgtataatcctccttatttttcctttcaaaaccttcaacttcctttatctccccaaataatctcgcatctattgccacttctttgcttacttcataataaacatttttttttacagagtcttcttctctgttaagtagaccatatattttgttgccacacaagatgagtaacatggttctatggacagaaagggtcgaaaggatcccattcctcaacagctgggggtgatgtaaaggtcatggttattctttgtcatatc

SEQ ID NO: 1696 - DNA, 4001 bp, Homo sapiens
ctcagtccttcaccatcactcgggtgactgggtcaagtccatgaactctaatgctccctttcctcatgtgtcaggtagaaaaccacatctctgggccacaggagcccgatggagacacaggcataaatgacaaacccaggcaagatcctgcaacctcagctggggtggccaggctgcaggagaccctgacatgcccgtatcatcagcaaaccatctatcactttcaccattcttcactcctgctccctcaccctctattccatcatgttttggagctcaaaacattttactgacagagggagacacaggattttacctgttcactaggcaggtgaggacagaccttatattttaaaatggaggggtgtgatggacattctcttctttagtgccctcttcaactccccatttcccatcgtcttaacttagacacacatcctcgggaggaattcacgaatgcaccctcactagatctaaaccctgcagtaccttcctagcatggcagcctctctatagcatctagcccaggagatcccgctggcttattgggatggatgtgtgacacctatttcaggacagagctgccaacaggacaatgcatggacattctagtgtccccttcgctgttacctcctcacaagctggctcacagtagataccccctggtgtttacagtaataaagaaagtctttgctgcggtctgcagagaaagctcaccatacttcctcacctgagcagctggtccaggtggccttcgaggaaagagacagagtgcatgtaaagcttctggaagtagtccagcttgaggaactgagaggtgaactggatgacaaactgctccttcctgtctaggggaatgcaggcagagacatggatgttgaagagaacaagtttgcggagattcctcatctggcccaggtaaggggcgaaccttataagaatggacagctcccacgggcagcacacttccacctcctggatacagtctagctccaccgtgttcaggacctctatgatcctgtggatggctattccaaaaatctgcagctccttgcaacacacgtgcagtaagccttttctctgcttgccccactctaagaagtgggtgaggcattcatccagcgtcccattcttgaagcaaaggtctaggatcaccatcaagggctgctgcccacccggccttggacagttccctgctgttcgtctcttactcagggcctctggggagagtgcagaagctccagaccatatgccccagaagttctcatccacattccgcaagtccaacacttgaagtttccaccgcctgtgggtaaaagagaagagaggctccaaatttaggaaggatttgagcttttatccacatcccggacatcagcgactctcctccctgctgcttctcccactctctgtcttttctccatccctctttctccttgaaacctgcctggtccccactgctagtgtcttcaattgccactggcaggaggcaggttcctgatccttcagtggaccctgcatggtgagcagtcctttcccagaggagctggacaatggccaaggcctctctgagcttcctccccagccccatcagaagtctctgggccacccttgggcctcccactccttctgacccagctaaccctaccctggatgcctgagccctccccacctggttagctgggtcacctcacctggggcgaaccttctgggcaagcagtgcatcaagcccctccagcacagctcgaaagatctctagattacatgacttcatcagggaccctagaggaaggcaggtgaagggccaggcctgcaccatagttgtcagggtctcgcagcatctcctggtaaaggcctccatgaacagtgggggaaagagctccctgggcagctcctccagggtggggatggccaaggcccggtctctcagcagactctgctcagccagctccaggagtctaggtggggcctggaggctcatcctgatgaatctagagaaaaaaacatcattcttacggcaaatcacatcacttcatcatctcctagtgccaatgtcattgctctggtagaggtggaaaggtaattagttcaccccaattccactctgcactttctggacacaaatctgtaattctgcccttgctggtaccataaagaatgtcttccaaacaatgaggagagggcaaggtaaccactggcccattcattttcaaccattgctgcactaaatctcagtaacactgggaagcgttgctgaggatcctgaaagctaagctccacctttttgagaaaatatttcttgtcacttaccaccctaaaacaatgggaacgagaatgtcctgtggccccacacagcctacattctcagttcccacaattgacatgcttgcagaagactaaagggactccttggaatcagcgccattattttttattttgaaaaattgtaacaagaaattgtaaaaacagcatgacagtgttctagagcctgtgaaagttagggataaaaacactaactctcagatgaaggttccaatgttgatctcttacacagactcacaatgacccactttgggatggaatctaggggaaaaaaatgggtcccatgttcagaacaaagactccactcttgagaatggcctatggaatatctttaaggtattagtaaaaactaaggcctaacatgtaaaatcacgatgccaccaagtctatgaactataatttaagggcacaaaaaccaattatttcaaatgtcacgaaataaaaattcaaccagttgtaactttttaatatctcttgttaaaaaaaaaactgcttcaataagaattttgaaatgacaaaaaccaagcacaaatccaattttgggggatgaagacaaaactacatttagaggaaaaatcaaagcctaaatttgttcttctgaaaacagacaagaaaattctctctgccaccttgggctgcatgtcaccatccctgactggctggctggctgcagatcagatgggcatgaccctaaggaggtggtgacttaccagatctggactcagtttgcagggtgctgcaacctctcagagaaccgagcagtagctccaggtgtcagcgccttggattctctcctgtgcaccttcgggagcttttatggacctttctaaccacaccctccccatctcaacaaccaacttccaatcagaaaatgatgtctgattagattctgaagttccacccagttaatcctgattgagtttgcgactttcttctgattaattgattggatcagatatacgtttatgaaagtgaaagatataaataatagggtgaaagtccacaactcattcattcctttattccacaaacactgatggagtttgactgacatgagagcttcatagtgatgcaggaaagggttgaatctgtttctggcatttgacagaaaaaacaaaacctgaaggtatctttgctgggggatctttggccacataaacattatcaaaatgtctcagagctaaaacagctctaagaagacagtaatttcatccctaagaaagcagaataaatatctctgcgtatccagtggtcagctgggatttacgctttctaacatggtagatcatatgcccattcaggtggcagaggggaaccactgagggtgtgattgatctcaagacgaaggttcaggcttctccggaggaaattaaaccaaaattacaaagtgaggtgggggctgggcaggatgggaccgggtgttctaatgggaccctgggaaggaaccaagacagcataaaacatggtgggtattttgtgggagaggagacggaaggattgaaagactccatttagattgaattcaaaaactgaaaaggaaataattacaaaagagacactgtagactcaaaacacaatattgcctttgagggcatgggacgagatacagtcttggtcacctctagaaggtaaagcgtgtttactcacaaaaatgatgggcacccctcagaaaaccagct

SEQ ID NO: 1697 - DNA, 4001 bp, Homo sapiens
gggccaggcctgcaccatcaccgtcagagtctggaagtgtctcctgcggaaggcctccatgaagagtgggagatagagcaccctgggcagctcctccatggcagagatggacaaggcctggtctctcagcaggctctgccctgccagctccaggagtctgggtggggcctggatgctcatcctgatagatctgcaagaaaaatctctagaagacaaatccagggaaaatgtatcactctcatggcaaacacaatcatctgcttctactggtaccaggaagaatgtcttccaaacaccaaggagggaggggtcaaggagaccactggcttattaattttcatccttcattccactgaatcccagaaccaccggacactgccactgaggatcctgaaagccaagctctacctctttgaggaaaaatttcttgtcacttaccaccctaaagcaatgagaatgagagtgtcctgtggccccagacagcctccattctcagttcacaccataaacgtgctgggggaacactaaagggactccctaaaatcgatgccattattttttattttgaaaattttctaccagaaatggaccaggtgctgtggctcatgtctgtaatcccaacactgctggacaccaaggcaggcagatcacttgaggtcaggagttcgagaacagcctggcctacataatgaaacgatgtctctactaaatacaaaaaaattaagaatcatttgactccagaaggcagaggttgcagtgagccaagatctcaccactgctctccagcctgggtgacagagttggactccgactcaaacaaaaacaaactgataaattaattaattaaaatgttagccaggtgtggtcatgcatgactgtaatcctagctactctggaggcagaggaaggagaatcacttgaagcccagaggcagagtttccagggagcccagctcagggccctgcactccagtctgggtgacacactcagagtacatcgcagaaaaaaaacaaaataattcactggaactgtaaaagtggtgtgatggtattccacagcatttggaaggtatgtatagaaatgctaactgtagctgggcgcggtggctcactcctgtaatcccagcactttgggagtctgaggtgggcagatctcctgaggtcaggagtttgaggccagcatggccaacatggcaaaaccctgtgtctactaaaaatacaaaaattagctgggcatggtggtgagtgcctgtaatccaagctactcaggaggctgaagcaggagaatcgcatgtaactaggaggcagaaatttcagtgagccaaatcacaccatggcactgcagcctgggcaacaatagggaaactccatctcaaaaactgtaaaagtgctaccatgctattctagagcactgtaactctgagatgaaggttcctatagacatcacttccacatactcacaattacccactttttgatggatcctaggggcaaagataaatcccatgatctgagcaaaactgcactcttgagattggtgtgtgggatacctttaaggattttatgaaaatgaaagcatacttggagaatcacaataacaccaagtctatgaactgtaattgaagggcacaaaaacagataacttcaaatgtcaagaaataaaaattcatgtcactgtaaatttttaatatatttttaaaaaacctgcttcgataagaattttaaaatgacaaaaactaagcacaaatcacaatttgatggatgaagacaaaactacatttagaggaaaaatgaaagcctaaatctgttcatctcacgaaacagacagaaaaatattgtgtgccactttgggatgtgtgtcaccgtccctgactggctggctgctgatcagatgggcatgaccctaagaaggtggtgacttaccagcgctggactcactttgcagagttctgggacctctcagggaaccaagcagtagctccaggaatgagtgctgtgggtctcttctgggtaccctcaggagcttttatggacctttctaaccccacccttcccttctcaatcaccagcttccaatcagaaactgatacctgattagatcttgcagtcacacccagttaatcctgattgagttttcagctttcttctgactaattgatcgaattagatacacatttacggaagtaaaagaataaataatagggtgaaagtccaaaactcattcgttcatttattcccgaaatactgatgaagtttggctaatacacgactttcgtagtgatgtagggaagggattaatctgttcctgatattaggccaaaaaaaaaaaaaccttaaggtgtccttattggaggatgtttggccacatcaaaattgtcaaaatgtttcagagctacaacagcctgaagaagatagtgatgtcattcccaagaaaacagaataaaaagctgtgtatatcgaatggtcacctgtgttttatgctatctaacatagcagatcatatgcacattcaggtagaagaaaggaaccactgagagtgtgatctatctcaagactaagtcaaggcttcaccgaaggaaatcaggacaaagtgaccaagtgaggtggggactgagcggaatgagactaggtgttctaatgggaacctgcaaaggaaacaagacaatgtaaaacatggcggttatcttgtgggcatctagatgtcaggactcaaagtcttttgtcaagattgagtttatttattgattgtttgtttgattttcagactgggcctacatctgtcactcaggctggagtgcagtggcacgatttcagctcactgcagcctcaaccttctggttcaagtgattctctcacttctgcctcccaagtagctgggaattacgggtgcactccaacaagccctactaatttttgtattttagtcgagatggggtttcaccatgttggccgtcaccatgttggcccggctggtctcaaactcctgacctcaagtgatctcctcaccttggcctcccaaaaggctgggataacaggcatcagccatctcacccaccctagattgagttcagaaattaaaaggagaatcatcaaaagagatagggcagacttaaaccataacattcactttgaaaacacagggggcaggtatagtcttggccctactagaaggtaaagggtgtttactcacaaaactgatgggctcctctcagaaaaccagcttgcaaagatggaatctaagaatgtgagctggagcagaggccagagagaagattggggccagacctgggaagggaggctctcccaagctggaagccacccaggtagaaactgtgggctctacaggatgtgagagagaaatgaacgagggtccatatgtccgtcattgttctatcatctggaaacctttcctttagactctgggatcttcccacagtggaacatttcccagcaaccattggccccagtcattttccaggacccttcatccaaatcttaatctcacccactcccttcctactctaatttgataattcatgtttcctccttcttagagtcctttcctgtcactaatattgaacatagagattcttatcagagcatcaacattaggcctacaaagaaagctcagacccaggcacagtggctcatgcctgtaacatcagcactttgagaggccaaggtgggctgatcatgaggtcagtatatcaagaccattctagctaacacggtgaaactccgtctctactaaaaatacaaaaaattagccgagcatagtggcagatgtctgcactcccagctactcagaaggctgaggcaggagaatcgcttaaacccaggatgtgaagttgcagtgagctgagatggcgccactgccctccatcctgggtgacagcatgacactgtcaaaaaagaacaaaagaaaaagcaagcaagcatgcaagaaagaaagaaagaaagaaagaaagaaagaaagaaagaaagaaagaaagaaagaaagaa

SEQ ID NO: 1698 - DNA, 4001 bp, Homo sapiens
tgtccaagctggtcttgaactcctagtctcaagcaatctacccctcttggcctcccaacatactgggattataggtgtgagcctccaccccagcctcattattgaaaatttcagtgagaagctttgaaagctatgtgacactgttatgcatcattcgcaagatagatgtttccaatgcactcctgttacacatgttcaaactgaaccattttggctgggtgcagtgactcacacctgtaatctgagcattttgtgaggccgaggcaggtggatcatctgagatcaggaattcaagacgagcctggccaacatggtaaaaccctgcctctactaagacagcaaaaattagccaggtgcagtggtctgcgcctgtagtccaagctactagggaggctgaggtaggaggatcacttgaacccaggaggcagaagttgcagtgagctgacattataccactccactccagcctggggaataggctagattgaactgagagacagagagagctacatttgactagacttcttaatctctacccagttaatccttattggatttttggctttcttaaagaataactgatcgaattagatattaatccatcaaaatgaaagatttcgggatagggtgaaagtccaggactcattcactgattcccttcacaaacatggagttttactaatatgtgtccttcaaagtcctgagtgtgagacagggaagggttgaatctcttcctgatattagacagaaagaaagaaaacttgaaattatccttgttgagggatccttggccacatcaaatttatcaaaatatttcagagttaaaacagttttcaaagacagagatgacagtccctaagaaaacacaatagaaatcttcatgtaacccatgatcacctgggtcatataattttttttggtgctgagggagctgagtctcacatcgtcgcccaagctggaatgcagtggcaccatcttggctcactgttacctcggcctccaagattcaagcaattctcatgcttcagccttccacatagctgggactacaggcatgcaccccccacagccatgtctccatttgggtggaagaggatgtgattggtttaaaattacggtcaaagatcctttttgattgattttgtttttgtttttggacagagtgtctctcttttgcccaggctggagtacagcagtggtatgagcatggctcactgcagcctcaatcttctgtgctcaagtgattctcccacaccagccacccaaatagctgggactacagatgcatggtgactcacagctgtaatcccagcactttgggaggccaaggcaggtggatcacttgaggtcaggtgttcgagaccaacctggccagcgtggtgaaaccccacctctactaaaaatacaaaacttagccaggcatggtttcagatgtctgtgacaccagcttctgaggatggagactgaggcatgagaattgcttgaacccgggaagtaaaggttgcagggagttgagatcgtgccactgcactccagtctgggcaacacagtgagactccatccccacccccaaaaaaaacgttgtgcagaggagggtttttgtcatgttgtccaggttggtctcaaatccctgggctgaaatgatcctcccactttggcctcccaaagtgttggggttaaaggcatgagtcactgctcccttcaagaattttaaaatggcatcaaccaaagcacaatcaacttttttgaaataaagacagaactgcatttagaggaaaaaattcaaagcttccaattgttcatataaaaaaaaaaaaaaaggacaggatatagctctgtgccatcgtaggctgcactgtcaccatcccagaccgactgactgtaggtcagatgggagtgtccttacagaaattagtgacttaccagatctggatgtagtctagaaggtgctcagacctcaggaagaaccaagcaggaactccaggcttgaagactttgggtctctcctgtgggtctttagaagcttttattgacctttctaatcacaactcccacccacgcccctccacgtatgcactgctagcttccaatcaaaaagcaatatctgattgcatttgtgaagctccacccagttaatcctgattgggtttttggctctccccagattaatggattgagtcagatatccattcatatcacatatctgtattcagttcgtgaagcaagaaattgacagtgttagggatagggtagaagtcaagaatacattcattcaagggtgggcgaggtggctcatacctgtaattccagcactttggaaggagaaggtgagtagatcacctgatgtcagtggttcaagaccagtcaggtcaaaaaggtgaaaccccgtctctacaaaaatacaaaaattagctgggcatgatggcaggcacctgaaacccagctacttgggaggctgaggcaggagaattgcttgaacccaggaggcaatggttgcagtgagccagaattgtgccactccactccagtctgggtgacagagggagattctgtcaaaaaataaaaaaatcattcattcatgaactccacaaacactgatggtattttattaatatgtgaacttcatagtcttgagtgtgaggcagggaaggatttgatctgttcccgacattagacagaaaaataaaatctgaaagtagtgttgttaggggatctttggccacatcaaaatataaaaatgctttctactttaaaaagctttataaaaacagaggagtcatcactacgatatcagaataaaaatctcaatgtattcaatggtctttgggattttatataacctaaggtagcagattacatgctcgttctggtggaggagaggtgctactgagggcgtgagtggtctcagtgcttaggttaaggcttctttggaagaaattgaaaccacatcgataaactttataaatttaatcagtgaagaagggagggagagaaacaaaaataaaccaagcttgcaacacattcagcattcatcaggaggtcttcttgctctctgacctggttcctcatggttgctggcagcctactgttccaaaatcatatagaccttagattacagttccccttaacttccctgcagacaacgatttaagcattgtaaaacattaactttttcatctgagatattctttcaggttctgcatgtcagtgaaactgctgatgccagctgatctgaagggccctgcaatgcaccaactcaccaaagaatgcagtttctacatcctgttgacttcttccctcttaccgctaccccaactttccggccccttgctatccaggatccactggaaaccttcagtactccttggggagatgaatttgaggatctcctcctagcttctcattcagccaccttgtgatcattaaactctctgctgcaaaccctgctgtctcagaatattgctaagctactgtgcagcaggcataggaacctgatggtcctgtaataaagtcatgtcaaaattacaaatggaagtgagggtggagctggtcagggttgagctgggtttttaatgggaacctgggagtgaaccaagacttgctgaacatgttgggggttattgagtgggtgtaagaggaatctatctaacattgcactgatgcccttttggttttaatccttatgaccaagtatgagtctttcaaaacaatttgtataatcctccttatttttcctttcaaacccttcaacttcctttatctccccaaataatctcgcatctattgccacttctttgcttacttcataataaacttttttttttacagagtcttcttctctgttaagtagaccatatatgttgttgccacacaagatgagtaacctggttctatggacagaaagggtcaaaaggatcccattcctcaacagctgggagtgatgtaaaggtcatggttattctttgtcatatctgcacctgcatattgccagtgaaaacttg

SEQ ID NO: 1699 - DNA, 4001 bp, Homo sapiens
ttactttatctttcaggagacaacctcagctctgggccagaggagcccagtgggagaagtgcacaaagaactcaactgagcaaggtctagggacatctgctaggaccacctgcctgcaaagattccctgacatgcccgtgtctgcaaaccacctatcactttataccactctcctgcctactccctcacctctgtccaagaagcatgcttttctcatgtcaactacttttcctggggttcaaaagaaccttttacagacagggaattagagacaggttcattggtgtttactaagctgtgaggacggagcttctgctgtgaaacacgcaggtttgatgcactttcccttctttcatactctcctctatatgaagaataagtttcatcatattaacttcaaacacacttcctaaaaaggaattcacaaatgcaccctccctagatctgaacccctgactaactagctccctgcatgtctctctctgtagcatctgccccgggccatccctccgcccttatttgagcgggcttgtgatacccacttcaggatatagagcactgaacagcataatgagttgacattctagcgtcccattccctgtgacatcaccagtggctggcacacagtagatgcccactagcgtttactgtgaaaaagaacaaaagtctgtggtatggtctgcagagaaagctcaccatcctttcttacctgagcaggtgctccaggtgctctttgatattactgatctttcttatataaagcatctgagggtagtacaggcagaggaatggacagtccaagtcaggaacgaactgctgttggccgcttacatataactcatcgtcataaccgaaggctaaaaagagtttgcgaagattgctcatctggctcaagtaaggggcaaactttcctgttttattcagagagcactttctcttaatttccaactcctggatactgtctgggtatacccttttcaataaatttctgaaacttgaagtgggcattgagtaattctgcaccttattacaacacaggtgcactagacctcttctgtagtggatccacctgcagaggtagctcaggcattcatccagtgtactttccttttggcagaggtctatgaacaccttcaagggctggtgctctcccgtccttggatagtcctccactgtctgcctcttactcatggcctctggggagcaggagagggccctggctccagaccatatagtccagaaattcccatcaacatcccgcaaatccagcacttgaagtttccacctcctgtgagtaacataggggaaaagctcagaatgtaggcaaagacccacccctgacctgagctttcactcaacatccaggacatcagtcagctgctcctgtcctcagtgctcctccttctgtctcttctccatcccgctcccccttggattctgcctggttctcacttctagaacctttaccttccactgggaggaagcaggttcctgtttcctcagtggaccctgtatggtgagcagtccttttccagaggatctgggcaatggtcaaggtctctcatgggcaccatcagaagcctctgagccaccctagctccccaaccccaccactcctcctgagccagctgtcccttccctggatgcctggacccttcccaccaggccacctgagtcacctcacctggggcgaagcttctgggccagcagtgtatcaagtcccttcagcacagcttgcaaggtctccagatgaggtgtcttcatcagggatcccagagggaggcggaggaagggccaggcctgcaccatcagcttcagggcctcaaaatgtctcatgctggaggcctccatgaacatcagagggaagacctccctgggcagctcgtccaggatgaagatggtcaagaactggttcctcagcaggctctggcctgccagctccaggagtctggatggggactggaggctcattctgacaaatctccagtgaaaaactctagaggacaatccagtgaaaaggcaagtttctcaggccaatcccctgcaacccccacttctcctagggccaaagtcagttctctagcatgtgtgaaagggccctcagtttactccaattccattctgcaataagtggccacagaggcatagttctgcccttctggtaccaagaagagtgtgtcccaacctctaaagagcaggcaagatccctcctatagggtccatgaattattagccactgcaccactacactgatagcactgggaagtgttaccaaggatctttgaagctcagatctccacttttttgagaaaacaaaatgtcttcttggccaagcacggtggctcatgcctgtaatcccagcactttgggagcccgaggtaggcggatcatgaggtcgggagttcgagaccagcccggccgacacggtgaaataccgtctctgctaatacaaaatattagccaggtatggttgtccatgcctgtaatcccagctacttgggaagctgaggcaggagaatctcttaacccaagggccagagtttgcagtgagccaaaatctagccactacactccagcctgggtggcagagtaagactctgtctcaaaaaaaaaaaaaaaaaaattgtaaagcgaagccaagcatggcggcttacagccgtaatcccaacactttgggaagccaaggcagaacaatcacttgagcccaggagttccagaccagccagggcaacatagtgatagcccatgtctactagactctactagaatgttaagtaattatctgagcattgtggcacatgcctatagtctcagctactctgcagacagaggtgggaggatggcttgagcctgggaagcagaggtttcagttatctgagattttgccaccacactccagcctgggcaacagagaaagaccctgtctcaaataataataacaataataacacactttgggattgagtctaggggaagaaatggatcctacattcaaaacaaagactctactcttgaaaatagtgtatggggccagacatggtggctcatgcctgtaatcccaagactttaggagacaaggtggggggtttgcttgagtccaggtgttccagaccagcctggctaacaaagccagaacccaacatcataaaaaaatttaatagagcatggtagaaggaatatctttataattttagtaaaaaacaaaacctatctttcaaaatcacaatagcattcttgggtggggtgactcttgcctgtaatcccagcactttgggaggctaagggctggcagattacatggagtccaggggttccagaccagcctgggcaatatggtacaaccccatctctactaaaaatacaattagccaggcctcatggtgtgggtctgtagtcccagctactgggaaggctgaggtgagaagatcccttgaatacaggagacagaggttgcactgaggcaattatcacaccactgcagtacagctgggtgacagagtgagactttgtctcaagaaattaaaatcacaataacgtagtctataaactgtaaattaagggcacacaatctacaaactttaaatgtcaaggaatgagacattaattaattggaatttttttttttttaattgagacggagtctattgcccaggctggagtgcaatggcgtgatctcagctcactgcaacctccacctcccgggctgaagcaattcacctgcctcagcctcctgagtagcttggattacaggcatgtgccaccatgcccagttaatttttgtatttttagtagagaaggcttttcactgtgttggtcagcctggtctcaaattcctgacctcaggtgatgcacccaccttggtctcccaaagtgctgggattacaggcatgagccactgtctctggcccagttggattctttcttaattctttggttaagaattttggaatgacataaaacaagcacaaataaatttttttttcctttttaaggcaaagtct

SEQ ID NO: 1700 - DNA, 4001 bp, Homo sapiens
ctctttactttatctttcaggagacaacctcagctctgggccagaggagcccagtgggagaagtgcacaaagaactcaactgagcaaggtctagggacatctgctaggaccacctgcctgcaaagattccctgacatgcccgtgtctgcaaaccacctatcactttataccactctcctgcctactccctcacctctgtccaagaagcatgcttttctcatgtcaactacttttcctggggttcaaaagaaccttttacagacagggaattagagacaggttcattggtgtttactaagctgtgaggacggagcttctgctgtgaaacacgcaggtttgatgcactttcccttctttcatactctcctctatatgaagaataagtttcatcatattaacttcaaacacacttcctaaaaaggaattcacaaatgcaccctccctagatctgaacccctgactaactagctccctgcatgtctctctctgtagcatctgccccgggccatccctccgcccttatttgagcgggcttgtgatacccacttcaggatatagagcactgaacagcataatgagttgacattctagcgtcccattccctgtgacatcaccagtggctggcacacagtagatgcccactagcgtttactgtgaaaaagaacaaaagtctgtggtatggtctgcagagaaagctcaccatcctttcttacctgagcaggtgctccaggtgctctttgatattactgatctttcttatataaagcatctgagggtagtacaggcagaggaatggacagtccaagtcaggaacgaactgctgttggccgcttacatataactcatcgtcataaccgaaggctaaaaagagtttgcgaagattgctcatctggctcaagtaaggggcaaactttcctgttttattcagagagcactttctcttaatttccaactcctggatactgtctgggtatacccttttcaataaatttctgaaacttgaagtgggcattgagtaattctgcaccttattacaacacaggtgcactagacctcttctgtagtggatccacctgcagaggtagctcaggcattcatccagtgtactttccttttggcagaggtctatgaacaccttcaagggctggtgctctcccgtccttggatagtcctccactgtctgcctcttactcatggcctctggggagcaggagagggccctggctccagaccatatagtccagaaattcccatcaacatcccgcaaatccagcacttgaagtttccacctcctgtgagtaacataggggaaaagctcagaatgtaggcaaagacccacccctgacctgagctttcactcaacatccaggacatcagtcagctgctcctgtcctcagtgctcctccttctgtctcttctccatcccgctcccccttggattctgcctggttctcacttctagaacctttaccttccactgggaggaagcaggttcctgtttcctcagtggaccctgtatggtgagcagtccttttccagaggatctgggcaatggtcaaggtctctcatgggcaccatcagaagcctctgagccaccctagctccccaaccccaccactcctcctgagccagctgtcccttccctggatgcctggacccttcccaccaggccacctgagtcacctcacctggggcgaagcttctgggccagcagtgtatcaagtcccttcagcacagcttgcaaggtctccagatgaggtgtcttcatcagggatcccagagggaggcggaggaagggccaggcctgcaccatcagcttcagggcctcaaaatgtctcatgctggaggcctccatgaacatcagagggaagacctccctgggcagctcgtccaggatgaagatggtcaagaactggttcctcagcaggctctggcctgccagctccaggagtctggatggggactggaggctcattctgacaaatctccagtgaaaaactctagaggacaatccagtgaaaaggcaagtttctcaggccaatcccctgcaacccccacttctcctagggccaaagtcagttctctagcatgtgtgaaagggccctcagtttactccaattccattctgcaataagtggccacagaggcatagttctgcccttctggtaccaagaagagtgtgtcccaacctctaaagagcaggcaagatccctcctatagggtccatgaattattagccactgcaccactacactgatagcactgggaagtgttaccaaggatctttgaagctcagatctccacttttttgagaaaacaaaatgtcttcttggccaagcacggtggctcatgcctgtaatcccagcactttgggagcccgaggtaggcggatcatgaggtcgggagttcgagaccagcccggccgacacggtgaaataccgtctctgctaatacaaaatattagccaggtatggttgtccatgcctgtaatcccagctacttgggaagctgaggcaggagaatctcttaacccaagggccagagtttgcagtgagccaaaatctagccactacactccagcctgggtggcagagtaagactctgtctcaaaaaaaaaaaaaaaaaaattgtaaagcgaagccaagcatggcggcttacagccgtaatcccaacactttgggaagccaaggcagaacaatcacttgagcccaggagttccagaccagccagggcaacatagtgatagcccatgtctactagactctactagaatgttaagtaattatctgagcattgtggcacatgcctatagtctcagctactctgcagacagaggtgggaggatggcttgagcctgggaagcagaggtttcagttatctgagattttgccaccacactccagcctgggcaacagagaaagaccctgtctcaaataataataacaataataacacactttgggattgagtctaggggaagaaatggatcctacattcaaaacaaagactctactcttgaaaatagtgtatggggccagacatggtggctcatgcctgtaatcccaagactttaggagacaaggtggggggtttgcttgagtccaggtgttccagaccagcctggctaacaaagccagaacccaacatcataaaaaaatttaatagagcatggtagaaggaatatctttataattttagtaaaaaacaaaacctatctttcaaaatcacaatagcattcttgggtggggtgactcttgcctgtaatcccagcactttgggaggctaagggctggcagattacatggagtccaggggttccagaccagcctgggcaatatggtacaaccccatctctactaaaaatacaattagccaggcctcatggtgtgggtctgtagtcccagctactgggaaggctgaggtgagaagatcccttgaatacaggagacagaggttgcactgaggcaattatcacaccactgcagtacagctgggtgacagagtgagactttgtctcaagaaattaaaatcacaataacgtagtctataaactgtaaattaagggcacacaatctacaaactttaaatgtcaaggaatgagacattaattaattggaatttttttttttttaattgagacggagtctattgcccaggctggagtgcaatggcgtgatctcagctcactgcaacctccacctcccgggctgaagcaattcacctgcctcagcctcctgagtagcttggattacaggcatgtgccaccatgcccagttaatttttgtatttttagtagagaaggcttttcactgtgttggtcagcctggtctcaaattcctgacctcaggtgatgcacccaccttggtctcccaaagtgctgggattacaggcatgagccactgtctctggcccagttggattctttcttaattctttggttaagaattttggaatgacataaaacaagcacaaataaatttttttttcctttttaaggcaaa

SEQ ID NO: 1701 - DNA, 4001 bp, Homo sapiens
ccaaagaactgacctgagcaaggtctagggacatcagctagggctacctgctttcagaggctccctgacatggccacatctgcaaaccacctgtcactttgtaccactctcgtgcctactccctcacctccatccccagaagcacgcatttcccatgtcaattacctttcctggagttcaaaacaaccttttacagacagggaatcagagagaggatcattcacgttcactaagctgtgaggacagagcttcctctgtgaaacgcacaggtttggtgcactttctcttcttttacaccctcccctctgttgcctcttttttatcatattaactttaaacacacttcctaacaaggaattcacaaaagctattcatacttatcatattaactttaaacacacttcctaacaaggaattcctaaaaggaattcaccctcactggagctgaaccccccactaaccagctccctacacgatgtccctctctgtagcgtctatgccaggtcatccctctgcccttactggagcgatcctgtgatacccacttcaggatatagagcaccaaacaggacaatgcattctagtatccccttccctggacatctccagtggctggcacacagtagatgctgactagtgtttactgtaacaaaaaaaggctgtgctgtgtcccccagagaaagctcaccatctttcctcacctgatcagctggtccaggtagccttcgaagaagcggatccttctcatataaagcatctggaggtactccagcctgaggaacacagagctgaattcagcaactaactgtccttggctctcaaagcttggcaggtaaccacagccatcggagatgaagagttttcgaagattcttcatctggctcaggtaacggctaacctctgctaccatacacggccagcacatgttccaaatttccaatacttggatactgtctgggtatactgtttctaatatgtttctgaaatttagaatgttcattgaataatttaccaccttagtacagcacaggtgtactgaacgtcttctgtgctgcacccacccagagaagaagctcagatcttcatccacggatttttccttgaggcaaacatccatgaacaccttcaagggctgcttctctcctgtccttggacagtcctccactgtctgtctcttactcatggcctctggggagcaggacaggggcctggctccagaccatatggtccaaaaattctcatcaacatcccgcatttccagcacttgaagtttccacctcctgtgagtaacataggggaaaagctcagaacgtagacaaggacccacccctgacctgggctttcactccacatcaaggacttcagctgcttttttcctcagcgcccctccttctgtctcttctccatccctttcccccttggattctgcctggtacccacttctagtgcctttaccttccactgggagcaggcaggttcctgtttcctcagtggaccctgtatggtgagcagtcctttcccagaggagctgggcaatagccaagaacgttcccagctttctcactggcaccatcagaagcccctgggccaccccaggttcccaatttgtctgacccagctgcttagtccctggacacctgggccctccccacctgggtcacctcacctggggcgaaccttttgggcaagcaggcaatcaatcccatccactacataatgtaagatctccagatcaggcgtcttcatcagggaccccagagggaggcaggggaagggccaggcctgcaccatcaccttcagaacctcgcagcatctgctagtgaaggcctccacgaacagtcgggggaagagctccctgggcagctcatccaggacggagatggccaaggcctggtccctcagcaggctctgccctgccagctccaggagtctgcgtggggcctggaagctcatcctgataaatctgcaagaaaaatccagagaaaagacaaacttatcaggccagtcctctcacaccctgacttctcctcggccaaaagtcactactctgtcaggtgtgaaagagtccttagtttaccccaattcgactctgcaataattggccacagagacatagttctgcccttctggtaccaagaagagtgtctcccaacctccaaggagcgggcaagatcactcctactccatgaattttcatccattgctccaccctggccaggcgcggtggctcacgcctgtaatcccagcactttgggaggccgaggcgggcggatcacgaggtcaggagatcgagaccatcctggctaacatggtgaaaccccgtctctactaaaaatacaaaaaattagccaggcgaggtggcgggcacctgtagtcccaacaactctggaggctgaggcaggagaatggcatgaaccccagggagcagagcctgcagtgagccgagattgcgccactgcactccagcctgggcgacagtgagactctgtctcaaaaaaaaaaaaaaattgctccacccaactctattagctctgggaagtgttaccaaggatcttcaaagctcagctcctttcttgagaaaaaatgccttctcaatttaaggatctaaaacaatggtcatgtggctgggcttggtggctcacaactgtagtcccagcactttggaggccaaggcgggcggctcacttgaggtcaggagttagagaccagcctggccgacaaggtgaaacccagtctttactaaaaatacaaaaagtagccaggcatggtggcgggtgcctgtaactccagctactcaggaggctgaggcacaagaattgcttgatcccaggaggtggagtttgcagtgagctgagatagtgccactgcactccagcctgggcaatagagcgagactcagtctcaaaaagaaaaacaaaacaaaacaacaagacaatggtaatgggagtctcctgtggccccaaacaacctgcaatctcagttcccacaatgaacctggctgggagagactaaagggatatttctaattagacaccattatgttcactttcaaaagagtaatgaggggccacacatggaggctcacagctgtaattccaacactttggcaagccaaggcagaacaatcacttaagccatagagttgccgaccagcctgggctacgtagtgagaccctgtctctccaaaaaaattcaaaaaatagatggatgtgatggcgcacacctgtagtcccagctgctctgcaggctgaggtggaaggatggcttgtgtctgggaagcagaagttacagtgatctgagactgtgccactgtacccccagcctgggcagaagagcaagactctgtcttaataaaataaataaataaataaaatattacccactttggaatggagtctagagaaacaaatggatcccacattcagaacaaagactccattcttgaaaatggtgtgtgagaccagtcatgttggctcatgcctgtaatcccaagactttggaaggcgaagtgggaggtttgcttgaatctaggtgtcccagaccagcctaggtaacaaaccaagaccccatcactataaaaaaacatagtaataggcccggcacggtggctcacacctgtaatctcagcactttgcgagactgaggtgggaagatcacccgagtttgggagtttaagaccagcctggccaacatagtaaaaccccatctctattaaaaatacaaaaattaggccgggagcagtggctcacgcctgtaatcccagcactttgggaggccgaggcgggtggatcacgaggtcaggagatccagaccatcctggctaacacggtgaaaccccgtctccgctaaaaaaacaaaaaattctctgggcgtggtggcgggcccctgtagtcccagctacttgggaggctgaggcaggagaatggcgtgagcccgggaggcggagcttgcagtgagccgagatcacgccactgcactccagcctgggcaacagagcgaga

SEQ ID NO: 1702 - DNA, 4001 bp, Homo sapiens
gagatggacaaggcctggtctctcagcaggctctgccccgccagctccagtagtctcggtggggcctggatgctcatcctgatggatctgcaagaaaaatctctagaagacaaatccagggagaatgtatcactctcagggcaaacacaatcacctcatcttctcctaggaccaatatcattgctctggtagaggtagaaaaattaccactttaccccaattccactgtgcttgttggcctcaaatctatacttctgcttctgctggtaccaggaagaatatcttccaaacaccaaggagggaggggtcaaagagaccattgacccattaattttcatccttcgctccactgaatcccagaaccactggacagtgccactgaggatcctgaaagccaagctctacctctttgaggaaaaatttcttgtcacttaccaccctaaagcattgagaatgagagtgtcccgtgggcccagacagcctccattctcagttcacaccatgaacatgctgggggaacactaaagggactccctaaaatcgatgccattattttttattttgaaaattttctaccagaaatggaccaggtgctgtggctcatgtctgtaatcccaacactgctggacaccaaggcaggcagatcacttgaggtcaggagttcgagaacagcctgggcctacataatgaaaccatgtctctactaaatatacaaaagttaagaatcatttgactccagaaggcagaggtttcagtgagccgacatcacaccactgcactccagcctgggtgacagcgttggactctgactcaaaaataaacaaattgataaattaattaatttaaatattagccaggtgtggtcatgcatgactgtaatcctagctactctggaggcagaggaaggagaatcacttgaagcccagaggcagagtttccagggagcccagctcagggccctgcactccagtctgggtgacgcactcagagtacatcgcagaaaaaaacaaaataattcactggaactgtaaaagtggtgtgatggtattccacagcatttggaaggtatgtatagaaatgctaactgtagctgggcatgctggcttactcctgtaatcccagcactttgggagtctgaggggggcagatctcctgaggtcaggagtttgaggccagcatggccaacatggcaaaaccctgtgtctactaaaaatacaaaaattagctgggcatggtggtgagtgcctgtaatccaagctactcaggaggctgaagcaggagaatcacatgtaactaggaggcagaaatttcagtgagccaaaccacaccatggcactccagcctgggcaacaatagggaaactccatctcaaaaaaaaaatcaaccagaaactgtaaaagtgctaccatgctattctagagcactgtaactctaagatgaaggttcctatagacatcacttccacatactcacaattacccactttttgatggatcgatcctagggtcaaaaataaatcccacaatctgagcaaaactgcactcttgagattggtgtgtgggatacctttaaggattttatgaaaatgaaagcatacttggaggatcacaataacaccaagtctatgaactgtaattgaaaggcacaaaaacaaataacttcaaatgtcaagaaataaaaattcatgtcactgtaaagttttaatatatttttaaaaaacctgcttccataagaattttaaaatgacaaaaaccaagcacaaatcacaatctgatggatgaagacaaaactacatttagaggaaaaatgaaagcctaaatctgttcatctcacaaaacagacagaaaaatattgtgtgccactttgggatgtgtgtcaccgtccctgactggctggctgctgatcagatgggcatgaccctaagaaggtggtgacttaccagcgctggactcactttgcagagttctgggacctctcagggaaccaaccagtagcttcaggtgtgagtgctgtgggtctcttctgggtaccctcaggagcttttatagacctttctaaccccacccttcccttctcaatcaccagcttccaatcagaaagtgatacctgattagatcttgcagtcacacccagttaatcctgattgagttttcagctttcttctgactaattgatcgaattagatacacatttatggaagtaaaagaataaataatagggtgaaagtccaaaactcattcattcatttattccccaaatactgatgaagtttggctaatagatgactttcatagtgatacagggaagggattaatctgttcctgatatcagacaaaaaaaaaaaaaaaaccttaaggtgtccttattggaggatgtttggccacatcaaaattgtcaaaatgtttcagagctacaacagcctgaagaagatagtgatgtcattcccaagaaaacagaataaaaagctgtgtatatcgaatggttacctgtgttttatgctatctaacatagcagatcatatgcacattcaggtagaagaaaggaaccactgagggtgtgatctatctcaagactaagtcaaggcttcactgaaggaaatcaggacaaaatgaccaagtgaggtgcggactgagtggaatgagactaggttttctaatgggaacctgcaaaggaaacaagacaatgtaaaacatggtggttatcttgtgggcatctagatgtcaggactgaaagtcctttgtcaagattgagtttatttattgattctttgattttcagactgggccaccatctgtcacccaggctggagtgcagtggcatgatttcagctcactgcaacctcaactttctgggttcaagcgattttctcaccttgcctcccgagtagctgggaattatgggtgcgctccaacatgccccactaatttttgtatttttagttgagatggggtttcaccatgttggcccggctggtctcgaactcttgacctcaagtgatctccccacctcagcctcccaaagtgctaggattacaggcatcagccatctcacacaccctagattgagttcagaaattcaaaggagaatcatcaaaagagataggtcagactcttaaccataacattggctttgagaacacagggggcaggtatagtcttggccctactagaaggtaaagggtgtttacccacaaaaatgatgggctcctctcagaaaaccagcttgcaaagatggaatctgagaatgtgagctggagcagaggccagagagaagatcggggccacacttgggaagggaaagcaagcaagctcaggcctccaatcccagccctttgggaagccaagaaaggcagagtgctagagctcaggaatttgtgaggagtatgggcaatgtgatgaaaccctgtctctaatacaaatacaagatattagccagggggaggcagtgtgcacctgtaggccaagctgcccaagaagttgaggtgggaggatcacctgagcccagtgaggcttctacttcccacgccccactttgtaaacctgaggctgagggtgagctcagcaccaataatggttgtgagaatctgtgttcactgagcatccacgaggcacaacagatggctggtaccgatcatcccggacctcagctcttcctcatggagaatctaaggcacgttgctattttccccatttctaacctgataaacctgagacttggccagagaaaaatctgcccatgttctggcagcaaatgattggcaaacaggcatgagccaccacggtcagccagaaaaaagtacttaataaattaccagctaactaaatgcaacactgcatcagaaagtgatagacaggccaggctccgtggctcatgcctgcaatcccagcactttgagaggctgaggcaggtggatcacctcaggtctggagttcgagaccagcctgaccaacatggagaaaccccatccctactaaaaatacaaaattagccaggtgtggtgg

SEQ ID NO: 1703 - DNA, 4001 bp, Homo sapiens
gaatctgaaaaattcaacattatccttgaggggagggagaaaggttcaatgtttccaagaagttaaagggtgtttcctcccaaagacatgggcttagctcagcaaagcagtttgagaaaattaaagaatgtgaggccaggtgtggtggctcacgcctgcagtcccaacactttgggaggctgaggtgggtggatcacttgaagtcaggagttggagaccagcctgggcaacacgatgaactcctgtctctactaaaaatacaaaaattaacttggtgtggtggctcatgcctctaatcgcagctacttgagaggctgaagttgtagtgagcccggatagcctgagtgagagagcaaaactctgcctcaaaaataaataaataaataaattaattaaattaaataaataaataaataaaataaattaaattaaaggcagcacagaatgaccaattaaaagccactaaggtggtcacagccaggtataaaggacaccagagaaaaagtctctagtgttaggataatcttgtcatgggtgggcaaaaattaccactgggacataagcaagtctcaagtcaattttcatgcaactcggaaagtcttggtcactggtggaacaatgagggcacaggccatcaccaaggataaagagagaattctgtacacggaacacttgtcaaaccaaatcactttgcccaaactcttcaaattccaacagaatttataggatttcctttgctctagagatattattaagaaatggaatgtggttctcaaaattctaaggcatcccaaacaaagcctctgggactccagccagctataccttcaaaattcatggtcattctcatgtgcatttttaaactgatgggaaaattacacccaggataatgaccataaggccattgtgggaattattggaaatctttaagactgtttttcttacaaaaccgcaattgtaggattaaacagtctgaatgggatgctagcatgtagagacttctaaactctttctctccttttttgaaggggggtgggttgggatctgcctactgatttcaattaattggatattgtttaaactgtttgcataagatatattttggcggtgggggggagggggccagagtctcactctgttgcccaggctggagtacagcagtggtgtgagcacggctcattgcagcctcaaacttccgggctcaagggattctcccacctcagccacccaaatagctgggactacagatgcatgccaccatgcccggctaatttaaaaacattttatgtagaggctggggactggtggttgatggctgtaatcccagcactttgggaggccaaggtgggtggatcacttgaggtcaggagttcgagaccagcctggccaacatagtgaaaccccacctctactaaaaatacaaaaattagccaggcatagtggcaggcggctgtaatcccagctactcaggaggctgaggcatgagaattgcttgagcctgggaggcggaggttgcagtgggccgagatcatgccactgcactgcagcctggccaacagagcaagactctatcccccaccaaaaaaaaatattttgtagagatggagttttgccatgttgcccagattggtcttgaacccgtgggctcaaatgatcctcccacattgacctccgagagtgttgggattgtaggcatgggtcactactcccaccaagaattctgaaaggatataaaccaaagcacaaatcaaattttttgaaatgaagacaaaactgcatttaaaggaaaaagtcaaagcttcaaattgttcatacaaaaaaaaaaaaaaagacaggatataactctgtgcctgcactgtcaccatcccagaccggctgactgtaggtcagatgggagtgtccttacagagattagggacttaccagatctggactcagtttgcagggtgctcagacctcaggaaaaaccaagcagaaactccaggcttgaagactttgggtctctcctgtgggtctttagaagcttttattgacctttctaatcacaactcccacccacgcccctccacgtatccgctgctagcttccaatcaaaaagtggtatctgattgcatttctgaagctccacccagttaatcctgattgggtttttggctctccccagattaatggattgaatcagatatccattcataccagatatccatattcatttcatgaatcaagaaagtgacagtattagggatagagtggaagtcaagaattcattcattcaaggctcggtggctcatgcctgtattaccagcactttgggaggccaaggcaggtggatcacttgaggtcaggagttcaagaccagcctggccgacagggtgaaaccctgtctctacaaatatagaaaaattaaggccaggcatggtggatcacgcctgtaatcccagcacgttgggagactaaggtgggtggatcacctgaggtcaggagttcaagaccagcctggccaacatggtgaaaccctgtctctgtctcaaaataaaataaaataaaatacaaaaattggctgggcatgatggtgggggcctgtaatccagctacttgggaggctgaggtgggagaattgcttgaacccaggaggcagaggttacagtgagtggagattgtgccattgcactccagcctgggcaactgaaggagactctgtcaaaaaaaaaaaaaaattcattcattcatgaactccacaaacactgatggaattttactaatatgtgacctgcatagtcctgagtgtgaggcagggaacggtttgatctgttctagacattaaagagaaaaataaaatctgaaaggagtattgttaggagatctttggccacatcaaaattataaaaatactttatagtggccgggtgcggtggcccacacctgtaatcccagcactgtgggaggccaaggtgggtggatcatgaggtcaggagttcgagaccagcctgaccaacatggtgaaacctggtctttactaaaaatacaaaaattagctgggcttggtggcatgtgcctgtaatcgcagctactcaggaggctgaggcactccagcctgggtgacagagcaagactccatctcaaaaaaaaaaaatgctttatagttaaaatagctttataaaaacaaaggtgtcatccctacaaaataagaataaaaatctccttgtatcgaatggtcttgtgggttttatatcacctaatgtagcagattatacgcttgttctggtggaagagaggtgccactgagggcgtgagtggtctcagggcttaggttaaggcttgtctggaagaaattgaaaccgtatttctaaactttataaatttaatcagtgaagaagggagggggagaaaccaaaacaaaccaagcttgcagtgcattcagcattcatcaggaggtcagcttgctctctgacctgcttcctcatggttgctggcagcctactgtcccaaaatcatgtagaccttagattacagttccccttaactgccctgcagacgacaatttaagcattgtaaaacattagctttttcatttgacatattctttcaggttctgcatgtcagtgaaactactgatgccagctgatctgaagggctctgcaaggcaccaactcaccaaagaatgcagttttgacatcctgatgacttcatacctcttactgccaccaaactacaccaactttccagccgcttgctatccatgatcccctgaaaaccctgagtaatccttggggagatgaatttgaggatctcctcctagcttatcattcagccactctgtgatcattaaactctctgctgcaaaccctgctgtctcagaatattgctaagctactgtgcagcaggcataggaacctgatggtcctgtaataaagtcatgtcaaaattacgaagggaagtgagggtgggggctgggcagggttgagctgggtgttttaattggatcctgggagtgaaccaag

SEQ ID NO: 1704 - DNA, 4001 bp, Homo sapiens
tggtgtgattggttcaaggccataaaatctctaaagcctcttttcttcatcttccagcagaaagcttcatctctgggccacaggagcccagtggaagagatgcccaaagaactgacctgagcaaggtctagggacatcagctagggctacctgctttcagaggctccctgacatggccacatctgcaaaccacctgtcactttgtaccactctcgtgcctattccctcacctccatcccagaagcacgcatttcccatgtcacttacctttcctggagttcaaaacaaccttttacagacagggaatcagagagaggatcattcatgttcactaagctgtgaggacagagcttcctctgtgaaacacacaggtttggtgcactttctcttcttttacaccctcccctctgttgcctcttttttatcatattaactttaaacacacttcctaacaaggaattcctaaaaggaattcaccctcactagagctgaaccctccactaaccagctccctacacgatgtccctctctgtagcttctaccccaggtcatccctctgcccttactggagcgatcctgtgatacccacttcaggatatagagcaccaaacaggacaatgcattctagtgtccccttccctagacatctccagtggctggcacacagtagatgctgattggtgtttattgtaacaaaaaaaggctgtgctatggcccccagagaaagctcaccatccttcctcacctgatcagctggtccaggtggcctctgaagaagcagacccttcttacataaagcatctggaggttctccagcctgaggagcacagagctgaattcagcaactaactgttcttggctgtcagagcttagcaggtaacgacagccatcagagatgaagagtttgcgaagattcctcatctggctcaggtaacggctaaactctactatcatacacagccagcacatgttccaaatttccaacacttggatactgtctgggtatactgtttccaatatgtttctgaaatttagaatgctcattgaataattcaccaccttagtacagcacaggtgtactgaacctcttctgtgctgcacccacccagagaagaagctcagatcttcatccatgaatttttccttgaggcaaacatccatgaacaccttcaagggctgcttctctcctgtccttggacagtcctccactgtctgtctcttactcatggcctctggggagcaggacaggagcctggctccagaccatatggtccaaaaattctcatcaacatcccgcatttccagcacttgaagtttccacctcctgtgagtaacataggggaaaagctcagaacgtagacaaggacccacccctgacctgggctttcactccacatcaaggacttcagctgcttttttcctcagcgcccctccttctgtctcttctccatccctttcccccttggattctgcctggtacccacttctagtgcctttaccttccactgggagcaggcaggttcctgtttcctcagtggaccctgtatggtgagcagtcctttcccagaggagctgggcaatagccaagaacgttcccagctttctcactggcaccatcagaagcccctgggccaccccgggttcccaatttgtctgacccagctgtttagtccctggacacctgggccctccccacctgggtcacctcacctggggcgaaccttttgggcaagcaggcaatcaatcccatccactacataatgtaagatctccagatcaggcgtcttcatcagggaccccagagggaggcaggggaagggccaggcctgcaccatcaccttcagaacctcgcagcgtctgctagtgaaggcctccacgaacagtggggggaagagctccctgggcagctcatccaggacggagatggccaaggcctggtccctcagcaggctctgccctgccagctccaggagtctgcgtggggcctggaagctcatcctgataaatctgcaagaaaacaaatccagagaagacaaacttatcaggccagtcctctcacaccctgacttctcctgggccaaaagtcactactctggcaggtgtgaaagtccttagtttaccccaattcgactctgcaataattggccacagagacatagttctgcccttctggtaccaagaagagtgtctcccaacctccaaggaacgggcaagatcactcctactccatgaattttcattaatttctccacccaactctattagctctgggaagtgttaccaagaatcttcaaagctcagctccttttttgagaaaaaaatgtcttctcaatttaaggatctaaagcaatggtcatgtggctgggcttggtggctcacaactgtagtcccagcactttggaggccaaggcgggtggctcacttgaggtcaggagttagagaccagcctggccaacaaggtgaaacccagtctttactaaaaacacaaaaagtaaccaggcatggtggcaggtgcctgtaactccagctactcgggaggctgaggcacaagaatcactggaacccaggaggcggaggttgcagtgagctcagacagtgccactgcactccagcctgggcaatagagcgagactcagtctcaaaaaaataaataaataaaataaaacaataaaacaatggtaatgggagtctcctgtggccccaaacagtctacagtctcagttcccacagtgaacttggctgggagagactaaagggatatttttaattagacaccattatgttcactttcaaaagagtaatgaggggccacacatggaggctcacagctgtaattccaacactttggcaagccaaggcagaacaatcacttaagccctggagttgctgaccagcctgggctacatagtgagaccctgtctctccaaaaaaatacaaaaaatagatggatgtgatggcgcacacctgtagtcccagctgctctgcaggctgaggtggaaggatggcttgtgtctgtgaagcagaagttacagtgatctgagactctgccactgtacccctagcctgggcagaacagcaagactctgtcttaataaaataaataaataaataaaatattacccactttggaatggagtctagagaaacaaatggatcccacattcagaacaaagactccattcttgaaaatggtgtatgagaccagtcatgttggctcatgcctgtaatcccaagactttaggaggcaaagtgggaggtttgcttgaatctaggtgtcccagaccagcctaggtaacaaaccaagacctcatcactataaaaaataataataataggcctggcacggtggctcacacctgtaatctcagcactttgtgagactgaggcgggcagatcgcctgagtttgggagtttaagaccagcctggccaacatagtgaaaccctatctctattaaaaatacaaaaattagccaggtgtggtggcacacacccacagtcccagctacttgggaggctgaagcaggagaatcacttgaacccgggaagcagaatttgcagtgagccaagatcatgcctctgcactcgaacctgggcaacagagtgagactctctctcaaaaaaaaaaaaaaaagaaaaaaacaaaatcaaaaaaattagccagttatactagtgcatgcctgaattccagctattcagaaggctagaacttctgagtagggaggatggcttgagcccagaaggcagaggttgcagtgagtcgagatcacaatactgcattccaccaagaatgacgcaggaagacaatgtctcaaagaaaaaaaaaaaaagacttcagtcaattgcattatttttcaactgcttgatttggaactctgaagctgggcatggtggctcacacctataatcccagcactttgagaggcctaggtgggcagatcacgaggtcaggtgttcgagaccagcctggccaacatggtgaaaccctgtctctactaaaaat

SEQ ID NO: 1705 - DNA, 4001 bp, Homo sapiens
acagtggatttcgctatgttgtccaagctggtcttgaactcctagtctcaagcaatctacccctcttggcctcccaacatactgggattataggtgtgagcctccaccccagcctcattattgaaaatttcagtgagaagctttgaaagctatgtgacactgttatgcatcattctcaagatagatgtttccaatgcacacttgttacacatgttcaaactgaaccactttggctgggtgcagtgactcacacctgtaatctgagcattttgtgaggccgaggcaggtggatcatctgagatcaggaattcaagacgagcctggccaacatggtaaaaccctgactctactaagacagcaaaaattagccaggtgcagtggtctgcgcctgtagtccaagctactagggaggctgaggtaggaggatcacttgaacccaggaggcagaagttgcagtgagctgacattataccactccactccagcctgggaaataggctagattgaacagagagacagagagagctacatttgactagacttcttaatctctacccagttaatccttattggatttttggctttcttaaagattaactgatcgaattagatattgatccatcaaaatgaaagatttagggatagggtgaaagtccaggactcattcactgattcccttcacaaacatggagttttactaatatgtgtccttcaaagtcctgagtgtgagacagggaagggttgaatctcttcctgatattagacagaaagaaagaaaacttgaaagtatctttgttgagggatccttggccacatcaaatttatcaaaatatttcagagttaaaacagttttcaaagacagagatgacagtccctaagaaaacacaatagaaatcttcatgtatccgatgatcacctgggtcatataattgtttttggtgctgagggagctgagtctcacttcgtcgcccaggctggagtgcagtggcaccatcatggctcactgttacctccgcctccaagattcaagcaattctcatgcttcagccttccacatagctgggactacaggcatgcaccccccacagccatgcctccatttgggtggaagaggatgtgattggtttaaaattaaggtcaaagatcctttttgattgattttgtttttgtttttggacagagtgtctctcttttgcccaggctggagtacagtagtggtgtgagcatggctcactgcagcctcaatcttctgggctcaagtgattctcccacaccagccacccaaatagctgggactacagatgcatggtgactcacagctgtaatcccagcactttgggaggccaaggcaggtggatcacttgaggtcaggtgttcgagaccaacctggccagcgtggtgaaaccccacctctactaaaaatacaaaagttagccaggcatggtttcagatgtctgtgacaccagcttctgaggatggagactgaggcatgagaattgcttgaacccgggaagtaaaggttgcagggagttgagatcatgccactgcactccagtctgggcaacacagtgagactccatccccaccctcaaaaaaaaaacgttgtgcagaggagggtttttgtcatgttgtccaggttggtctcaaatccctgggctgaaatgatcctcccactttggcctcccgaagtgttggggttaaaggcatgagtcactgctcccttcaagaattttaaaatggcatcaaccaaagcacaatcaacttttttgaaataaagacagaactgcctttagaggaaaaaattcaaagcttccaattgttcatataaaaaaaaaaaaaaaaggacaggatatagctctgtgccatcgtaggctgcactgtcaccatcccagaccgactgactgtaggtcagatgggagtgtccttacagaaattagtgacttaccagatctggatgtagtctagaaggttctcagatctcaggaagaaccaagcaggaactccaggcttgaagactttgggtctctcctgtgggtccttagaagcttttactgacctttctaatcacaactcccacccacgcccctccacgtatgcactgctagcttccaatcaaaaagcaatatctgattgcatttgtgaagctccacccagttaatcctgattgggtttttggctttccccagattaatggattgagtcagatatccattcatatcacatatctgtattcagttcgtgaagcaagaaattgacagtgttagggatagggtagaagtcaagaatacattcattcaagggtgggcgaggtggctcatacctgtaattccagcactttggaaggagaaggtgagtagatcacctgatgtcaggggttcaagaccagtcaggtcaaaaaggtgaaaccccgtctctacaaaaatacaaaaattagctgggcatgatggcaggcacctgaaacccagctacttgggaggctgaggcaggagaattgcttgaacccaggaggcaatggttgcagtgagccagatttgtgccactgcactccagtctgggtgacagagggagattctgtcaaaaaataaaaaaatcattcattcatgaactccacaaacactgatggtattttattaatatgtgaacttcataatcttgagtgtgaggcagggaaggatttgatctgttcccaacattagacagaaaaataaaatctgaaagtagtgttgttaggagatctttggccacatcaaaatataaaaatgctttctactttaaaaagctttataaaaacagaggagtcatccctacgatatcagaataaaaatctcaatgtattgaatggtctttgggattttatataacctaaggtagcagattacatgctcgttctggtggaggagaggtgctactgagggcgtgagtggtctcagtgcttaggttaaggcttctttggaagaaattgaaaccacatcgataaactttataaatttaatcagtgaagaagggagggagagaaagaaaaataaaccaagcttgcaacacattcagcattcatcaggaggtcttcttgctctctgacctggttcctcatggttgctggcagcctactgttccaaaatcatatagaccttagattacagttccccttaacttccctgcagacaacgattcaagcattgtaaaacattaactttttcatctgagatattctttcaggttctgcatgtcagtgaaactactgatgccagctgatctgaagggccatgcaatgcaccaactcaccaaagaatgcagtttctacatcctgttgacttcttccctcttaccgctaccccaactttccggccccttgctatccaggatccactggaaaccttcagtactccttggggagatgaatttgaggatctcctcctagcttctcattcagccaccttgtgatcattaaactctctgctgcaaaccctgctgtctcagaatattgctaagctactgtgcagcaggcataggaacctgatggtcctgtaataaagtcatgtcaaaattacaaatggaagtgagggtggagctggtcagggttgagctgggtttttaatgggaacctgggagtgaagcaagacttgctgaacatgttgggggttattgagtgggtgtaagaggaatctatctaacattgcactgatgcccttttggttttaatccttatgaccaagtatgagtctttcaaaacaatttgtataatcctccttatttttcctttcaaaaccttcaacttcctttatctccccaaataatctcgcatctattgccacttctttgcttacttcataataaacttttttttttacagagtcttcttttctgttaagtacaccatatatgttgttgccacacaagatgaataacctggttctatggacagaaagggtcaaaaggatcccattcctcaacagctgggggtgatgtaaaggtcatggttattctttgtcatatctgcacct

SEQ ID NO: 1706 - DNA, 4001 bp, Homo sapiens
cccagattaccggattgaatcagatgtccattcatatcacatatctatattcacttcatgaagcaagaaatcgacagtgttagggatagggtagaagtcaagaatacattcattcaaggccagacgaagtggctcacacctgtaatcccagcactctgggacgcagaggtaggtggattatctgaggtcaggagtttgagacaagcctggccaacatggtaaaaccctacctctactaaaattacaaaaattagccagttgcggtggtctgcgcctatagtccaagctactagggaggctgagacaggaagatcgcttgaacccaggaggcagaggttgcagtgagctgacaatacaccactgaactccagcctgggaaataggctagattcaaaaaaaaaaaaaaaaaaaaaaaaaaaaaagaaaaagaaaaaggagagagagagagctagatttgattcgaatttacccagttaatcctgattggatttttggctttcttccagatttactgatggaattagatattcacccatcaaagtgaaagatttagggatggggtggaagcccaggactcattcactgattcccttcacaaacaaaatggggttttattaatatgtgtccttcacagtcctgagtgtgagatagggaagggttgaatctcttcctgatattagacagaaagaaaaaacttgaaagtatctttgttgagggatcctcggccacatcaaatttatcaaaatatttcagagttaaaacagttttcaaagacagagttgacagtccccaagaacacacaatagaaatcttcatgtatccaatgatcacctgggtggtataatctaattttttttggtgtgggggaagctgagtctcactttgtcgcccaggctggagtgcagcggcgccatctcagctcactgtaacctccacctctgagattcaagcaattctcatgcttcagccttccacgtagctgggattacaggcatgcacccccacacccatgtctccattcgagtggaagaattacagtgaggacgtgattggtttaaaattaaggtcatagatcctttttggttaagatattgtttttgttttttggacagggtctctctcttttgcccaggctggagtacagcagtggtgtgagcatggctcactgcagcctcaatcttctgggctcaagtgattctcccacaccagccacccaaatagctgggactacagatgcatgtcaccatgctcggctaattaaaataaaaaaaagtagaggccaagcaccagtgactcacagctgtaatcccagcactttgggaggccaaggcaggtggatcacttgaggtcaggtgttcgagaccaacctggccagcatggtgaaaccccacctctactaaaaatacaaaaattagccaggcatggtttcagatgtctgtgacaccagcttctgaggatggagactgaggcatgagaattgcttgaacccgggaggtaaaggttgcagtgatttgagatcgtgccactgcactccagtctgggcaacacagtgagactccatccccaccctcaaaaaaaaaaaaacgttgtgtagaggagggcttttgtcatgttgcccaggttggtctcaaacccctgggctgaaatgatcctcccactttggcctcccaaagtgttggggttaaagacatgagtcattgctcccttcacgaattttaaaatggcatcaaccaaagcacaatcaacttttttgaaataaagacagaactgcatttagaggaaaacattcaagcttcaaattgttcatatgaaaaaaaaaaggacaggatatagctctgtgccatcgtaggctgcactgtcaccatcccagaccgactgactgtaggtcagatgggagtgtccttacagaaattagtggcttaccagatctggatgtagtctagaaggtgctcagtcctcaggaagaaccaagcaggaactccaggcttgaagactttgggtctctcctgtgcgtctttagaagcttttattgacctttctaatcacaactcccacccacgcccctgcacatatccgctgctaccttccaatcaaaaaatgatatctgattgcatttgtgaagctccacccagttaatcctgattgggtttttggctctccccagattaccggattgaatcagatgtccattcatatcacatatctatattcacttcatgaagcaagaaatcgacagtggtagggatagggtagaagtcaagaatacattcattcaagggtgggtgaggtggttcatagctgtaattccagcactttggaaggacaaggtgagtagatcacctgatgtcaggggttcaagacgagccaggtcaaaaaggtgaaaccctgtctctacaaaaatacaaaaatacaaaaattacctgggcatgatggcaggtgcctgaaacccagctacttgggaggctgaggcaggagaattgcttgaacccaggaggcaatggttgcagtgagccagaattgtgccactgcactccagtctgggtgacagagggacattctgtcaaaaaataaaaaaatcattcattcatgaactccacaaacactgatggtattttactaatatgtgaacttcatagtcttgagtgacaggcagggaaggatttgatctgttcccaacattagacagaaaaataaaatctgaaagtagtgttgttaggagatctttggccacatcaaaatataaaaatgctttctactttaaaaagctttataaaaacagaggagtcgtccctaggaaatcagaataaaaatctcaatgtattgaatggtcttcgggattttgtataacctaaggtagcagattacatgctcattctggtggaggagaggtgccactgagggcgtgagtggtctcagggcttaggttaagtcttctttggaagaaattgaagccacatcgataaactttataaatttaatcagtgaagaagggagggagagaaacaaaaataaaccaagcttggaacacattcagcattcatcaggaggtcttcttgctctctgacctggttcctcatggttgctggcaacctactgttccaaaatcatatagaccttagattacagttccccttaacttccctgcagacaaccatttaagcattgtaaaacattaactttttcatctgagatattctttcaggttctgcatgtcagtgaatctactgatgccagctgatctgaagggccctgcaatgcaccaactcaccaaagaatgcagtttctacatcctgttgacttcttccctcttaccgctaccccaactttccggccccttgctatccaggatccactggaaaccctcagtactccttggggagatgaatttgaggatctcctcctagcttctcattcagccaccttgtgatcattaaactctctgctgcaaaccctgctgtctcagaatattgctaagctactgtgcagcaggcataggaacctgatggtcctgtaataaagtcatgtcaaaattacaaatggaagtgagggtggagctggtcagggttgagctgggtttttaatgggaacctgggagtgaaccaagacttgctgaacatgttgggggttatcgagtgggtgtaagaggaatctatctaacattgcactgatgcgcttttggttttaatcctcatgaccaagtatgagtctttcaaaacaatttgtataatcctccttatttttcctttcaaaaccttcaacttcctttatctccccaaataatctcacatctattcccatttctttgcttactacataataaacattttttttacagagtcttcttctctgttaagtagaccacatatgttgttgccacacaagatgagcaacctggttctatggacagaaagggtcaaaaggatcccattcctcaacagctgggggtgatgtaaaggtcatggttattctttgtcatatctgcacctgcatattgccagtga

SEQ ID NO: 1707 - DNA, 4001 bp, Homo sapiens
tggctctccccagattaccggattgaatcagatgtccattcatatcacatatctatattcacttcatgaagcaagaaatcgacagtgttagggatagggtagaagtcaagaatacattcattcaaggccagacgaagtggctcacacctgtaatcccagcactctgggacgcagaggtaggtggattatctgaggtcaggagtttgagacaagcctggccaacatggtaaaaccctacctctactaaaattacaaaaattagccagttgcggtggtctgtgcctatagtccaagctactagggaggctgagacaggaagatcgcttgaacccaggaggcagaggttgcagtgagctgacaatacaccactgaactccagcctgggaaataggctagattcaaaaaaaaaaaaaaaaaaaaaaaaaaaaaaaaaaagaaaaagaaaaaggagagagagagagctagatttgattcgaatttacccagttaatcctgattggatttttggctttcttccagatttactgatggaattagatattcacccatcaaagtgaaagatttagggatggggtggaagcccaggactcattcactgattcccttcacaaacaaaatggggttttattaatatgtgtccttcacagtcctgagtgtgagatagggaagggttgaatctcttcctgatattagacagaaagaaaaaacttgaaagtatctttgttgagggatcctcggccacatcaaatttatcaaaatatttcagagttaaaacagttttcaaagacagagttgacagtccccaagaacacacaatagaaatcttcatgtatccaatgatcacctgggtggtataatctaattttttttggtgtgggggaagctgagtctcactttgtcgcccaggctggagtgcagcggcgccatctcagctcactgtaacctccacctctgagattcaagcaattctcatgcttcagccttccacgtagctgggattacaggcatgcacccccacacccatgtctccattcgagtggaagaattacagtgaggacgtgattggtttaaaattaaggtcatagatcctttttggttaagatattgtttttgttttttggacagggtctctctcttttgcccaggctggagtacagcagtggtgtgagcatggctcactgcagcctcaatcttctgggctcaagtgattctcccacaccagccacccaaatagctgggactacagatgcatgtcaccatgctcggctaattaaaataaaaaaaagtagaggccaagcaccagtgactcacagctgtaatcccagcactttgggaggccaaggcaggtggatcacttgaggtcaggtgttcgagaccaacctggccagcatggtgaaaccccacctctactaaaaatacaaaaattagccaggcatggtttcagatgtctgtgacaccagcttctgaggatggagactgaggcatgagaattgcttgaacccgggaggtaaaggttgcagtgatttgagatcgtgccactgcactccagtctgggcaacacagtgagactccatccccaccctcaaaaaaaaaaaaacgttgtgtagaggagggcttttgtcatgttgcccaggttggtctcaaacccctgggctgaaatgatcctcccactttggcctcccaaagtgttggggttaaagacatgagtcattgctcccttcacgaattttaaaatggcatcaaccaaagcacaatcaacttttttgaaataaagacagaactgcatttagaggaaaacattcaagcttcaaattgttcatatgaaaaaaaaaaggacaggatatagctctgtgccatcgtaggctgcactgtcaccatcccagaccgactgactgtaggtcagatgggagtgtccttacagaaattagtggcttaccagatctggatgtagtctagaaggtgctcagtcctcaggaagaaccaagcaggaactccaggcttgaagactttgggtctctcctgtgggtctttagaagcttttattgacctttctaatcacaactcccacccacgcccctgcacatatccgctgctaccttccaatcaaaaaatgatatctgattgcatttgtgaagctccacccagttaatcctgattgggtttttggctctccccagattaccggattgaatcagatgtccattcatatcacatatctatattcacttcatgaagcaagaaatcgacagtgttagggatagggtagaagtcaagaatacattcattcaagggtgggtgaggtggttcatagctgtaattccagcactttggaaggacaaggtgagtagatcacctgatgtcaggggttcaagacgagccaggtcaaaaaggtgaaaccctgtctctacaaaaatacaaaaatacaaaaattagctgggcatgatggcaggtgcctgaaacccagctacttgggaggctgaggcaggagaattgcttgaacccaggaggcaatggttgcagtgagccagaattgtgccactgcactccagtctgggtgacagagggacattctgtcaaaaaataaaaaaatcattcattcatgaactccacaaacactgatggtattttactaatatgtgaacttcatagtcttgagtgacaggcagggaaggatttgatctgttcccaacattagacagaaaaataaaatctgaaagtagtgttgttaggaaatctttggccacatcaaaatataaaaatgctttctactttaaaaagctttataaaaacagaggagtcgtccctaggaaatcagaataaaaatctcaacgtattgaatggtcttcgggattttgtataacctaaggtagcagattacatgctcgttctggtggaggagaggtgccactgagggcgtgagtggtctcagggcttaggttaagtcttctttggaagaaattgaagccacatcgataaactttataaatttaatcagtgaagaagggagggagagaaacaaaaataaaccaagcttggaacacattcagcattcatcaggaggtcttcttgctctctgacctggttcctcatggttgctggcaacctactgttccaaaatcatatagaccttagattacagttccccttaacttccctgcagacaaccatttaagcattgtaaaacattaactttttcatctgagatattctttcaggttctgcatgtcagtgaatctactgatgccagctgatctgaagggccctgcaatgcaccaactcaccaaagaatgcagtttctacatcctgttgacttcttccctcttaccgctaccccaactttccagccccttgctatccaggatccactggaaaccctcagtactccttggggagatgaatttgaggatctcctcctagcttctcattcagccaccttgtgatcattaaactctctgctgcaaaccctgctgtctcagaatattgctaagctactgtgcagcaggcataggaacctgatggtcctgtaataaagtcatgtcaaaattacaaatggaagtgagggtggagctggtcagggttgagctgggtttttaatgggaacctgggagtgaagcaagacttgctgaacatgttgggggttatcgagtgggtgtaagaggaatctatctaacattgcactgatgcccttttggttttaatcctcatgaccaagtatgagtctttcaaaacaatttgtataatcctccttatttttcctttcaaaaccttcaacttcctttatctccccaaataatctcacatctattcccatttctttgcttactacataataaacattttttttacagagtcttcttctctgttaagtagaccacatatgttgttgccacacaagatgagcaacctggttctatggacagaaagggtcaaaaggatcccattcctcaacagctgggggtgatgtaaaggtcatggttattctttgtcatatctgcacctgc

SEQ ID NO: 1708 - DNA, 4001 bp, Homo sapiens
gtggatgggcattccaaaaacctgcagctccttgcaacacacatgcagtaagccttttctctgcttgccccactctaagaggtgggtgaggcattcatctagtgtcctgttcttgagacaaaggtctatgaacaccatgaatggctgctgcctgcctgtccctggacagttatctgctgtttgcttctgactcagagcctccgggaaggatgcagtagctccagaaaatatgtcgcagaagttctcatccacattcctcaagtccagcacttgaagttttgactgcctgtgggtaaaggagaagagaggctccaaactaaggcaaggacctgagcttttatttacatcccagacatcagctgttctcctctctgccacttttccctctctgattttgtccaaccccttttccctccggattttgcctcatccccattgcctgtagctttcagagccactagaagagaagtttctgtttcctcagtggaccctgcatggtgagcagtcctttcccagaggggctgggcaatggccaaggccttcctgagcttcctcactggcaccatcagaaacctctgggcctccatggtgcccctcctcctcctgaaacagctgtccctaccctggacaaaagggccctccccacctggacacctgggtcacctcacctggggcgaacctcttgggtcaacagcacatcaaccccttccagcacagattttaatgactccagatgaggcgacttcatcagggaccctagagggaggcgggtgaaaggccaggcctgcaccattgttttcagggtttcacagcgtctcctgctgaaggcctccatgaacagcgtggggaagagctccctgggcagctcctccatggtggagatggccaaggcctggtccctcagcagcctctgccttgccagctccaggagtctgggtggggccctgatgctcatcttgatgaatctgcaagggaaaactctagaggacaaatccagagaaaaggcatcactctcaggccaaatatgatcacctcatcttctcctattgctaatctcattgctctggtggaggtggaaaagccctcaattccccccagttccattctgcacttggtggccacaaatctgtatctgtgcccctgtgactaccacaaagaatgtcttccaaacaccaaggaggggacgaggtggccagtggcccattaatttctatacattgctccactgaaactcaggattactgggatctgtcactcaggatcctgaaagctaagctccacctttttgagggaaatttttttgttacttaccacccaaaaacaatgagaatgactgtcctgtggccccacacagcctgcattctcagtttacacaattagcatgcttggggaagactgaagtgactccttaaaatcaatgccacttgtttttattttgaaaaattataagagaaactataaaagcagtgtggcagtattctagagcacttggaaggtgcgggtggaaacactaagtctcagatgaaggatccaatactcatcccttctacatactcacaatcacccacttagggacagagtctaagggcagagataaatcccatgttcagaacaagactcgagaaaatcacaatacaactaagtgtgtgaactgtagctgaagggcacagaaacaaataacttcacatgtcaagacataaaaattcatccaactgtaaatttttaatatcttttttaaaaaactgcttcaataagaattttgaaatgagaaaaatgaagcagaaatcaaaatttgagggatgaagtgaatactatatttagaggaaaaatcaaaacctacatctgttaaattgaaaaaacagacaggaaattctctgtgccactttgggctgtgtgtcaccatccctgactggctggctgcagatcagatgggcatgttcctaaggaggtggtgacttaccagatctggactcagtttgtagggtgctgggatctctcagagaatcaagcagtagttccaggcaccagggctttgggtctctcctttgcaaactcaggagcttttattgatgtttctaaccacaccctccccttctcaatcaccagcttccaatcagaaagtgatacctgattagattccgaagttccacctagttagtcctgattgagttttacactttcttctgattcattgattaaattagatgtgcatttatgaaagtgaaagaataaataacagggtgaaagtccaaaactcattaattcatttattccccaaacactgatgaagtttgactaatatgtgaccttcatagagacatggaaggtttaatctgttcctgacattagaaagaaaaaacaaaacctgatgatatctttatgggaaaatctgtggccacatcgaaattatcaaaacgtttcgttaagacagttaaaacagctttaaaaagacagtgatgtccaccctaagaaaacggattaaaaagctcctttatccaatggtcacctgggttttatgttttataacagggcaggtcatatgtgggttcaggttgaaaagggaaccacggagggtgtgattgatcacaagactaaggtcaaggcttcactgaaggaaatcaggacagaatgacaaagtgaggtggcggctgggcaggatgggaccgggtgttctagtagaaccctgggaaggaaccaagacagcataaaacatggtgggtattttgtgggcatctccacagaaggattgaaagactctgtctagattgagtttaaaaattaaaaagggaataattacaaaagagacagtgcagactcttcaaacacaacattgtctttgagggcagaggaggcagatacagtcttggcctctactacaagggaaagcgtgtttactcccaaaaatgatgggctcgccttggaaaatcagcctgggaagatggaatctgagaatgtgagctggggcagatgccagaggaaggaaggaaggaaggaagggagggaggaaggaaggaagggagggagggagggaggaagggagggaggtagggagggagggagggagggagggagggagggaaggagggagggagggagggaaggaaggaaatgaaagaaagaaagaaagaaagaaagaaagaaagaaagaaagaaagaaagaaagaaagagagagagagagagaaactcagccttcctgtctttaagaacggtgcacacatctggttgtattgtgtgcaaatgtacaatacatttccccaacaaaacctggaagctctatttcatgttaaaagatctgctaagttcagggatggctcccatcctaagcaggatcacacagtcattcttctgctattttagggcacaaagtagcaagaacgtcccccgcctccagaaagtcctccaggcctttctctcccattccatatgaaacccaaacagcccggagatgccactggcttccaaaactgaagtactttgaaggatgttctccatcatggaatatttctgtaaatgttctttctccacgtttctgacctcactatcaatgccctgctatgtgtgcaatcgagttaaactgaaacgtgctcagtgcggcttctacttcacctgccctcactttgtgagcctgaggctgagggtgagctcagcaccaaaggtgatcctgagtgtctctgttgattgagcatgcacaaggcacagcagggactggtaccattcatccaagatctcagctctccctcacgaggaatctaaggcatgttgctatattcctcatttttaaagtggtgaccctgagacttggctagggagaggaacctgcccgtgttcaggcagcaaatgatggacagacccctctggtgaggagctcagaggatcccctaaggagttcaataatctaaatgttgaaaagaactgattgacagactttcccttcctgcccaattcagaaggtccagcaccacccccaggaccccagtgagaatcccgcacttgggggcat

SEQ ID NO: 1709 - DNA, 4001 bp, Homo sapiens
tggatgggcattccaaaaacctgcagctccttgcaacacacatgcagtaagccttttctctgcttgccccactctaagaggtgggtgaggcattcatctagtgtcctgttcttgagacaaaggtctatgaacaccatgaatggctgctgcctgcctgtccctggacagttatctgctgtttgcttctgactcagagcctccgggaaggatgcagtagctccagaaaatatgtcgcagaagttctcatccacattcctcaagtccagcacttgaagttttgactgcctgtgggtaaaggagaagagaggctccaaactaaggcaaggacctgagcttttatttacatcccagacatcagctgttctcctctctgccacttttccctctctgattttgtccaaccccttttccctccggattttgcctcatccccattgcctgtagctttcagagccactagaagagaagtttctgtttcctcagtggaccctgcatggtgagcagtcctttcccagaggggctgggcaatggccaaggccttcctgagcttcctcactggcaccatcagaaacctctgggcctccatggtgcccctcctcctcctgaaacagctgtccctaccctggacaaaagggccctccccacctggacacctgggtcacctcacctggggcgaacctcttgggtcaacagcacatcaaccccttccagcacagattttaatgactccagatgaggcgacttcatcagggaccctagagggaggcgggtgaaaggccaggcctgcaccattgttttcagggtttcacagcgtctcctgctgaaggcctccatgaacagtgtggggaagagctccctgggcagctcctccatggtggagatggccaaggcctggtccctcagcagcctctgccttgccagctccaggagtctgggtggggccctgatgctcatcttgatgaatctgcaagggaaaactctagaggacaaatccagagaaaaggcatcactctcaggccaaatatgatcacctcatcttctcctattgctaatctcattgctctggtggaggtggaaaagccctcaattccccccagttccattctgcacttggtggccacaaatctgtatctgtgcccctgtgactaccacaaagaatgtctttcaaacaccaaggaggggacgaggtggccagtggcccattaatttctatacattgctccactgaaactcaggattactgggatctgtcactcaggatcctgaaagctaagctccacctttttgagggaaatttttttgttacttaccacccaaaaacaatgagaatgactgtcctgtggccccacacagcctgcattctcagtttacacaattagcatgcttggggaagactgaagtgactccttaaaatcaatgccacttgtttttattttgaaaaattataagagaaactataaaagcagtgtggcagtattctagagcacttggaaggtgcgggtggaaacactaagtctcagatgaaggatccaatactcatcccttctacatactcacaatcacccacttagggacagagtctaagggcagagataaatcccatgttcagaacaagactcgagaaaatcacaatacaactaagtgtgtgaactgtagctgaagggcacagaaacaaataacttcacatgtcaagacataaaaattcatccaactgtaaatttttaatatcttttttaaaaaactgcttcaataagaattttgaaatgagaaaaatgaagcagaaatcaaaatttgagggatgaagtgaatactatatttagaggaaaaatcaaaacctacatctgttaaattgaaaaaacagacaggaaattctctgtgccactttgggctgtgtgtcaccatccctgactggctggctgcagatcagatgggcatgttcctaaggaggtggtgacttaccagatctggactcagtttgtagggtgctgggatctctcagagaatcaagcagtagttccaggcaccagggctttgggtctctcctttgcaaactcaggagcttttattgatgtttctaaccacaccctccccttctcaatcaccagcttccaatcagaaagtgatacctgattagattccgaagttccacctagttagtcctgattgagttttacactttcttctgattcattgattaaattagatgtgcatttatgaaagtgaaagaataaataacagggtgaaagtccaaaactcattaattcatttattccccaaacactgatgaagtttgactaatatgtgaccttcatagagacatggaaggtttaatctgttcctgacattagaaagaaaaaacaaaacctgatgatatctttatgggaaaatctgtggccacatcgaaattatcaaaacgtttcgttaagacagttaaaacagctttaaaaagacagtgatgtccaccctaagaaaacggattaaaaagctcctttatccaatggtcacctgggttttatgttttataacagggcaggtcatatgtgggttcaggttgaaaaggggaccacggagggtgtgattgatcacaagactaaggtcaaggcttcactgaaggaaatcaggacagaatgacaaagtgaggtggcggctgggcaggatgggaccgggtgttctagtagaaccctgggaaggaaccaagacagcataaaacatggtgggtattttgtgggcatctccacagaaggattgaaagactctgtctagattgagtttaaaaattaaaaagggaataattacaaaagagacagtgcagactcttcaaacacaacattgtctttgagggcagaggaggcagatacagtcttggcctctactacaagggaaagcgtgtttactcccaaaaatgatgggctcgcctcggaaaatcagcctgggaagatggaatctgagaatgtgagctggggcagatgccagaggaaggaaggaaggaagggagggaggaaggaaggaagggagggagggagggagggagggagggagggagggagggaaggagggagggagggagggaaggaaggaaatgaaagaaagaaagaaagaaagaaagaaagaaagaaagaaagaaagaaagaaagaaagaaagaaagaaagagagagagaaactcagccttcctgtctttaagaacggtgcacacatctggttgtattgtgtgcaaatgtacaatacatttccccaacaaaacctggaagctctatttcatgttaaaagatctgctaagttcagggatggctcccatcctaagcaggatcacacagtcattcttctgctattttagggcacaaagtagcaagaacgtcccccgcctccagaaagtcctccaggcctttctctcccattccatatgaaacccaaacagcccggagatgccactggcttccaaaactgaagtactttgaaggatgttctccatcatggaatatttctgtaaatgttctttctccacatttctgacctcactatcaatgccctgctatgtgtgcaatcgagttaaactgaaacgtgctcagtgcggcttctacttcacctgccctcactttgtgagcctgaggctgagggtgagctcagcaccaaaggtgatcctgagtgtctctgttgattgagcatgcacaaggcacagcagggactggtaccattcatccaagatctcagctctccctcacgaggaatctaaggcatgttgctatattcctcatttttaaagtggtgaccctgagacttggctagggagaggaacctgcccgtgttcaggcagcaaatgatggacagacccctctggtgaggagctcagaggatcccctaaggagttcaataatctaaatgttgaaaagaactgattgacagactttcccttcctgcccaattcagaaggtccagcaccacccccaggaccccagtgagaatcccgcacttgggggcatttctaccatgtcctgtcacctgt

SEQ ID NO: 1710 - DNA, 4001 bp, Homo sapiens
tattcagtatgtgccaggcactgttttaagtactagggttatagcagtgaattttttttttaatccctgccttcatggagtttatatactagtgggaggacagatgatgttaagtgcaatggagaaaaataaaacaaagagcaatggggaggaggaggtgataggaggttgcaatttaaatacatagtaggctagggaagtcctcaccgaaaacaggccttttaggccaagtgaggtgagggagagaacattaggatatctgagagaagaaatttaaggaacagcaagttcaacgaatggaaatggctcctaggcagagctgggagtctgaagaaaagcaagggcaataaatttctctccggtaagtaattctaagcagttcctgctccaaggcttaatctctcctttatctccaaagccctcactccaggagccttgtatttttccactgtcacatatagaaacaggtaagactcgctgcctcttctagaaacagtacccaagcatcctaactcacctagctttgaccatagctaaatgatgaatatgaggcacagatctgaggttcagagagactgaaccttaatcttaatcttcactctgccctgttaccaggtaaaatcgtgcatgctggacacctgtttctcatctgtaaaacaatagtatgttacctcccagagctctgtaataattgaaagaaaggaccaatgaacggcaaatgatctgcactaaacaaatattcgatttctcctctaactcccctcaaaaatagaaaccaagattgctatcattttcctccaggcctgatgcttttgagttcagaggcaaggaaaagatttgtcccagatgttcggcaaaggttcaggagccctgtctcctgtcattcttcaggtgccagatttcatcctgttctcagtaggaggaaaggggaaaaagccggactgaagtgaagatgcaaagaagggggagcggatccaagtgtccctaggcctgtcagtaccaggtgatgatgacatgtggccttctgcaggcaagcccagcttcaggaaacccacatgggcaaacacccaaactcccccaagttgaccaacttcagctcaattaatcgcattataagaggattccagtggccttgaatccacggatgcgtttgtaggaaggagttctgaaatctccacatgtccctcctacagccgactcaaacccgatggacagtttgggggtgccttccccggatactcacatctcccttatgcaactccggcgccgcgatcttcacgggctctttcctcttctttggcttgggaagccccagcgggggaccggcaccgccaattggagggggcagattgaggccagggcctcggggcgagggcaaccccaatcccagtccctccccaactcccgccgcttcagccgggctcacgcctggaggtggggggaagcctcccaggccgaagggcaaggggggaggaggctgaagcctggggtctccggtgggtgggggaagcaacagcggcgggggaaaggctggcgccagcatctgagggggcggaggcagcaaggccggacccttgggcgcagggagagaagcgaacaagccccctaaagcgggcccagatgtaggagccaccgcctcctcttcctccggctcgggctcagcctcatccggctcgctctcatcgctgctggcgtaagcaaccagcgacatggcgcctcccgcgtttcgggcgcccttgccggcagatgaggcctacttgagaccggggatgcccggaggcctagtaggccccgccacctggcggggcggggaaccgaaaagtccgcctgctccgtactctagggctagccccggcagaaactcatggctacggctgatttccaccgaacaaggcgtacctcttcacttaagctcctagtcccgggcaactacacacagctaatggccgccgagtcactccgcctcctccttgcctcaccaatacaggaactacaacttccagagaacactttggacacagcccggttctttgccgcagggatctcagcgcaaggcacggcgggagttggagtccgaggaaggatttaggggcgagcaaagggagacaggagagaaacccgcctctgacgcagggacacctggggtgagtagtttttttcgtcgcctaacaattccgaggtgactacaagccccaccggtcaccacggcagtcactgagacggacaggagagcatttcggtacttgaagttccctagggtagccccttggccactaagatttctgggagatatgatgctcttagaaactgcaagtgatgtcgggaacgaaagggagtctgggaagctggcggattgaggaaaattgcttaaaggcaaagtgatctgtaaatgaactggtgaagcttcccagtcggctgggactgggaattagaataaaacatcccaaaaagagcaagggcccaagggacccgtacgaaattgggctgcaagccagaaagaagcgaggctgcaggtctaataataagcatctaagagttgaaataaatgtgacgtaaaagggaggaggtgatctccctcaccaggatcggggtgcacatccaggaacacaccttaccctggagcctggggcctggcctccctctgcagcaaccagtgagacaaagatgggcaaggctctgacaatccgggccaggtacttgaggttaatcccttctcagctcagtggggtaaagggcgaccgttctgaggaatcacttgagtccgtcctacctggctgtgcctcccacctatccatttgcagatgtcctttacattcctttacgtctgtgagtgctgcttcttatggctttgtatgtgactttcttacatctgtctctgtaagtgcccttcctttccatccatgtttataggagtccttgtccagcccatttatgtctgcttgtgatgatctgctgtgcgccagtccttccctgtccgcttgtgattttgtatccttttcttgtttacccatctctgcccccttcctgtctgcctgtgactgagtgccctctacttgtctgccctgtatgtgtgtgtcctttacatgctaattcatctctgtgtgggcaccacctccctgttcccagattgcagaaaattctgttgagcgaagccagagaaaaggctgttgaggttttgggaggaggctgaagagaaaattggaaaggttgatgaggagggacaatgatgaccacaatgcagagagacagtgaaaggcccaagcttgaatcctctatcagacgagcctgatatggggcacctcctccccaacctctccacccttcagagacaaactccatgctgccttctccatgaaggctccttagagcaatctgtgctcaaactttaatgtgcataagcatcactaggaaagcttctgaaaaatataaattcctgaaatctagcctaagagattcctattcaatagatgtgggttgggcctggaagcctggatctgtaagaaactactcagttagttgcaaaccaggcactgaggaccacattgagaaactagaccatcaagtcctacctcacagctagtatgccttgcacaatgttgatttctaaaatctgctttcaaatctaggttccccaacgtactctctggtgactgtgcggtcacttctcttctctgagtctcactttcctcctttgaaaaatggataaagtaggccgggtgtggtggctcacgcttgtaatcccagcactttgagaggcagaggctggtgaatcacgaggtcaggagtttgagaccagcctggccaagatggtgaaaccccgtctctactaaaaatacaaaaattagcatggtgtggtggcgggcgcctgtaagctcagctactcgtgaggctgaggcaggagaatcgtttgaacccgggaggcagaggttgcagtaagccgagatcacgccactgcattccagcccaggcaagtgtgcaagactccatctcaaaaaaaaaaa

SEQ ID NO: 1711 - DNA, 4001 bp, Homo sapiens
ggcgtcagcgcggccggtttcccctttctcgttccagcttagggcccatcctgggcgagggcctgacctggcggcccacacgcagcccggtggtcccgactctgagcaggcccgcggtgcacacacagaaccgaacccgaacacgcacacgcacaccccacgcgcggagggcccgcaacgccgcgcacagacagccccttcgcgtcggcggcgaaacgcccggtcttgttcgcaccaagaggggtcagaggtcacgggaggccgaggccgagggcacccggcagcggagcgcggcgggaagggggcgcctcacccaggggccgggaacggccgatggcggggcgcaggagcgtccggcacaaactcgggagctgcttttccctggtgcacagagcgcggggcctacggccgcggggcagctgttgggacgagccgggcgggccccgagccgagggagcggagcttcggaaaaccgccgcgagtcccgcgcgcacccggctcacgtttgggggctcggccccgggagctgcgaggccggcctggagggacccggccccggaggcgcggacggaacggcgtgggtcgggcggggacctcgaggggagcggcccgggcgcctcttctgcgggtgggcgggcgggcggcctgcagaggagggggcggcgggagcaggcggcgccgattccgctccgcgcggcgctggccgcttcgctgcagccggggcttcggcggggctgcgggagccgcgctggccgggccgcggctccgcctgtcctcacctgcccgcccgcctcaccgcggatggcgccggcgaccggggctgcggggtgcgcgcgggctgctcggaggcgctgtggcgggcgagggcgcgggtggctggagcacccggcccgcggcaaggaccggctggcggcaggcggggcgcgcggagcccggggctcggccgagacggagcgaaagagaaagtaagaccgaggaccgggcagcctggccggggcagctctgtccccgccgggcccggctgtgccaggcaagcgggtacagaggggtccacgcgggcccgagggcggcagcggcgggtcgggaggtggccgggtgggtccctcctgtcggaggcactgtcgccccggcggcccgcgcaggctgccggcgtcccagaggagcgccctccaccacgcggggcacagccggggataaacttcacgaccacagttcccagcccgggcaaaagtctccattttgctccccaagtggctgcggctgtcccgccgtcgccacccctgcccctgcgcccgcggagccgggtgggcgccggcccgcgccccctcctccgcccctccccggctcggggtctccctcctctgcgcccggctggcggacgccaaaggcggtgctctagcgcccactatttcaaaagcccggaatatgatttgaccaggactgagagccactcggagagagagagggagagagcgagcggggaggaaaaagttgctctcccctttcgtcaacttttcgctaactttcacttttcgctcccctccacccccggccctccccctccgcccccctccccggcccccaccgcgcgcctcgggttcccgggcccgagcgcctgacactggtggggggggagggggttccgcggggagggggccggcgccttcggggagcgcgcggcccgggcgccccgagcctccgcgccgagcccggtcgccccggagcgcgggaggcggagcagccccccgggccgcgcggccgagccgggggcccggagccgcaggcgcgccggccgcgccccgacgcgcacccctggcccgggcgccccggcccggcggcccgggccccggcggcgcggcgcggccgagcgcgggagacttacttttggctagcttcctcgccctcgccttggatcgcatggtgtcggctcgcggaatctctctcctcctccttgagtccagaagcagccacacactatcttcatctccccagcattgtcagtttggacaccttcgcacatgcgcacagagcactcaatctgacacccctcgccggggccaaaaaaactttgcaatgtattcatcatcctcatcgtcgcgccgccgccgccgccgccgccgcctcggcgcgggattggggggctctcctcggccttctcggtcttcgtctcacttatctctcccccctctcccccccccccttttcagcgcagctcggaactggccctttaagaaaacattccgtgttcggcgctcccgcccggggcccgcaccccggacactttaaaaggacccaggtggccccggaggcgaggtgactatccccccaccctgcccctgcgtcgcggcgcgtcgcgctgctgctcccgccccagccggggccgaagatggggcggcggctgcggttttccacacgacttccttggatctcggggcacacgcgccgatagttcggacgcgagtccgggctggttttgctccgttttactgcgtttgattactaatttaaaagctttgcgttccccgtcgccccggcccgcttttctcctgcattctcccctcggcccccgtccccgccctgcgatcgctggagggggcgtcggggctcgcgcgccagaacccggctcctccgaagccccctccgggccccaccgcccccctcgcgcctcccggcccccgcctcctccccttcgcccccacccaacggctgctgcttcgggcttcgcggctcaaaaacaacagcggaggcgccgccagctccgcgctccgccactgcccaggccggcgggcggcactcggacccgccgccctcggtccctcgcgaggccacggaggccaacacgcctcgcacggggggacagcgcgggggcagccgtccaaacaccaggcgtcctcggctggtcgtcccagggcgcccgcacctctccgcccgcgctctcctgccgccgcgcccccaaggtgagtacccggctgcgcgagcgcccgagctgggccaccttcggggacccgggccactggggacactcccctctggcctctcggggcccaggtgcgtagcgggcggaaaggccagcggcgcaggtggagcagctcggacgggagccgaccagacgcttcctcttcccctgtagcccccaaactccgaggcgctgcggcggaggggccgggctgagcgcaggcagggtggcccgggcccaggagcctgacggcctgagtgcggatttctcatctgagtatctgggaatcgagaatgaattggaaggaaaccgaggcgctgccctggccaggttgctgccccgcacccttccggagcaccgaagtcctgcccggcaacgggacttggagctgccgcagagtcagcctgagcccgaggcaggggtcgcgcccgcgatgcggggtctctgcgccgccccgcgaggctcctggccttgccctccctgccctttgttgtgtaataagacctgtggcggctccactgagacccacacgtgcaactccgcgcctccgcgttaaaggaggtgaaacgcagcagccctgagaaaccccgagaccccggtgtcctagcagaggcgccccggatggggaggggcgcggggccggcgccaccccagaggaaaagcccagcggagccgggttgggcaggagctggcggcggcggtgcgctgggccttctgccttggatcctccgcggtcggcaccgcttccctgctcagattcgaacccagattcggctcccaaggctcccacggctccagggtgcccagtcttgcagccagctcgccgcccgagccccggatggaggaagcgctcactggccgctacctctgctgtttctggcaccaggtgagtgtcgcctagagaagggccatgagcaatggcacagccccattccctgccgtcctttcgagggtctatcgacccctttacccaccctccccacaccctgaccatctttctacaggggttggggcagagaacagctcagtttacaggcccggctct

SEQ ID NO: 1712 - DNA, 4001 bp, Homo sapiens
aaaaacagactgtaagttccaacagagagctctgcataaacataagtcttttaattaattaaaacctaggattctgggttataggctgcccagagtagtacaaaataataggataataagaaatatgaactatttaatacgaaacaccaacagtctacgcaggtataaaaatgcagctattaagttcatatatcactaataaaacaaaaagtatatgttcaagtttttccccaaatccaaccaagagaaaaataaacagataaacaaaaaagcaaaagagtaatgacatatgttctaaacatgcacactaaagtatgccaaacagagaaaagcgttaaagtaaggttgctattaaactacaaatctatttaagtacaggagttagttatgattagtggcacagtaaagagggtactgtcctccccatctccagccccctacaaataacttacccggaaggctggtaacattagttataaacaaaatgaatactaaataaagaaacaagttgaattacataaaaagttttcactacaaacagttaagcactaagcctaatagcaataaaatcccagaactcagttaaaagttaaaaaaaaaaaaaactgggaattttctagactctgatcgtctgattcaggatcaaaagcatttaatgctctgaagcagtgactacatcacattcaataaatagacaatgcatattcagtaataggcctactaactgtttcacgggggaattaattctatttccattttgtggtgacatacaaagaatacatacttgaaaaatcagaacagacttcttgcctacattccttaatgccgattttaacattttcccaaatcgagtttacgatatgattttatttacagtatgacttccacaactcactttgcaatgttctggataaaggatggactcgttcgttcagatgactaaaaagaaatctacttaagacctaaggagagcaaaaaaaaaacaaaaaaacaaaaaaacaaaaaacacaaacctgtatttgtatcaataagaaactaaccatactgtgccttggcatattttcaaactgggatctatgaactattccccaattcacattaaaattcttcattaaaaaaaaaagccccaacgtgtcagtatgcccactggaaatatgatacagccaaccaaactattttcctacccagaaattatcccctccctttttaagtgtgactacactttaccttttgttcgaaatcatcagaagtcgtaaaactatgagaattgagtcaaaacgacaaaacaacacgctctctaacttccacatccccctgggcatcctttcggaagcccaccgcacccgcagtctccctgccctccccgccgcctcctgtctctgtctctcactgtctctgcctcccccactcccacaccccgactccgcgaccgacgcggcccgcgtcctgcgcggcgggcccgagtctgcggagccggggctgtcaagctagccgcgagaaagctcgggcgcccgccgtgcgcgcggctgcggagcgcggcttggggtgccagcgggggaacgtccggccccggaacgccgtccgcgcactttctgccgcccaggagctaagtcacaagttaagaaacagcccgagcgcgcggcggccgtgattcagcagcggggccgggtcggcagggcgggagggcagcgatcgcagggcccgagcgggaccgcagggcgggagcggggccggggcagggccgagtccggaaaaggtcaccgagatgccgcgggcgccgccgcccgagcccgcgacccgcctcgcggtcgggccagcagcagcgagggcggcagggcggcgtcctgggcgggcgtggcgccggggccgggcgggcgggccggggggctcctacctttccggctcttgggggagctccgcttgctccgggcgctggctcgctcttcctcaatcgcagctgctatctcagggttgtcttccccattgtaccagaccaggagctcctcgcccggcgcgattggctgcggggagagaagagacaagcgccgggccaatcagagcggcggttgttggcgggggcggggcgcgcaccgggacgcgggcgggagcggcgccgatggcaaacagctgtcggcggcgccgcgcgcacccggccggcaggaagggctcccggccccgtgcgggccgcgccggcgcccggaaccctctgctggagggaggaccgcacccgcggcgtggggcgaggggcgcggaaggcccggtgacgggtagcggagcccgggtgctgtcccagtttcctgtttaaagcctcacgacggcccacgcacgagaaaaaataaaacatgggcccattttgctcacgaaatctaagtcgaggagaaatgtaaagcataactgaaaagcgtgcggtgtggaaagcggagtgctgaaagacaacgactagcgcgcgttccagaccaagagcaacttcaacaggacaacgaggaggaaccacgcgcaagcacttacaaatgcgccgcggtttctatcccagagccgccaacgggaggccgcccggggccaccaacctgctctggtccagggaggtccgtgcctcgcccttcggaccggacatcaaacttccacattttaacttttaaatacagcaggaagtatctcccatgtattatgctcctaaaccatcacattcttaagccacgtatgactggaagtagtgagggccaccatcaaattgattccacccagaacaagatcccgaagaaaagatccactgagtgcaaagttcacacccctagaatttggggaaacagcctattggtttctctcacaacaaatgatctgttaaaaaagttacaagggtatcaatacaagtaaaattctatctaaaacccactgaataaaatgagaatccgtgagtccagcctcatgtgaatgaatgaagaaaggaaggaatgaacaagtaaataaaaaggaaagctcttccttaaaggagatcccaactaatcagtaaaaaagaaatgttggaattagaaaagcgccatttggcaatcatcacagtaatgattaattcaggcaagaatcataaatggatgctaaaagtaggtaaaagtttgaggagtaacaaaacacatagcctcagaatatctccccataaaatatttattaattacaaaagaaaaaaaacaacacttttgtaataagacataccaacatcatatgtctcctgatacgatgcacagaaaacagagcatcacttctggtagatttctgcccaaaatgcatacgtcgaatctaatcatgatgaaaccataagagaagctcaaactctgggacattctacaaaataaccaaccagttctcaaaactgaaaggttataaaagacaaagactaaggtaccagccaaacacataagacataacaactgaatgtggaaacgttttcttttcctacaaagacatgattggaacaattgacagaacctgagtaaggtgtacatattagctagtaaaataatgtgttgctgttagcttcctgatttggatcattgcacaatggttatccaagagagtgatcctttttgttttttgtttcttttttttttttttttttttgcggggagggagattccacctacggtttagaaacaaaatagttcctcacttcaacataccttctagtctagataaagcccccaaaagtgaatattacttcgtttaattctctgcagaactctcactgtctacacagtccaaatttaaaaatattctaaattctttaaattaaaacaaggcagctgtttccttggctctcacccacccctaagaaggctaaaatctgcctttttcttatttttgaaccaatacatgatttcccttcttgaaccagttaaatctaaccaaaaaacttactttaatatatattaataaattaaaacagccatcaagaacgccttttggcattctgatgaactaatctgttgaaagaacaggcttatgttaaa

SEQ ID NO: 1713 - DNA, 4001 bp, Homo sapiens
caaagtgtgtacactattctacagtttaagaggcccttaaaactacatacatgcaagctttttttggaaaaaaaatgtatatttcctcaaaataaatcattagttcttgtttcaaggtaaagagaaatgcctaaccatttatgatttaaaaaaaaaaagatgaaagactgtcttttgatgtttgtctgctttagtctgcaaaacagtgcaactcaagtgagcttcagtgcagagcaaggacagaacagatgggcagttcttgggggctcttagttccaggttaaatctaaacttgaccttgtggtagagttctcagataccgtgtgaggagttgctaatcctattccacaccctattccaaaaggtctgtggagaaagatggaagaagaatgactgagaagcagagcctatgatcacctgtaagaggagccgggtttcatagcagcccagaaggaaggcagctttagcacctgggatggactaagaaggcagtgttggcaagaaaaattgaatattttaggaagattacgttgacagaaaagaataaggaagtaggtgaggagagggcagccagaaagactggggctgggcaagtcagttcagaatccaagagaacaggcaattagggtttgaattgcagtcaagagctgaaacaaaaaatatgattgacactgcagagggaaggaatgggcagaatgttagctaactgaacaggaggtaaaaaagaaatggcaaagatgagtcccaaaattggaatgtgagtgactgcaggaatggtggtttgaatatattttaaagacagagcagtcaggagtagggacaatatttaagtaaaaggtggtgagctccattttttttttttttttttttttttgagacggagtctcgctctgtctcccaggctggagtgcagtggcgcgatctcgactcactgcaacctccgcctcccaggttcaagcgattcttctgcctcagcctcccaagtagctgggattacaggtgcccaccatcacacccggctaatttttgcgtttttagtagagatggggtttcaccatgttggccaggctggtctcgaactcctgacctcgtgatccaccagcctcggcctcccaaagtgctgggattacaggcatgagccaccacgcctggccagtgagctccattttactgactctaaggagatgcccgaccttcccgggaaaagtacctcagtctcaagtggaagaacacgtccaagcacaaacgggccatcaacatggagatggagattcagatgtcccaagtgggtgcctcaggaaaggaaattgccaagcggaaaaatatccacagagaagggtagacggtgcaggatgtggctttgtgaaaggcacggaaggaggtagaaaacatagtggccccttccaccaagttctgtaagagtggagggaaggtcaaaacgcctaaggactcaatacataactgggaaggcttttctctcaacaataactgccatgttatttcacaacactcattgtattaggagaaatatctaagaaaaaatgttactaatgttcttgaaaagcctaaagtatccaaattgcctgcctattctttattcatctcaaaccatcccgatcaaaaagactaatcatagtcttcactttacaaatagtaagagacaacaggggacaagtgacctacctacccccaccatagccgaaaatcactcgtactccattcttgatctgtgatactgtcattctgtacattgaggtagggctccattaaattactcgagagtgcattcatatatttacctccccaagcaggtgagctgacctgccttctaacaagtggtaacagagcttcacaattaagaatctaaatttatcccaagagccatacttctgaaaactcctactttcagatgtactgtaaaactaagtctttcagaattatagcaaagtccctaaaaaataagcctcgcagagtgaggaacatttagaatgtcacttttacactgatactccaatttatatttaatttacattctcttaacaaggtcttgggcaatgtacaggattcatactgaagtatataagggtttagtgactcttacatggcataatttaaattatgtgaaagtgccacggaattatcccaccagagtttaacataggtcttaatagaactacatataagcacatataaaatgtgtgggttttaccaatttccagacagactgccccctataatcaaactaacacttgcacttagctttacatatttcagacaagctgtgccaagaagtaattcagctctttcaaagcaaaacccagagtatgatttattgcaagagctacaaaatattcttttcaccaaaatggctggaaaataataagtattcagtaaaatctcctttattgcatgttccaaaggactaataaatgaaaacacagtataggcatgacatgaaccaagactctaagaataaatactatacagtactaagaaaaatactgtaagcatatttcattccaaatgagccagatttactacatacaataactctaattcatgcctcaggaaggtgggggtggggaatgaaaggcattctctttaagaaagaatatttaaacgacacatgcattcattccagtgaaattatacagatgttctgtaattcagaaaaccacccctaccaaatgtagctccaaaagcacatctcttttcacgttttatttatcaatacattccgactaaagattacgtatgccacaataaaaattcaatcaatactatctacacttagaaagattacaaataaggatttggcaacttatacttttccccctagaggaaagctgcattaatgctgcatgttttccacaaagatcaatgaactatctttaaattataatgtattaagttaaagttaggtaagcacttcaaaagtaagccttattgcctcagggcaaactcaccatttctgtgcataacctcaaattggttgttttcaaaaaaacaggtttcggaaaaactacagcatagcctctaccatcaatcttcaaggggttgctggaccaagttgcttttctagaagacagttgtttctgcgctgttcagcataatggtctatatgcttaaattatttaccacgcatcaactctatgcaaatttattcaaatttcataatttaatctgcatactaagaatgctgattccacgtcatgaaaactcctttatgatctccaggatacctcacattgttttacctcatgccacaaaactgatgccgaagcaaaagtgctgaaactgaccattcaataaagtcacaaaaccaaaggtggaaaggaacgtggacagacctgaagtccacttcttggcttcaaggtgtaaaccatctagtctatccttacagttcttaaagagattcaataatctgtttcaataattcaaccatacagttagatgagccttccttcactgcagcggttcaagtgctatttggaaatgtctggagattttactggctgtcacactggaaggaggtgctactggcatctccctgatagaggacagggatgctgctgaacatcctacagtgtacaggatcgtcctccacaacagagaattctctcacccaaatgtcagtaagtgcagaggttgagaaactctgctttaatggaagctaagtattgttttcagtaatggagtccacagctttcagacactccataaaggtggtttttatagctctaactagaaacttgtagcttcaaaaagagagagatggaccaccaccccaggcctctaaccaaatgttgtaaccataggtgacagcatagctggtgctcagcgcacaaagcgtgaagccctagacacagggcggcagttatctgtggtaaggacagtcaggtgatgtccctcatcatctggaaactcccttagctacccatcgtcatgcaagtttgacgattttcccccaaccatcaacctcctcctcttccactccccat

SEQ ID NO: 1714 - DNA, 4001 bp, Homo sapiens
ggttgcaaacaatatacacactatattatcaatcctgtataaaatgtaaataaatatatatatatgtgaatgaactgtaaaataaggaaagaaatacgcatatccacaccaagagagacaggaagatctgccaaacgttaacaatggttatctgaagaggggaaggttatgcccaatttctgtttcttctttgtgcttttctctactttccaattttctacagtgagaatcttttgttatgttttgtacttacaaaattaatacattcttacagatttaaactgtactgtttcaggccctgtccacaaaataaggaaaaaacaaacctgaacataccaacctttcaattaaagaaaccaccttcagaatcaacaaaagcaaacatttactgagcagtattatcatgttctggcacttttctaagcacttaaaatgtattaacttatttcaatcaaaccaaaacagatgtgttgagtaaaaagagccctggaatcacagaaaatgtaaatgagttttagttccactgtgaattttgatttgtttccatagctcgaaatgagggggtttaataaaaatgatctttaaaggtcatctcaaggctaaactaagattctacatgtaaaaatttggccaataagtgttagtccggaagcctcaagagtgatggggcagtttggaccatctcaaaaacacagaaccctactaaaaaagaacgtatgacagtgtgtctcagttcctcctccttaatatatgtaaatttcctatcatgtttttttttaaaaggcctacatttttctaatacttggacacaactgatcaaaccgaggcgaagtgtgtaccattgtaaaagaaatcattgaagagttccatttgttgttaaaagtttcggtcacttttaataaacctggagtaaacaaaaacttaaacattttagtcgagttctggggtaaaaatgattcttctagtgtctggttaaagggatctaaggacctactgggattcagcaaaagacgttccacgtctcaaatacacccaaaatctcaatacaacactaaaagaaaagtgaggggccagcacgaaatttctgttaggggaaatttcagctgcgtagttaaggaaatcaggacttcccggttaactatggggtctttgccgcagctcacagcccgacacaaagctacaagcccggagggtcggtggctcacgcgtggatcgaaagaaccacgaaggtttggggaatgacactgacctgttaggtttacttcatgtctcacttaccaccatcaaaagaggttcattgatagctttattagcaaaattagtaacagagttgcacgtctgtaacacacacacacgcgcgcgtgcgcacacacacacatacacccgtgggtctatgggaacattgagggagacaatctccaggttaaaaccacacaaaaactatttgggaaacacaaagacgcaagacacaaaacaaatttggagtgcaaatgtgcaagacacactcagtgggaacacaaaagagaaaagcacagcggcttgacaattgggacggcgcccggccccacgtggggccccaggtggccccaccgccgcccgcacccggccagtctctgcagcccgcacgcgtcccccgcggggcgcgcggctcttcacggcgacaaaccgaatcccgaacttcgccgcagggaccccacggccgacaaggaggagcccggcgccgccacccacccgcggggccaccgacccggaggcccgcgcctcgtcccggggcccccggcacgcccgggacctctgagggggcgcgtccgccgacccggccatccctgcggcgccgggtccccagcgtgtcgccgccgccgtcgccgccgcgctcctcggggggagggaccagcgtcccggcgcgagcccagaggccgcccacccgcgccactccttacccgcgcccgccgcgccagcgcctcagagcaccgagggccgccgccgccgccgctgtttcgccggccccggcgcccgcggccgcgccgccgccatcttgactccagtcggaagtgacgtcgggcggcgaggcagtggcctgcggggctggggggctccgggacccccggtctccccacgatcccagagcccggcccttgaccctgcgccgtcgcccaatggccaccacccagccgcccctcgtaggtcaccgcggatcccatggcggcgcctcgggaaggaaccccggcggctggcgtcgcggcaagtccgaccgcaccctagggctaggatcctgcgtggttcaaagattctcaaagaatcaaaaagactgaaggaggtgttgggggggcatgtctatcgttggaggtcattaaatatctgacaagtacataaacgtagaccttatacttctacgtttggatctataccaaaaagatccaactccaggcagacagacgcagctgctgggtttatttgctgccctagtacccaggagcagtgaccaacgctgccctgtgcccgcgatgttccagtgcagcgcctctgagagcgcggtagtagtcctgcccttaaggagcttgctgttcccaagcgggcaaacaaatggactgcagagacgacgactcatagatgttctgatgaagatgaactgggtggaactggagatggctcttcgacatccaagggtggaggcctagcacgtggttgaaaatgagttgagtcggggagaagcacaggctggagatgagctggaaagttgggagttgtcgttatagatggtgcctggagccttcagcacttcaagataaagtaatcctctgagaatgaagtcaggaagaatccgaatgtgatggctacgttggccatctgcagaaagcacccagtggaaaaacaggatactaagggcaggtgtgcttccaaaaattatgaacgatcatttatgtaacaggtttaatcttaagaaaacgtgttggccgggcgcagtggctcacgcctgtaatcccagcactttgggaggccaaggcaggtggatcacgaggtcaggagatcgagaccatcctggctaacacggtgaaaccccgtctctactaaaactacaaaaatttagccggccgacgtggcgggtgcctgtagtcccagctactccggaggctgaggcaggagaatggcgtgaacccaggagacggagcttgcagtgagccaagatcgccccactgctcgccagcctgggcgacagagacagactccatctcaaaaaagaaagaaaacgtgttgtatcaacatatatcatgttatcttattgtaaaagaatgaggctaggccgggcgcggtggctcagcctgtaatcccagcacattgggaggccgaggcgggtggatcacgaggtcaggagatcgagaccatcctggctaacacagtgaaaccccgtctctactaaaaatacaaaaaattagccaggcgtggtggcgggcgcctgtagtcccagctactccggaggctgaggcaggagaatggcgtgaacccgggaggcggagctggcagtgagccaagatgccccactgctctccagcctgggtgacagagcgagactcagtatcaaaaaaaaaaaaaaaaaaaagaatgaggctatagctgatgatcgagtcggttatagtaaacaaatgaagatcacctcattagagtaaattttattaaggccttgagaagtgacagggcttaagaaaataaggaaataaatcaaacctcaagggtttgcttatttcttccgctattcaaggaaaagagaccctagatctgggagataccacgtgcctgtcatcaaagtagtattctctgttgtggagcaaagtcatcagacttctgcaccccttacctagattaataccttccaactggatccatgcatcgaaattatctggggtatctatgaagaaaatagggagaccccactgttccatccaccatcaaaacactgacatagaaatcaccattttaagagaaaagctatgggccacctggca

SEQ ID NO: 1715 - DNA, 4001 bp, Homo sapiens
gagactctagctcaaaaaacagagatttaacccactaagccgcggtctgaaagcttttccaagtcccaaagttcttagttcacaataccacaagcaaaagaaattttgtaagcatggatcttagcaaacttttaactgttttttaaaaagtccttaacacctttaacgacaaaaaacaaaaaccaaaaactaaggcatgctgcaacttggtgcccccaaatggccttctcgtccaatccttctttcccaagtggcccccaagtacaaaacccaaccaattcggggtaaaggctgctgggattcaggccgccaccgggccccttcaggggatctgcccagcgtagagggccacatccctaaaccccacttcaggtgccccctgtccctccccagcactggagaaagcaccagcagagagagtgcttcagcggggacatttgggctcatcgctaactccattccacgtacaggaaaataaagacggggaaagggtacccgaagctccgcagctagtcaaggctcaggacccggaacagccaaatacatagaggctgtcttctacagccacgagtctggatacaggtccattccagaagcttcccgaacccaccccgtccggcaggaggctagtctcggagacccccaccaccagcccgcccagacgccgcgccacgtgctcgagttgccgggggaagactcgactcgagtccacgcttgccttggggttcaaccaggttcccgcacctacgtggggggcccacgagaggggtgtgcgcagcgctcaagcagtctcggactccgggcctcccccggctgcctcacgcatcacagcacccccacccgagcgcgggcgggccccggacaggaggaggaagaggcaacaggcaagaagggcgcgccgcgcctcactccgcaggggccgcactgcccacactcaccagtcccaacacaagtcgcagaaactaaccaccgacaccaggcaagaacaagacgcgcaagagctctccggggcgctgcctttatagccagtagggatctcgcgagagtcggaacggacgggggtgccggaggaggagagagaggagggggatgtggcccgagccccgcccggcgcgccccgccggaatgactcggcgctttccctcgttggggcgggtgcggaaaaatactaataccccaccctgttgcggatggctgaggttggagtgaggcgcccttgtggccgctcccgaacccgaacgcttaggttaatcctagatctctgcggaaaaccaggattctctttacttccaggaccactacgcactgtgccctcaatgcccaaactggagtaagcgtcttagctgctgcccacggaggaccacgtctaaccacaccaagccatgagaactgtctatccaaatatttcttaagttcgcagccttaaccccagcgcagatcctcagtaaccctcatggcttagatagcttccttcattgttctctttaattacagggttgctgctttctgttgtaaaggaaaataaaatatcaggactcctaaacttacgccagagggaaagttcatcttgggaggctgattcagttacacgaccatcctctccccggatgaataatttgactttacaatcttgagtcaaaacattacacattagccagacccacacggtaaggcaaaaggcctcagacatttcctgatgactaccccccacaaacacacatacacaaaatcataattaattatttgctcccctggaaacctttaaagtatgtagcctcccataaaacaaggacgtgtcaattgcaactagatctacaatataaagtctagttcctaaaactaaagtttgttctattccacatttttttgagacggagtctcactcaccctgtcgcccaggctgtagtgcagtggcacggtgttggcttactgcaacctccacctcccgggctcaagcgattctcccgcctcacctccggagtgtctgggactacaagcacgcaccaccacgcccagctaattttttgtatttttagtagagacgaggtttcatcatgttggctaggctggtctccaacgcctgacctcaggtgatccgcccgccttggcctcccaaagtgctaggaatgtaagcgcgagccaccgcacctggcctctattccacaaattccataaatgttcactactagattacctttctactagactactttctacctttctagtagtaccttactactagattaccctgagtccaccacataattgttttcttcctccattccctttttcttcaaacattcaccttatcttatgtaaaaatgtagatttaggccacctaggagggcggatcataaggtcaggagatcgagaccatcctggccaacatggtgaaaccctgtctctgctaaaatacaaaaacttagccgagtgtggtggcgcgcctgtagtcctagctacttgggaggctgaggcaggggaatcgcttgaacccggaggcagaggttgcagtgagccgagagcaccactgcactccagcctggcaacagagcaagactccgtctcaaaaaacaaaacgtagatttcctgagcattagctaaagtctttgcctcaatctttcccacccccacttttcaaggaaaatgtataaatactaaaaacctcctgagaacctcttgggaagaaacagccacaaaagtgtctgtgacatggtttagtcagtttagtcactcatttcaattaacactatctcttatccatcccttccactgcagctgaaggaaatctttctgaagtctgatcatgtcactgttattcgtggtttaaaagctggggaagaaacagccacaaaagtgtctgtgacatggtttagtcagtttagtcactcatttcaattaacactatctcttatccatcccttccactgcagctgaaggaaatctttctgaagtctgatcatgtcactgttattcgtggtttaaaagctggggctaaagaaagaaagaaagtaaaatttaaaaagaaaagaaaaataaaaaataaaataaaagctgaggctctgtagtcaatttactgagttaaaactcctcactgtcagggccgggcgcggtggttcatgtctgtaatcccagcactttgggaggctgaggagggcagatcacctgaggtcaggagttcgagaccagcctaacgtggagaaaccccatctctactaaaaatacaaaattagccacgtgtggtggcgcatgtctgtaatcccagctactctggaggctgaggcaggtgaatcgcttgaatcagggaggcagaggttgcagtgagctgagatagcgccattgcactccagcctgggcaacaagagcgaaactctgtctcaaaaaaaaacacacacacacaaacacaaaaactcctcactgtaattttaggtgtgaacttgggcaagtcttaaactcattaaaccttacttttctcaactgtaaaatgggaataatattaatactttattgtgattatctatgtagttcagtacagtacttagttcttattataaattagaaatgttagctgctattagtataactcttccatccttcacacttataacacccagaacacagtgtagttgtttcaagccttcagacttttttttttaagatggaatttcgcttttcttgcccaggcaggagtgcaatggcacgacttctgctcactgcaccctccacctccagcgttcaagcaattctcctgcctcagcctcccaagtagctgggattacaggcgcccaccaccacgcccggctaattttttgtatttttagtagagacggggtttcagtatgtcagccaggctggtctcaaactcctgacctcagttgatctacctgcctcagcctcccaaagtgctgggattacaggagtgagccactgagcccggccgccttcagacttttgtttgaacctggaaaactctttccctggagaaaacatgtctttcagcatta

SEQ ID NO: 1716 - DNA, 4001 bp, Homo sapiens
tctcacacctgtaatcccagcactttgagaggctcaggcgggcggatcaccgggtcaggagttcgagaccagtctggccaacatggtgaaaccccgtctctactagaaacacaaaaattagtcgggcgtggtggtgcatgcctgtaatcgcaactactcaggaggctgaagcaggagaatcacttgaacccgggaggcagaggttgcagtaagctgagatcgcgccactgcactccagcctgggcaacagagtgagactctgtctccaaaaaaaaaaaaaaaaaaaagaggcaagaccaagatattgattggcatctgcttaatttcaaatctttaggtattgtgtaagccctagaattcccttcaccatttgtgaaggtgggttcctgactttggggctaatatcccagggcgaaaacaagtataagaatcaatttactgctgaaaaggaaggttgcactggattcacccagatcaacaccaagattagtattgagatcttggccaagcgctgtggctcaagcctgtaatcccagcactttgggaggccgaggcaggcagatcacctgaggtcagaagttcgagaccagcctggccatcatagtgaaaccccgtctctaacaaaaatacaaaaaattagccgggggtggtggcacgcgcctgcagtcccagctactcgggaggctgaggcaggagaatggcgtgaacccgggaggcggaggctgcagtgagccgagatccagccactgcactccagcctgggcgacagagcgagactccgtctcaaaaaaaaaaaaaaaaaaaaaatacaaaaattagccggggcttggtggcacaagcctgtaatcccagctactcctaaggctgaggcagaagaattgcttgaattcgggagacaggggttgcagtaagccgagaccgcgccactgcactccagcctggccgacagagcgagactctagctcaaaaaacagagatttaacccactaagccgcggtctgaaagcttttccaagtcccaaagttcttagttcacaataccacaagcaaaagaaattttgtaagcatggatcttagcaaacttttaactgttttttaaaaagtccttaacacctttaacgacaaaaaacaaaaaccaaaaactaaggcatgctgcaacttggtgcccccaaatggccttctcgtccaatccttctttcccaagtggcccccaagtacaaaacccaaccaattcggggtaaaggctgctgggattcaggccgccaccgggccccttcaggggatctgcccagcgtagagggccacatccctaaaccccacttcaggtgccccctgtccctccccagcactggagaaagcaccagcagagagagtgcttcagcggggacatttgggctcatcgctaactccattccacgtacaggaaaataaagacggggaaagggtacccgaagctccgcagctagtcaaggctcaggacccggaacagccaaatacatagaggctgtcttctacagccacgagtctggatacaggtccattccagaagcttcccgaacccaccccgtccggcaggaggctagtctcggagacccccaccaccagcccgcccagacgccgcgccacgtgctcgagttgccgggggaagactcgactcgagtccacgcttgccttggggttcaaccaggttcccgcacctacgtggggggcccacgagaggggtgtgcgcagcgctcaagcagtctcggactccgggcctcccccggctgcctcacgcatcacagcacccccacccgagcgcgggcgggccccggacaggaggaggaagaggcaacaggcaagaagggcgcgccgcgcctcactccgcaggggccgcactgcccacactcaccagtcccaacacaagtcgcagaaactaaccaccgacaccaggcaagaacaagacgcgcaagagctctccggggcgctgcctttatagccagtagggatctcgcgagagtcggaacggacgggggtgccggaggaggagagagaggagggggatgtggcccgagccccgcccggcgcgccccgccggaatgactcggcgctttccctcgttggggcgggtgcggaaaaatactaataccccaccctgttgcggatggctgaggttggagtgaggcgcccttgtggccgctcccgaacccgaacgcttaggttaatcctagatctctgcggaaaaccaggattctctttacttccaggaccactacgcactgtgccctcaatgcccaaactggagtaagcgtcttagctgctgcccacggaggaccacgtctaaccacaccaagccatgagaactgtctatccaaatatttcttaagttcgcagccttaaccccagcgcagatcctcagtaaccctcatggcttagatagcttccttcattgttctctttaattacagggttgctgctttctgttgtaaaggaaaataaaatatcaggactcctaaacttacgccagagggaaagttcatcttgggaggctgattcagttacacgaccatcctctccccggatgaataatttgactttacaatcttgagtcaaaacattacacattagccagacccacacggtaaggcaaaaggcctcagacatttcctgatgactaccccccacaaacacacatacacaaaatcataattaattatttgctcccctggaaacctttaaagtatgtagcctcccataaaacaaggacgtgtcaattgcaactagatctacaatataaagtctagttcctaaaactaaagtttgttctattccacatttttttgagacggagtctcactcaccctgtcgcccaggctgtagtgcagtggcacggtgttggcttactgcaacctccacctcccgggctcaagcgattctcccgcctcacctccggagtgtctgggactacaagcacgcaccaccacgcccagctaattttttgtatttttagtagagacgaggtttcatcatgttggctaggctggtctccaacgcctgacctcaggtgatccgcccgccttggcctcccaaagtgctaggaatgtaagcgcgagccaccgcacctggcctctattccacaaattccataaatgttcactactagattacctttctactagactactttctacctttctagtagtaccttactactagattaccctgagtccaccacataattgttttcttcctccattccctttttcttcaaacattcaccttatcttatgtaaaaatgtagatttaggccacctaggagggcggatcataaggtcaggagatcgagaccatcctggccaacatggtgaaaccctgtctctgctaaaatacaaaaacttagccgagtgtggtggcgcgcctgtagtcctagctacttgggaggctgaggcaggggaatcgcttgaacccggaggcagaggttgcagtgagccgagagcaccactgcactccagcctggcaacagagcaagactccgtctcaaaaaacaaaacgtagatttcctgagcattagctaaagtctttgcctcaatctttcccacccccacttttcaaggaaaatgtataaatactaaaaacctcctgagaacctcttgggaagaaacagccacaaaagtgtctgtgacatggtttagtcagtttagtcactcatttcaattaacactatctcttatccatcccttccactgcagctgaaggaaatctttctgaagtctgatcatgtcactgttattcgtggtttaaaagctggggaagaaacagccacaaaagtgtctgtgacatggtttagtcagtttagtcactcatttcaattaacactatctcttatccatcccttccactgcagctgaaggaaatctttctgaagtctgatcatgtcactgttattcgtggtttaaaagctggggctaaagaaagaaagaaagtaaaatttaaaaagaaaagaaaaataaaaaataaaataaa

SEQ ID NO: 1717 - DNA, 4001 bp, Homo sapiens
ataaaaggctcaaacttctcttcccggtaaggtagggaatactatacctgatcctaggcagacttgtatattagttaataaatgcagatatttctaccgtgttcctaactatggctccctgataaagtaccacttttgatcaaatctagatggatctagaggccaataaacattaacaaaaccccaaaaaagtatggttagcttaaaaagtgacagcatttataactgttggcacagtaaatacgttttatgctaatatttaatctatacaagctaagagttctggaaatagtttatgtttcatggggatgggggatgagggctgcaggtagaaatgggaaggaacacaactctaaaaatcccaaggattgctggagaaatattactacctagatcctaagtataagaatggccataagctgtatttctaaagtatttttctgcattcaaggtttgaatattccatttctcaacctttttctggcctagtcctatctttcacaaagcttaacttttccctattcagtggctggaaaagggacttaagaggttataaagggttggataggcatatgatgtgtaagaatctgtccctggttctctgcacagccctgtccaatcactgattaatttcataagcctgtctccctggatactgtatataaaaaggatataatctggggaagaactgttgtcaagccttggagccccacagtgtagtgggaccactagtactccagaaccataatataactagacatgcctggaatgcttctgatgaaaactaagcaacttccagtttgctgattcaggagctgttaaaaaaaaaaaagggcaacaccgatttactactcctatccataatggtaaaactgccaagtcagatcacaggtcatcaatttggctatcatcagcaagctcatgtgctagaagcaaggtagaaagcggaggggacagtgaggggcaagccactggaaaacaagagagtctcaaagttggggagtacacgtgtcctggagcctggaacggccatcactagcaagaataggccactccagcggaacagcgtcagaaagtccttccctccaagtgttgcaagttctggaatctctgaaggcacacctacgcagagtgttcttggctcttcctaaagctgttatcaaatcatatcttggccattggaggcggctctggacaaaaagtctttcggccacctacttggcagctagtggttttaaatttcacattttgtgcccagaagcctgcaaataccactgcaccctcagatgatacgttggccttcctgtaacctatagccagcagctgtgtcctccgactttggctttagacacccatcctccccagggagcaaattccagaacggagggtgggagggcggtgcgaccctgggcactagtccggggaagtgatcgtcaatgccgccccgcccctgcgccctcggcctgaccacgctacctgcacagtttactaagacgagttaaatggacaacaaaccctcccgcgggcggtgagtttccagaacccgcagaacacaattttatcctccccaccccccaccttggcgtggccttgcccagccacgccggaggcggggaggccaggagggatcgagtggcccgcgcagggcaggccgaacgggtgccagctcccagcagcgcagccgacgctgagcagaggccacacggcctggcgcgcgccggaaccagtgcgggggaaggcgagggcggcgcagggggctgagcggccgggaggacggcagggagaagaaacagggaaggcacctccgagtccggcgcaaccgaggccaggacagggctacgcggtggccacttacgagtctcccagaaagtcgtggaaacggatgcggccgacggtggtattggcctcaaagttgggagccacgtccccgagaagcagacctccgggcatggcgacggtgatgagggggcgccgctgggacagcaagcaaccggttggttctggcgaagaagcagcctgtcccagcgcgcggaggaataaacgaaggcgcgaggggcggggactggggcggcgggggcggggccgcgggaggccggccgctgggggccgggccgcgggggctgggctgggcgcggggcggggcggggctgggcgcggggcggggctgggccgggccgggctggggccgggacgcggcgcgagctggactaccgcggtcgctgttggtggcgccgccgggcctgcgactaggtggcatccttcagacactataggccgtctctgcacacgtgatgcggggctcggtcacgttgccccctggaagcttgaggatgcgccaggtttgactctgcagggcgtacgcgctttagggatggaaggaagaggaacgcggcaggaaggcgagccccaaggtggagaatcgcctgggcgcgcaggctgcggcggcttcgcacagccgccctgggcgctgcacgggtccgcgcgcaccctgctgcgcacccactcgcggccagctccctacagaggagtggagtgactgctcgactaccacccctcttttagtgtgagcgtctggagtcctgaccgccccagccagcccagctacgatgaactgtctaagaggatgtggcaagacccagaagtatgggtgaccttatgtcagaggaagtggctttcttattgcagcaaaaattcccgtaccaatgtcagtgctagggtaatgtaactaaacttttatttatttttattctgccctcccctttctgtttgttatgaaccataaaatattcaacacaattatcttgaaatctaaatataaaatttaaaacatactctttgagacctactgtgtgcaggtcaactctgtcacccagggaggtgggcggcttagattcatttatttgctatgagccaagtacaaggtagataagatgcctgtcctcttggagctttccttcttgtgaagggaaaccggtgacagacaataagcacacaaaccaaaatatgttagacagcaatcagtcgtattcagagaactaaaatagggttatgtgcctagagggtgactggggggctgctttggtttgggtggtctggtctgggaaagccaccaggataatgtaggtaaactagtcagctcacggtaggtgctctggaaatggtagctatcgtttggatgatgacactggctcatgcagtaactcttgctttgcctgctgtgtgctggacactgtgccaggccatacagtggagaaacacagtccctgctgttacagggaaggcatatttatatgcaattataataaaatgtagggtaaattctgatgggggaaggtgtaaatgattggagttcagagatgagaaaaatcctctggatggggctggcaggtttaaggcaggggcatggcaatgttgagagtagtgactcacatactgtgatttgcgttttcatcacagtgatgtgttggtgcgtgcatgctaatcatatttaccgagttcttcagtgacccaggacttgcagtaagattactggtaaaaatttctagccacttcacaaaaccgtttaaagctaatgtaatttaatctctaatttggctccaagttttaacagctccttgttttaactccctttgtagggaagaaagagaatagttgggaaagaagagtagtttggcctaaggcactgttaacaatatgttgtggaaatcagctagaaaacacaatactctataaatatggagaatgaatacagaaacagattattgatgtctgtcaaaggcataattatattattgtctgttgtaaattaagcaaatataataaaatactcattagaatttacagtgccagaagctgtacactggcaatgcttctgcactctgtgaacttgtttgctttagactttggagcattttaaattgtcttgaattagctgtccactgaagggggccagcccctccacgcctgtgggtgtttctcgtcaggtgggatgagagactgag

SEQ ID NO: 1718 - DNA, 4001 bp, Homo sapiens
actgcgattcttgacttctcccagctttttgccccttccagccttgaaatgcttcactcacatgcccaataaatgggattgcccactagggaggtggagggggcatgaagaaagtgttcagctcaccctctgtgagagcccagacaggtggctgctgggaaggaggagcagggacctataagggtcaggggaagggcccagcacatgctcctggggtcctggggcaggcagattaacaggtgaggggaaacagaagctctgtggagccatcttgggggaactttcttactggaatgttcctctgtggtatatatggctgcttgtgcttgcaaggaggagagagggagacagctcttccctgtttactcccactccccaaaaaagaggtggcctatttgggacactctggtgctccttttccaggacacagtccttctgcccagctaacactgccggagtcttgggcttaaaaattacagcaaagctctctctcaggcccctgattctcgagccctggtggaccatcagaatctcctgaagtattaaaacaagattcctgggtctcgattcagtagatctgcagtgagagccgacatctgtatttttagtaagccctccacactcctccctctccagcccttaggtgactgtgaagatcagctgtgtgtgggacccctgatctccctacaccccgcctgccttgggacagaccctctctattaatagagaggaatgagcaggggagcaggagaggggccgcccttcagttttcccctccccaactgcttaaggaactgctgcctttttttttttttctcctctgccacaggaccttttgccaacctaaatggttggaataatttcagaacggctttaaagaaaaatatttttctggctgcctgcaggaaaaaaaaataaaaaaatgaactgtccccagagctgggaattaggaccttcaaggattgggaactgggtcgctttcttctttctttccaaaagccaagtggtttggaccagtgagacagaaattgaaagctgctgagaagacactgtgcaggttggaaaaagccgtttttctctccctcctacccagtgaagccctaaataatgaagaaacccttccagctcccgctcttgcttatctcctccctattcggcctggacttgggatgcaagattttcttctggctctgccatctcagtgggaaaacgtactttatctttgctcttacagctagggaggtgtgtgtgagagggcgagagacaagatgcagggaacatgtgtgcatgcatgtgtgtgtgtgtctgctggtgtctggtgatgatgtggtctagctctgcatgtcagatgcagagggcagaggtgaatggacaggatgtcttcattttgtatggtcgtgtggggtgatggtagtgaacgtgcagcctccgtgtgatgtgtgtgacttccacaatgtgtgacaatacacaaaaggtgcaaagaaatgggttctggagtccagtttctatggaaacacctgatctgtagaaacactttgtgcagcgtggctctctgtgctacaacaaacatctgcagcaggaaagcttaacttttgcagtaagcaaatataggggtacagagtgatgaaaagaaaaggaagaggctataggaaagaagttaggaagactaaatttgaactcatttgagaggagaaagaggtgggaggaaggaaggagtgagaggatagagactagatcaataaatggacagagctggaggaaacttactggatgaaagattcttcccagtctcctgcccatctcccaactgggcttacctgcacacacctgcctctcctctcagctctgagtttagtcctcctcttccaccccctcccttcggcggagctgtggcagcagagagccagctagaagatctgatctcccagtggtgtgtgcgtgcttgtgtttgcctgacttttcttccaccagatcctattggggtggggaggttagcttggggggagggaggggcagatcatagggagggaggggaggagaggagggaggagggagggaggggaggggaggagagagggagggagcttgggaaaggaggaatgacaataaagtctttatttggcagccaaaactcccaaagacttcatccacacaccattcccactaacagactcatttttaataacatttccttctgctgctgccgcttctggagaggggttgtttgacccatgtttggaaaacaagccaaattaacagagtgaaaaggcatgaaaagcaacctctgtgtaagccaggactggatggctgggtccagcactagcctgtttaattcctcctaacaatcgccttgccttctggggccgttgctcggtagtgttaaattcctaaaccagtgaggggtttgggatgcttcctctgagcagtgacagtctttccctaagttatcttctccaggaggttgcaaagggagtggagtctcaggctggcataggagataacttcggtttggctgccagggctgttctgagaaccagagagggagaagtctggcctgagttgcacagcaaagttaaggcagaattaagatttaatgtaagacctaaagtcactgttcctagctcatgtggacaatgtagtggcttctttcagcttctccatatcacacttaggtgagatttaggggctgtgtggtcatcacacaaagtgatgggaaatccaaatttcccctgtgcacatcaacaccccagaagacccagtcaagtaacaccactacctctaacaatcctctaacaatgcccctcaattaagaaagcacaacacacttgcaggtaagtagatgcccatcaaaatttcctgccatggccaggcacagtggctcacgcctgtaatcccagtactgtgggaggcagaggcaggcggatcacctgaggtcaggagtttgaggccaacctggccaacatggtgaaaccctgtctgtactaaaaatacaaaaaaattagctgggtgtggtggcgggcatctgtagtcccagctactagggaggctgaggcaggagaattgcttgaacctgggaggcaaagcttgcagtgagccaagatcgtgccactgcactccagcctgggcaacaagagcgtgactctgtctcaaaaaataaataagtaaataaaataaataaattcctgccatcccagctgactacttagaaaatgcaacgcaattttcttctccattattggttccatggagagctgcagagccccatgacaggggactgcctgcctgccctccgcaatatggggtagaggagagaacattaaaattagggtctgcagccctgggctcagccacccacaagctatggtcttaggtgaatcacttgatcatgaggaccttcagtttcctcatttacaaaatatggataatattgacctcacagggttgggaagattaaatattgtaaatgtgagagcactttataaactgggaagatattagggtttaggaaagggattgcgatgaatggtaattagcctaagaaaaggagaaggaaaaataaaacccagacctttctccaacccccttccaccccagatctcatggcttcacgccctgctggtgaggtcttgctggaagacagcacggttcctctccaggttcacattaactgtggctctgccaggctgctcatgtgcttcatttctcatccagatgggatatggcgtcttctgcaggccgggaacatcagacgccagatttgcttgtttcccttggtatggtgggtggtagatgatagagggcaaaaaagactggctgggcacggagactcatgtctgtaatcccagcactatgggagacgaaggcagaagattaatggagcccaggagttcgagaccagcctgggccatatggggggaccctgtttgtacaaataatttaaaaattagctgggtgtggtggtgtgtacctgaagtcccagctacttaggagactgaggtgag

SEQ ID NO: 1719 - DNA, 4001 bp, Homo sapiens
atagctgggattacaggcacacactaccacacctggctaatttttttgtattttgtatagagacaagattttgccatgttgcccaggctgctcttgaactccagacctcaggtgatctgtctccctaggcctcccagaatgctgggattacaggtgtgagccaccacacccagccccattaattttaatttgatttatttaatcacaattaaaatgaaagtaacactgttttagtgaacaaccaattgtatcacagaggaaaaggcagtttagaaagtgcccccagtgttgtgaaccttgtcatagtgttacgagaaagccgaagggtctggagatactggagtagtcatcattcttattgaatattcacatttgctttcatgtgttttcctgtcttttcttatctaaacaattctgcaacttatgcctatgcagacagttaccactcatgttcaggtttcataagaatctcgtattttactggaaatgtttactttagaaacataatttcatcataactgtcatgaatcttgatttttattctctcagattttgcttatcaaaggggaacaaaaggaaaagaaaagaaaagaaaaatccaaagcttggcattgttactattaatccccctagatggcatgctagcatcttttactaatgtgatttcactgaatgtactttaacagtctctaaaaatgagtaacaagaactattcatccaggacctgttttgggagaactgtgaaaagtttaatgttataacacaaaatgacagtcacatctgtatatgtccatacctggataaatagttcttgtaagaaaaagagaacattttcaagactaataaaatgccatttgaaacactatagtttattataatatggtatctatgtctaaatgatgccaaaataagttatttatcaataatttatttgattttaaaaaacaaattgttcaacatataggcaaaaattacatgttatctaaatattgttcttttttagttatttttatgatactatatagctccagcataattttatgatgaactgtctgcactttttaaactttcgagagaaccatagaaataacaagtaccaaaattattctttatacaagctcaaaactctcaaaaggagaaaaagatgagaattccaaagcacttacaaacaggctacatgttatatattattttaaggttgtacagtatattaaactcaagcaaatataaatttttagaaatatatttccgttgttataaaaatcaagactgaatgattagcaatagttgttaaataaaagtatgttcgatggttaagctaccttgagatgaaacttgctgaatcacgaaaacagacagcagcaacaacaggtaaatgggaagtgttttccatgccatcgttgttttcaggtaccgtaggtacccttgctgaaaataaaataaaagtatcagaaaacagctctttcatctcaccactaacttaggcttgcattatacacatttcagtaactttaaaaatgtaacaataataaaaccatcccattcttgaaacaagactttaaatcagctttaattttatagaaaatatttggccattagacttaatcttatgcagaacaaatcaagtcaccctcagccacgttattgacagttttaattcttaagaaatctccaatatagaatagacttatcttaaaactctagccaaagtatggcatgtacttaacagtgcaaggttaaaattttatcttaaggaaaataataacctgtgtcacagaaatgtaatttaataagcatcatggagttactgttccaactttttcttaattctcaatataaattcaaaggcttccaacaggtgtattgcataaacataatccttttcaaaaatttccaactactatctttacacattttttttcaaacacctctaatgaaaacacatttaattctatgaagcaagttaactttgacacttacccgtaaaggatagatgagtttatcccacgtcctgggagtcttatatatcagtgcaaatacagtgggatgaaccaattagtccaaaggttagacaaaatcaacagtgacaacctatgaaatcaaactttcctcatttattggaaaagggcccagacgactagacttaggcaacatctggaaaacacttccattaagcaaaatgactaccacaaaataaatttagatgtattggccagagcacatttctaatttctaagtgaagtgaacaaattgtcctgagatggtaaatagctctggcagactttgactagtatattgaagcagcaactttaaaatattcacatactggtatcatttatttcttctgctttccagttaaatctagcaaaggtagctttgaaatttacctagtgttagcttgtggcatacattttatatacttataccattatatcaaatatacatttcttgagtagtttcattttctctgagcacagaaaacatgctctcagttacctacaggtagattattgacactggattttctagcttcctttattattttaaaaatctgcttaaaaaatgtattgatattttccttagatccttcctttaagataagcatgtttggaaaaggtcttttaaattactaattttgtttccttcccacaatgaaaatgtgaaccatcaccattgcagagctaagtcagctcagcccaaggctttaccccactttcatacggaatgtatcggtgtaaaatcttacccaccaacataaggcttcgctcatgtcctagcacctccctgaaacctttccagatcaaattccaatcacatctagaattatagtaaacaattgtactacgttttactaaaatatctcttcatctgtctcacacccccaacagactatgatttccctaaggacaaccaacacctatatgttagtctattgccaacatacagcccagttgtttcaccaatgttatatgtttaaaacatgctcacgccgggtgcagtggctcacccctgcaatcccagcactttgggaggctgaggtgggcagatcacctgaggtcaggagtttgagaccagcctgaccaacatggtgaaactccctctctactaaaaatacaaaaaattagccgggtgtggtggcaggcgcctgtaattccagttactcgggaggctaaggcaggagaatcacttgaacctgagaggcagaggttgcagtgagctgagatcacgccaccgcacaccagcttgggcaacaagagcaaaactcagtctcaaaaaaaaaaaaagaaaagaaaaaaaagaaaacatgttcagtgaaccacatggttgtaggctggattctgctgtctactactcatttggtaggtactgcatttaattctcacaaaatgtcttaaagttaaatataatcatccacatttacaaataagaagatgaagacccacaaatgaagaatgtgtgacccatccaaggatctataaagactagaggccagaaccaagatttgaacccatgtctttgcattttaagttccgtcatgtttccactacatccagctcccttttgatcaaaaccatcacttaatttgtaatcattatactaaattttactcctttactctacatgtatacataggtttgtgagattgtgacttttttaagactagaattataagcatctattttctttctacagtgcttatttcacaggactaaatatgtaaagacaatttcgaggctatctgctcatctctaaataatcccccttttctgggaactacttctctttctatcgggctattttccttttagctctggttatatatgttatcttcccacatcagccacagctgataggattaggaattggaacttgaacaacccgagccaatatgttttcttctcctggaaatttgaaattatagttcagagattacaaatttgtctgtctacgtagaccaataatgtgtacatttctgcccatggtctaaaggagtagagaaa

SEQ ID NO: 1720 - DNA, 4001 bp, Homo sapiens
ccaaatgtcaaaggcgctgtttgcttgagcaactgtataatgttgtaacacaatagtccttaataataatactaaatgacaagtaacattacaggcattaatccaatccctggattgtcctgtattcatcttaaatacattctaactatccactctacttataaggtctttcaaaaataacccaggactttataaccctcacaggacagcaaagaattttacaaactttttaggtctttgcaaaaataccaccttgtctgaccaccttattgaaaactgccaacctcacaagactctctatcttcccttccctgattcgtttttctcaataaaattaaacataccttttacatatatattctgattactgtctgccttctcctactagaaagctaaacaaaaagatctgttttttccttgctgtatcctcattgcctagaacagtgcctaccacgttgcaggtgctcagcgttttttgaacacatgaatgagtattaaatatgtgcaagaaaacaggagctgattcttaccaaaggaatgaaaaatgagtctcttctactcattcaacagccttgacttggggttaaaatatgaattttacaaggaaatagagacctcagaataaaatttccagactgcctacccagcatttcttcagcaaagagaaaaaataaaggtcaatatttcacttataattctggatttgcaacaaagtatttttaataaacaactgtctctattctggagagaaggcaggttaattaaatcacatgtgactaattaacaaaaaagaaaacaaatgaaagttccatacttaactattcttactagttacttaactcgaataaagtataacatttcaaaagcagcctgtttttctacattcaaaaggggatcctatctccatgaagacagaccttagcagaatatgccttagcagtcctgacctcctcagcctcaaatcctccaaacaccaaggaaactttttctctcccttaccctagaagtcttcccatagccattttacaaacacaaacaccttcagacctctctgttttaattaacctctgacccaatccagctgcattccagcgttaaacaacaccccaggaagaaagactcacaacctctggcccctggagcatcccccaaacagtcacccccaacaaccgagagtcctggaacgtgaaggaatctggggatggcagggacctcccagcaagaccagaattggaggacatcttagacttcactctggtactgaccatttctgtgtgaccttgggcttgttactacatctctaggggtcctagttttctcacctttagggtgaggacaacatgttgaccaagtcactgtgaggattcaatgagattccatgtaaagcacctaacagggcacccggcacgaaacggcgcctcagtcctcagtagcgtggatgatccccgccctaagcctacaggctcagagctggaaggcgcctcgcagaacgagtccagttctcccgattttgcagaggaggacactgaggtccagagaacacagaagtgccttgctccgacctccagaaaggcagatgggcgcggaacctggaacccaggacgcccatcctcagctcacacccccgccctcttccctggaccctgtggggcccgggcgccggtgccaggcgaggcggtgcgcgccaccctcccggggccccagctccgcgcgacccgggaccgctccacctgccgccgagccccgcgcccgccggaggcccggggctcccgcctctcccctcggcctcccgcaagtcaggcagccccgcacagcggtccggagcgcgtactcaactcttcactttgccgaaggtgccgacgcccagcgtgtcgcccagcacgtagtgtccgatcttcacccgcccgtcgtgcttctgcttctcagccatcttcggcgcgcgcggcctcgctccaccgcctgccgctccgcgtagccgccgccgccgccgcctacccacagtgcagcgggccctgcgggcgagggggcggaccccgagccgcgaggggcgcggggcgggcgcggggtcccgggagagggcgctgggcgcttcgggcccaggtgggaagcaacgggcgagcggcgggcggggcggggccgagggagggagcgcgaggcgcccgctcccgggagtgagaggctcctgcggcggaacccgaagcagcgacagcgggggccggggacgcggggcgctgggcgggagtgcgggaggggctgcgccagatgcgcggggtccgagtgaggggcggaggcgacaggtgctgcgaggggggtaggcgagggtgccgagggaggcaggaggccctttctgaggaaaaccgaagggggtgaaaatagggggtgagactggggcccgatcctagggaatggaaagacttggaagtcaaactggaagaagagacgggcctcgcatgtcgggagcgaggggctgtaaaagggaagaatcgggaggggagactgcgggaagggccctggccaaaggggcagtggcaggagagcctctaggaagctcctcaagtctcgtctgaggcttttggatacaggtcgcggcacagggagaatgcacgcagctctgtgctctcttgaattgtcctcctctacttattctgtaattcccaattattttgtcctatagatggaagagaccctctccgccagagctctcaattttaactaatttgcccacagttttccaaaaaatctcagtcacggtatttgctcgagtgttttttagcacatgcttatataaatatgtagttttaccacgcgcttatataaacatatagtaccgaaatgtgatacagctgtacaagaaggaaatgggaaagacgtggaaagggaaacaatgttctgcccacagaaagtaaaatacgtaagcgacagaggaattgtgaagggcgaggccagtataaggtcacatattaaaggaagaataaatgtgatatagaagtgaaaagagtggtaagaggaaattagaagcatgatgcctaggcagcgtgttcaaagactgacctccccaccctcccccacaaaaaaaaagaaaaaagactggcaaagaattaggtaataaagcgattatctctgcctctcttccttctctcccgcccttccttccctccttccttccttcctttaatgttgtctcattctttaatgttgttctgtctttcagtgattaaagtttatttgcttctcaccacacacacaaaaagattcgtatacaatatgtttgttaattagcttgacttatagccattccacaatcaatatatttcaaaacatatacatactaaatatatacaatttttatttgccaatgaaataaaaaattttaaaacagtaaaaaaaaattctgtttggggataagtaattaaggattagtcaaacatttatagcactgcatgccagtagagtttcaaggtcacattcctcaaacatgaagtctcttgaacactgtttatatgtaaattgaaatgtattgatcaaaaagaataggacacaacaaaactttgttttctgataagtactaaatatagaaatttcaaacattcattctcatccaaacatcaagacaatctgatgagagatgatcacagcttataaattatagatatcacagctgttaaacagaggctatttttgttcattcttcagatcatctttcttgctgacaagtatcatctaggaatcactctacctcgctggcaattttgagaaaatagccagttatttttgtgctgaactttcatctggttaagggtcattccttcagtagtcaagtgagtaagaaaagacctattctgcttttgaggtatgagatgtatatgtcttctgctctaatatcccgttaaaagatgttgaaaagtcttcacttgaagttagatgattgctttcttgaagctacataaagactaactgtaaattgagatttcaaagcatttcgtactgtcttaactatttgt

SEQ ID NO: 1721 - DNA, 4001 bp, Homo sapiens
tttttgtttttttgttttgagagtctgtcacccaggctggagtgcagtggtttgatctaaactcactgcaaccaccgcctcccgggttcaagcgattctcctgcctcagcctcccgagtagctgggactacaggcatgcaccagcatgcccggctactttttctgtatttttagtagagacggggtttcaccatgttggtcaggctggtctcgaacacctgacctcaaatgatccaaccgcctcggcctcccaaagtgctgggattacaggcgtgagcctctgcgccaggctgtgatgatgttatcaattgagatccaaagaaataaatcatggaatccaaattccatgtgctaccaatatggcaaacaatactctattcactctctaaagccccagttccctgggaagtgatgaaatgataggaaacatcaaacacacccgaatctcctcaagccctccatttttctatctcatccagtcagtctacctggaggaattacttgtatttcatgctgacagctctgaaagccattagaaacattagaatggtaatcgctgctatcagctccatctgtcctttcttacagagtgaaaacaagttgttctcttcctgaaagtccttggaattgagagcaaggtcttcagggcagctgtgggttgtcgtttttttagccacgcaacattttgaagtactactgaggagtaaacaagtcgtggaatcattggctcttccacctacggagcagcagcggggcgtgaaagaggcacagcctcagccaccacaactataaagtatgggacaaaaattaagcagtcaactaaatgatgtccttaattgatccccaagactaggagaaagtattcaataagcaagtagttgctgcttacagccgtgccaaaagggaagaggatcacaactgtagagctgctagaagagcaaaaatgatactgatacatagaaattttcagaaaaagaatttcatttagccacctcagggcaaaggtgagaaactaccacctatggtcagcaactcgtgcaacctaccctctgaagttgtccaccagggattacaaactacaaattcagcaacgctatggaagagagccattcgtgctcggaggatcggggatggggggatgtctattgtccccatcctaaaaatgtggccaacagattagtcagaacaccaggaaagcaagaactccgcctctttatcctattttgaggcggcacttcaagaggaattatcatccaacacctctgtccccgataaatccctttaattcaaaaaaccatagcccggttcggcgcggtagaaaagaaccaagaaagggaagaggagcccagaaatcaacccgctgcagtactgacaccaactgcgggcatgggacgcttaccttggagtcagggaggctgaacacgctggggtcgtccgtactccccaccatgatcttgtgctccttccccggggcatggccgcctgcgccctcggagcgtgcagccttggcgccgtggcgctccccggacacccggtcgctggtggtgtttcccatggctgcagctcgtcggggaccacctaccgcggggaacgacaccgggctgggaacacctcagccgccgcgtcaggggcgccccccggccccgcccctgcgcctcgggacagggcaagggattccccgccccagggaagccgagccctggagccctctccctcctggcctgcgggaacgcctgcaaataccccggtgccctcactggccctagctcaggaaacccgctatcgggacctcccccgcgtccccgcgctcactgccaggggcgcccccactccagtcacctcgggcgatgcgctccctcctccaagggccactgatgtgatggctgttctgcagatcaggccaccaataaagttattgaaattgaagccgcacccctcgctggcgaccagcgattcctcctaaaatggctacaaggccggcggcgcggagtccgcccagtgcgcgttccctgcggcctgcagcctcggcgcccgggacccgccggcctctctagccgccgccgccgccgcctcgatggtgggcagtcgcacgcagcctccagcgccaggagggggcgccaggcagggcctgtcccgcctggggagactgcgcccgggataataggagcgcttggcctctgagactacccggcagaagggacgtccccaaatgacactcggaggccgcctccctgggctccggtgctcggtgccgggaggagcggcacggctttctaccccgcctcaggtgcgccagcacgttttctgggcagcatctgtgtgttaggcgaccggagaggtgggttccttatagggaataagaaaactgaaactgacttccaactgcaggcagaaggaagcagtggtcattgctggaggttaaaactgttctgaccgggcgcagtggctcacgcctgtattcccagcactttgggaggctgaggcgagcagatcacgaagtcaggagatcaagaccatcctggccaacaaggtgaaaccccggctctactaaaaatacaaaaattagctgggcgtggtggcgcgcgccggaagtcccagctacttgggaggatgaggcagaagaatcgcttgaacccgggaggcggaggttgcggtgagccgagatcgcgccattgcactccagcctggcgactcagcgatactccgtccccctctccccgccccaagaaaaatctgttcagtggggagcgacaaggaaggagctttcagcccgactggggtcgcagggaagaattcaagatggcgtgtttaggagctctagctccttgacaaattagtaaaatgttagtcttaggagaagaacgaaaaggctctcctaggctaagaaacagcatacacagtgagaaacctcagaagaaataaaattcaaggaagatagcaacaacgaaaacatcagaaggaacactaaaggtataaaaagggcaaagacagccctagggttgggagggatccaggttttttatgaaaattagtggaatccctaaggtacttacctttgtattataagtatttgcatgtctccttctagaaacgtttatcactctgtgttacacagaccagcagtgttggcgtcaactgggagcctgttagaaatgcagaatcaggccccatccccagggttctgaatctgcattttaacaagatcacattaaagtgtgtgagaagcaatgctttgacagctggcagagagcagatccagatttgataccttttcatattctgcatgtaccttatacagagtaggcttttgcatttgcggaatgaaggatacaggaatactgtttactgtaatccatttctaaccagatatgccacttaggcttaaacacggccaatgatggggaaccccaagttacataggccaccctttctgagtgagcagctctatttgctgaaacgttcatttttatattatgaagttgacatcccacttaagtacaacaaattcactactcccctattctttgctctgcctcttataaactcattctttggctcataaaccaaagacagtttacaggaagaaaaaaaaaaggtacgattttactgcaacttcttgctcacccctccaaaatctttatgtctgagtacatgctttttggttatccctacttttctccctccacccctcaattccttaccataggacactgaagcaaggcccttgaagatacataatacattaaaccttgacttgtgtagtattcagttttctgaccccaaggtggtttcaccatgccaaataatatgtccttggtatgtatttccttgcagtagtcaaatcagcctagcagaaacaaagtacgttaaccaatggaaaactgacggagagaaataaactgtttttgcacagctaaatggaaatgacttttgaattatctgctttggaagattatccatgacactgttctgccctgctctgctctaacaacatttgtaag

SEQ ID NO: 1722 - DNA, 4001 bp, Homo sapiens
acttaaagtcctctataaaagctggctcaaatctctgcaataagtagatagtgattttaaatacttcagaagatgaataagaaaattaaaaatgaagagaaagtccataactgaaaaatagtgagtaaaaatgaacaattttcattttataatatctaaataaatataggtataaattctaaaaatttattttatattgccatagaagaggacacacaaaatattggggaaaaaactatctttataacaaaaactatctttgtatcctaggtcatttagacttaagcttcctctagattttctatttaatagaaggggaaagtaatttatcttgacttcacgaagactgtgattctattccatatgtgattctattttgaatttaagaagtggtgactttagcaagacatataaataattttcttgtatatgtgtaaatcattagaaggtggcattctttcttgctggagtctaatggtcaatgtgaggatagtcacagaagtcaagaagttaaatataaataacaaaagtaattaaagataccagccaggtattaatatataaaattaggagtatactgataatattgagcaaataaattgagtaggagtcagatttgtgttttaatctaggccttttatttaactaactttctgacttgagatgatttcaaatctttgggcctcaggttttcaaaatttgtaacatgaagtggttggatcactactgtacacattttaacttctgtaatagttacaaaacaaattagtccataattgtcacaataaattatagttgtccatcagtatccctgggggttggttccaggacctacagcagaaaccaaaatgcccaggtgctcaagtcccttatataaaatgacagaggctttgcataaagcctatacacactgtccatatactttaaatcatctctagattacttataatacctgatatattgtaaatgctatgtaaatagttgttacactgtattgtttagggaataataacaagaaacaaaagtctgtacatgttaggtatagatgtaatttttttcccaaatatcttcaatctgtgattggttaaatccatggacgtggaacccatagatatggaagggctgactgtatactaactatgtataatatagttacaataaaaatttagttacaataaaaattaaatttaataataaaattatttgaagctgtcaatggtaagtcattatactgaatctgtttaatagtctagctgataaaactaaagtttaccctgaaggtaaataacaacaaatacactcaccttctgcttatctaagatcttcatggcataatactgttcagtggctttgtgttttaccaacatgactcttccaaatgaacctgttccaagggtttttttcctttcaaaatcttcaagtccggcattattctatatgtaaatacataaataaaatttaaaattctcgtaaaaacactatgggaattataaatgctttaataatacataatcataatggataatcccatttataactatccatttaaatgcaatacaaaaaagctattgagattccagtttattggttctatttttccctttgaataagaaagtatttaatatctgaggagagaatgtattggaaaacagagcataatagtaataggaggaaataagagcctcagctgaaatattaaagattatattccagtatgcattcctagtattggactttaatcttactactgaacttccaataaattagtttcatattttaataattacaaactgaccagaggcatactgacaaagagtcatagaagccatacagacttaatgcacttgcaaataactgtaatgaatagataaactgagggatcagagctctttcactaaagttacctgtgaagaaatcagtcttgcttcatttctgtctttatataagcttatagaactagatagtagcagcatgagagagcctagtggctttctctctttatattataaaaacacagtattatctaaaacaacaacaataaggaaagaagagttcctcattctacaaagaaccaaaagccagaatcccagaacaataatcagactctttttttcttgaatagatgttttgttataaggaaacatctttgtttggctttgactacagcacagaagcaaataattggaggcatcaatctattaaatttgttcctgccacaacaaaatgaaaattattagggacaaattatgtgttaaatggcaagaagtagtaattgctgacccatttgtttaataggtttcattgcaaagaactccatgaaaatatcagaaaaatattctgaaggcccagtatgtagtgtttagcttgaaaaaatgtgatgcagtatgattctttgtccagtgaggaatttgtataggtattacagttcactgtagttggattttatctgtattgcaaatcaaaccttgccttttgagacccattttagctttctgttggatcattacagacagcaggcaattctgttttacttatagcttgttttcatcatagtttgatttcacagcttaaaatttaaaataattttaagtagtcataagatttttttatcaacacagaaagctcttataattctgactgaattaatttaattaatatttaatcttaggttttatcaacatggatggattaaaatgtttaccatagtaccaaccaaataatgaaaacaaactttattaatagacaacagaatatgtgtttctgctctttatgcttttttcattgcttttctttgtattataaaaatatgttatcttccttacctctcttattgtttcatgttacacaatgtctaacattttgtaatcacaatgtttaatctttgtggctatgttttaacttataggtcatactctaaatcttgatagtaatggcatctttaagaaacatttacttagaattctttagtgagaaaatacttgaaataaaaacttttgagctaggcagaaaagactttcaaaatttaatttttttggttataatatcttttatttttcttttattttccataagttattggggtacaggtggtatttggttacatgagtaagctctttaatgatgatttgtgaaattttggtgcatccattacttgagcagtatacactgcaccatatttgtagtcttttatcccttgcctccctcccattctcccccaccaagtgccaaaagtccattatatcattcttatgcctttgtgtcctcatagcttagctcccacatatcagtgagaacatatgatgtttggttttccattcctgagttactttcacttcactttgaataatagtctccaatctcatctaggtcactgcaaatgtgttaattcattcttttttatggctgcatagtactccatcatacatatatatatatatatatatatatatcacagtttctttatccattcgttgattgatgggcatttgcattggttccactattttgcaattgtgaattgtgctactataagcatgcgtgtgcaagtatctttttcaaataacgacctctttttttttttttttttggtctttatgttctcactcataagtgggagttgaacaatgagaacacatggacacagggaggggaacatcacacaccggggcctgtcgcggggtggggggctaggggagggatagcattaggagaaatacctaatgtagatgacgggttgatggatgcagcaaccaccatggcatatttatacctatgtaacaaacctgcacattctgcacatgcaacccagaacttgaagtataacaaaatttaatttactattaaaattcattcattatttataactccaaaaatattatttttgtaaagtatagatggttttttatatacagtttttagatcctagttaagatctaaaatactttaattatatagaacataacccatcaaaatgatgataaaaaagatgcctgtgtatcagg

SEQ ID NO: 1723 - DNA, 4001 bp, Homo sapiens
agacaacataggtcacgcacggtagctcacgcctgtaatcccagcactttgggaggccgaggtgggtggattacctgaggtcaggagttcgagaccagcctgaccaacatggtgaaactctgtctctactaaaaatacaaaaattagccgggtgtggtggtgggcacctgtaatcccagctactcaggaggctgaggcaggagaatcccttgaacctgggaggcagaggttgcagtgagccaagattgcaccattgcactccagcctgggcgacaagaacgaaactccatctcaaaaaataataataaaataacatacattctacctctacattggcttctttaaatctccgtataacatgctgtgtgttcttggcttatataatagctcatcaaacttttctgaagctcctgaaaatgaataccaaaaccttactgatgaaacataaaccacataatctgatatatttatgttaaacaaaatgaatgactaaatccttctaaatgaattctactttattaatacagaaaaaagctattttcttcatgcaaagttataaaattagcctaattcttatgttacaaccatgaaaacattacaagtaatatttacacaaactaaaatcaccaggcccactttaagtgctaacatgtcattcactcctggtgatataacaaataccatctgttatttggacattctgaattataaaaatatatgaactttacaaaggcaaaccaacttttatttcacaaccattctgacacatatatacacacatatatatgcatgtgtatacatgcacacacaaacacacagacacacacacaccttatcgccatacagaaattccattttcatgattttttactgtttgatgtaaagtgtggagtacccgcaccttccgctctcagaagaaattaaccgtgttctggaagcacttcaactccgaatgacctttaagttttacaggcattggtagcagatccttgaatgtctagagaaaaggcaaacctgcctggcttttttctctaatggataaagttgctgttgggtctcattatgttttccattcctaatctgaagagatgaaggatctctaaggcagggttgtccactcaggattagcctcacttgcgtagagccagactagcagcccccgccttgtgataaggttgggtcggacccaagtgatggagggagaagagccaaccttacccacagcactacctgtagctcccaaagagtcggcgaggggggaaagcaggggtgggatggcactagggacttctttcctcggaccatatttggggaagtgttccagaacgtgtgcaagtcctcctcgctagagtgagaaagggaatcccagggaacgctcttcccaggatccccacatccggcccttcgcgttcagctctcaacgcggagctggggggtcggaatggaggagaaaggcagctggtctcccggccccccagaacgactcccggcggccgctgctaggcctggcccgtgcccgcggcctcagaagctgcgacccggagggcgctcggtgccccgcgccggcccgcccagcggatacccagacccggccttcaactcaccgctctccacctcgctgcctttcttggcggtcgccgcgttccccatgtctggggcgatggcaagaaggggtcagggaagggaaggggggctggggccgtgcccgccactccacagtctgggacaactcccgcgtctgcacccgtcagagcggtgagtgcgcctagcgctggcgccaggagtccgggcgcgaagaccgggccgggtctgaggaaagggctccagcgaactccttagcaccggcagcagcagcggcggcggcggcggcggcggcgacggcggtggcagcagcagtggcggcggcgggcagacactcccccttcgcgcggtccgccctctctgcgcgcccccgggcagccgcgcgcccaggccaggccctggcccgactgtatcttcgcaggcgggcgcgcgcgccggaagtgacgcgcaggcccgggaccccgggggcgggcggtggacccccagctggcagagcctggggcgggggcctgaggtggcgtggaccgcttcttcccccgcggtcgcccgggctggcgctcgcgtgcccatcgctgagatagtgggaggtggagtgggaaccgctagctttgcagaacgcagagtccctcctcaccctggcggtcccggtgccctggagtgcagtcgcggaatactgttcagcggctcgggtggttttccttgcgtcccgccacgcggcggctcctcactaaaaggctgccttctccccacagctccaggtccgagaggagccgcaccgtcgggttggagatcgcgcgcaagggtggcctctgggtctgcatctgccccgcatcggccacaggaaaagcctggtccctaggcacggtcgtggttcgagcttttcgttctctcgcacattgaggtattcgctcagcccaccacgttgtcctcggggttattaggccccagtcacaagccctatgatgttttcagacttcccaggtggagataaaggaaaattttactatttctgcagaacttctgttgatgtacagcattgtatttagcaacttctgtgtagatctgaaaataaatacattaccaattgttagttgcgtttttattaatataaatcttagagtacttgattttgctgttagctttacttaggtaaattatgtggcactctagcatttttgttgttgcatgttccattgaactttgctctgtgttttccatttattccaaattcaaaatagactgtaacttcccaatttattctatgttcccaaggcaccaggcatagtaggtgttttatgaatacctgttgacttgaaatttctcagacttttaaaaaatttttcattactgacaaaagatggagcgataaaaagattcttagtacacttcctattattgccaattctattagtaatgtatactgcattacaacttctatacaagcagtaactcatttgctcctcataagaaccctatgagagatgtggttttactgtcatcattttaggagcaaattaaggcacaaagaagtgacttacccaaggttacacagctattatctggtggaagcaggatttgaaccctggcaattgggctccaaagtctgatcctttgtctataatgttgacaaaaacttgtggatgttgtggtaaattgctttctctccatttgaaatcccattgagttgaagagatagacgcatagtgagtatacgtcccaaggaaatgtattatattgttttctgggtttcagttaattcaaataaaataaaaatagtgaagcaaagatttggactagatgctgtgaggttttgtgtcagcatgcaacagtgtcacaacagtgtcatcaccacgtttggttctgtgttgtggatgtaatattttgccccacatacatagaaagttcaatgaatagcactgaaccacatatataccaaattaaagacaacttttgatattatgtattctagagggaatctttctggtatcagaatattcatactactgtcattgggatgagttttaaatgtatacctttttaaataaatcctctttaataataaaagtggttgtgtgcataatttggcactttaacataattttgaattctaggtctctaataagagggcagccatctacttagtaaatcattaatttacaaaggagacaattgagagctattacgaaaatggatacaatataactatacctgaaaaactaataagtaaagcaaaaaatcagctttacaaattgtctccccttctttctcaatttaactttattattggttaaggaaataagttgttaatgatagagaaaaagtgatcagcaatttaaatttcttgctatttttcttttttctgtataccacttttttctgcttcttatattagcttgcttttgctctgctttaaggaagat

SEQ ID NO: 1724 - DNA, 4001 bp, Homo sapiens
atttcttacatcatgcatattatttgcagcgctacatggtttgctcctaattttatttgtgtacaagaatcctatttgttttgacttcacaataaaaaaaaaacaaaacagcattttatccaatagaaatcatggctcatgatactattttccattactagattttaaaatatgttttagaaagcatcacagatcccatacatttaaaaagtggtgaaagtctagttcaaacataacttttaattattaaaaacccctaacattcatttatttgagacacttttactaaacacccactatatgaagagcaggtattaatgaaacagaaattaattcaattctgtcttaattcctcatttaactttaaattaaaacatacttgaaatgcataaaaataatttccaaaaggatttaaaagactgcaatttaaaagaatagggcaaggacaataattaacaagcttttgttacatggtaaagtttaatattataccactattttaatattcaacagttcattaacttgaagatatatattcatattcctcatccatcaacttgctatacagtaaagactataaataacccaaaaccttttaagtggaaaaaatgcacaaatacatgttcttcctcaatctcccaaaaatagtttgaagaatgtaaaaaaatttctgatttagtaaaaaattaattcaaataagcttctataacactgtcaaggtgctgtataaacctaggagtaaattttgtaagccattcttgattttgctgttgtggttgttaagctgagttttcttccttaactgctaccaaatacataaacagaaagagtcaaacgctagtgctatttgatgatcaaacaaacacaccaaagagggcaaaagtttcaagggtaattctattgttcctctaattggagtcacagaaataccttgaggagggtccaaggtgagatgtagaatggcggcactagtattgtttatatgtgcaatttatcttttagagtgtatggcaccaaaaatggttccccagcaccattttagcaaagctgcaagttcaaacattttaacatgcctgaaagaatgtgattcatgcataaccaacttttcctgcatttgagtcatatgtataaataacataaaatataattataaagtttttgatatccataatgttataagtgtaagaatttagatagaataattatgttttattttagaaattcctgtttgtaaaactgaaataactttctcacatgcatttaaaaataaaaccatggcaaacacaatagaaatgtaattataaattcaagagtcttgttgcccctttcaaagtttaaagcttataaatacaagacattttaagaagtaaacagatggttgtttctgaaacttaagtatttcatttttatgtaagaacaacaaaaaaaagtacattagaaatgatgtaagaattttatagaaaatcttgtcactgatattgaacttagtcaaaaataaaaccatacaatgatgaaagctgaatgattcagctcaacttataatcaagtttttatggaattctttcaacttcatcttgcaaaatgtccttgtgaaaatcagaaaacaacaaacaaaagagggttctttatgtttgattgtaaaactccaattaccattttagttgctagttataatgtatcatttaaaaaacaaaacttacttgatctgtcccataaggcagtatgttcagagaaatgaaggctgtcattttccagagctgttttctgatcatgtgcagtacctttagagtgtctatgaaataaccggctagcaaaaccttccaatttctgaagagctgtagttgtacctgtatactggttacaaggtggttctctataagctgccattcatgtgcatttacactttacttaatgtaactgcaaatgtttccagaaggagctcacaacttcttacacagaagctaagagctatgcatgtgtcaaacttcctgtttgcagggtattcaaaccactactgctgttctgtttcctgttaatataaaacagcacattactgagcttttcttagcaaaacacttttcagctagagttgaggattttaaaaacttgcaatatctgcctaaaaggctttatgtttgggtgttttaatattaatatataggctaatgagagcattaaatataaagctttatatatatagtaggctaaacattctttaaaaagaaaactagttaaacatgtatgacaagtctatgcaaacaactgaaggccaagctgtcctccaaacacaacatgctaaagacaggttgtattttttctaggaaatcaactaatatacagattttatgaatccttataagcagctaacttttcataaaaaaaaactagtatgaaatgggtatgaaaaaactcttgcaaaacaaatttataacacgtataaataaaacaatgtgaaatagcactttaaaaaattgaatgtttctaattcattgatttaggcctaatacatacaggaactacatacacttagtatgtcagtattgcttatcaaacttataatctgctgacatatgtctattaccaggggtacattttaaaacattctaaaatttgaaaagaacaaaatacaagatttaaattatataaaatccaccatagcaagaaatttcaattgagagaaaaaagttccttctagttggctgagacatgttaattttaaaaccttaccactgaagactactacttacctaaacccctgatttagtgatctcacttagaaacacctctctatttttttttaaacgttgtttcactctgtctcccagattggagtgcagtggtgcgacctctgctcactgcgacctccgctcctaggttcaagcgattctcgcccctcagacatccgagtagctgggattataggcgcgcaccaccatgcccggctaatttttgtattttcagtagagatggggtttctccatgttggccaggtcaggagttgtctcaaactcctggcctcaagcgatacgcccgccttggcctcccaaagtgctgggattacaagtgtgagccaccgcgcctggccaaaacatctcttttgattaaaagtaagtaaaacttgccttgtcaattttcaggaaagaaagtaacctgtggcatttaacaaaaattttgagtacttgtttttttgacactaaaggataagaaatttccgtggttctctttggaagcagaggggaggggagggaagggaaggaaaggaaagaaagaaaaaggtctatctaaaacaatctatctaaaaaaatcttacttcagatttactgccaactgtttgacaaacataaaaaatagaaacaatactgataagtaaaataaataggaacaataatgtaatcaaattaggactacataaaaggccaataagaaaacactgattagtgaattttgccatttaacagttcatttgtgtatactttgtgtaatggaattcatatcaatctaaacaagtatgtaacagtatctataagataaacttaaatttatagctttatgtataaatattatgtgtgaataacagttaacaaaacactgaccaatgaattttgccatgtaacagctcatttctgtatactttgttttgtgtaataaaatttttatcaatctaaacaaatatgcaacagcatctatatgacaaaattcttaaatttgtagctttatgtataaatattatgtgtgcataacaataatttgtttcttaacatctggtagtgccttacacaaaacagacacttattaaatgtctgtagtcttcaacaaatatctacagagcatggactgattctgtaagggaagaagtggataaaattactgaattcccttgatttgctctactgaaggaaattctaatcatcttcaaggcttagttcaaatgtcacctcttcagtgaagtctgccacatacttcctaggaaaacaaactttgctgctttgttttcactgacc

SEQ ID NO: 1725 - DNA, 4001 bp, Homo sapiens
taacaggaaaataacaatccagttaattcttagtattttgcatgttaaaatgtccctttaatatctaatattattctataaacaaatatataacagtgtttaagaggtttatattgtactgtagcaggataaagaatatttattggttataatgaggtgatctccagttatgaaagaaaaggttcgtcaattttgaattctatcattatacagcaaaaatccacctttcagtttctaaattccaattccaaatcttataaatgcaaattataggactgttatgttatcagagaaaccatattctacttctcttaaaaatatctgaatcaaaggttaacttccaagcatcttatttaagcaaaagatgctaatgaattatgctctaagcaaatgtttttcactctaacaacaggatatctatttttagctgcaggtttggcttgaagtgacagcttttaccctatgataaactgcagtacatactgtagtatattttttcaaaaaaacagttttggaaatatttagaaaaaataaatcacattataacaaaaaagactagttgtcacaagtgtacttattctaaaaaattatttcccccaaaaactgtttattaaaaattttaacaaaccctacaaaaccaaaatgctctaattatttcatcattaaatccttatttctcaataaattgtaggtaaaagcaaccaagacatcaacaaaattctggcagcatcttattttcaaaattactatttaaaaaatctaataaaaataatctaataaaaattagcattaggaatgacaaagctaatcaaaggaaagttaaactaattatcttcaggatcagatactaaaagaaaatcctctcttatggttagtctacttactaatttataacacaattaataacagtgcccaacaaatacaataaatcgaaccataaagaaaattagaaactgattattggtattgattattaatagtgccattaattgtttacagttcttactggtttttgaaggcaatttactataatgcctaagtacaaaagcgtcaccacaaaatataattcacagtagctgtggctttataactgtccctttaaaaatattttttcctcttataaatatattttttaaataaacagctgcagagtctcagagagcatacttaccactcatgatgaaaaccaacctttccaaaacatattgctcaaaataacaatccaacagcaaagggagttatgctaatctctagagggagaagaaccgatggtgtaaacacacacactggagcatgcagcacacagaaaacgaaaagagctttcttttgttttaaaaagagaagcccctagaagcaaagcataactgcctagcatgagatatcactagtaaacatcagattaatgccaaagatgtctataactagactgaatttctttcaagctagttatcccagcctccttcatataccactagaacaactcaaaatggcagggagaaaatgttcgaaccaggatgtataagatgttctcaattatatcagcatgagttgttaccacggcaacattagaccagaattatcggttcacttgtatccaaggcgtagcttttctaaagctttaatccaccagacaaataaaatacctttttattttagagccacatgattataaattaccagatttcttaaatttaagcactaatctacgctttttacatctttcaaagatatgaaaaaattgctgttttcttcaaatactcacacaatcccatgttgaacctggcaaggagcaaacagcagaatgattgcacctaaacgtctttcaattacaccagctcttactgctagctgtggacctcactgatattaaaatgctgtgtgctgttgctagtgactattggcgatgaatcttattgccgagatcgctgatagctttcatttttcatgagccagaaagctatactgcagcacaaatgttaaccatttaaacattctgtgttatggaagagaataatattatatacatatatgtatatctgcatttttaaaggagaatcatagaataacttatttgtaaacttccattaaattcagcattacaaacagtgtcagatgccatccatgtggtattcaaaagaaaataatacacaaaaaagttactggcaattattgcagaaatgtaaaattcctcacatgaaacaggactaagatgacagattgtatagcaaggtgggctgactgggtagcatggtgaacagattgttttgattaccagagatccaaaatttgtaccaaaatggtacaaagaatctatagaatggttccttgttaagtagaacttcagcacgtgaacttgccattttaacagttgccatgtgaggcaggacttttggtgatgtggaagtaagtcaggaaatcttcctaagaaacaactatgaagctgaacagaattatcaaaaacaatgatttcatggctctggaaatcgagcagtcataaacaacaaattaagaaacatttatttgtgacgaaccactgaactctgcctaaaaacagtgggagtcagagatgttcttgcctggggctgctcccactcctttatagctcagtcaggagagtacttctaccagggtagggctggtcatgaaaactagcagcttcacttctggaaggggctgacatgagagggggctgatttgatttgaagtggaggccaaaaaactcattagtgatattgtcaacgaaaaaagcaagctgaaagaaattaacagtctaaggctatggccttggtagggctaagcaacacattggtggtatagcaagaaacatagcatggggtaaatgaagatgagacagacagaggctacgtaagttcaccaggccacccagtctgcccaccttgctatgcaatctgactaggaggtaatgacaagcacaaaggacacgaaagagggcccagtggaaagttaaagctggtacagacttccgaactgcctaaatactgcatgtgctcctcaatttgcacacagttccatcagcactggctggtcccagtgtttgagtacaacctctgatcaatcattaaataacaattaagctacagagacacagggcaatccctaggaaaccaggttaaaaaataaaaattagaataagaagaaaaaactaagcagagaaatcagtagtcacatatcatgagggatacagattccatagattaagacaaaggaagtttttaataaaaaaataaacaaaaccaaccctcagggaaaaaataatcaaaacccagagctactaccacatgttattttaaaaaacacatttttgacaaaaacttgtgtgatccacaatgaggaaaaaaagcagtcaataaaaaatgtccctgaatgggcccaggtgtagaatttagcagacaaaggctttaaagactttaaaatagctattatacatatatgaaaataattaaaagaaaattgtgttaaatacctaaaggaaaacacgacagtaatgaacaacatatagaaactttcaatatagaaagaaaaactatttaaaaataaaaagtgcagatttgaaaagtataataaccaaaattttaaaactcagtatagtaagcccaacagcagatttaaaagagcaaaagatcaaatcagtgaactggaagatagatcaatggaaatcatccagtcggaagaacacagaaaaagacaggagaaaagtggacagagcctgagaaacttatgggatatcaagggaaccaacatatatctcatgggaattagaaaaaaaggagagagacaaagggtgatgaaaaaacatttgaaggaataatggctgaaaatgtcccaatttgatggaaaacagtaacctatggatccaagaagctcagccaatgccaactagaataaaacccaaaagatccacactgagacatatcatagtcaaattgttgaaaggtaaggagaaaagtcatgaaagcagcaagagaaaaatgatgaatcac

SEQ ID NO: 1726 - DNA, 4001 bp, Homo sapiens
taggacacttaaccatttatgacatgattaaaatcagttgaaattgggcattctcgacaaagtcagaacacctagttgtgattactatgattatttgtggtataaaatggctagaagggaaagccaatatgatcaaatatatcaaatgctatctacaatgcatagctttttaaagaaaaataaagcaatagtgaagcaataacattttccttcagctaaatccaatccatcctgttgtaaaacctccagaacaccatggtggttacctaaagattctagattatatgccaaattttcaaagagaaaatatgcattggcctgattcaaataaatatatgtatgacaaccaggtatattcagtttgatatccatagaaatcctaaggaatgttaagttgtttttgtaatattcgttcaaatttaaaacagcagattatttaaaacagatctatttcagtaacaggaaaataacaatccagttaattcttagtattttgcatgttaaaatgtccctttaatatctaatattattctataaacaaatatataacagtgtttaagaggtttatattgtactgtagcaggataaagaatatttattggttataatgaggtgatctccagttatgaaagaaaaggttcgtcaattttgaattctatcattatacagcaaaaatccacctttcagtttctaaattccaattccaaatcttataaatgcaaattataggactgttatgttatcagagaaaccatattctacttctcttaaaaatatctgaatcaaaggttaacttccaagcatcttatttaagcaaaagatgctaatgaattatgctctaagcaaatgtttttcactctaacaacaggatatctatttttagctgcaggtttggcttgaagtgacagcttttaccctatgataaactgcagtacatactgtagtatattttttcaaaaaaacagttttggaaatatttagaaaaaataaatcacattataacaaaaaagactagttgtcacaagtgtacttattctaaaaaattatttcccccaaaaactgtttattaaaaattttaacaaaccctacaaaaccaaaatgctctaattatttcatcattaaatccttatttctcaataaattgtaggtaaaagcaaccaagacatcaacaaaattctggcagcatcttattttcaaaattactatttaaaaaatctaataaaaataatctaataaaaattagcattaggaatgacaaagctaatcaaaggaaagttaaactaattatcttcaggatcagatactaaaagaaaatcctctcttatggttagtctacttactaatttataacacaattaataacagtgcccaacaaatacaataaatcgaaccataaagaaaattagaaactgattattggtattgattattaatagtgccattaattgtttacagttcttactggtttttgaaggcaatttactataatgcctaagtacaaaagcgtcaccacaaaatataattcacagtagctgtggctttataactgtccctttaaaaatattttttcctcttataaatatattttttaaataaacagctgcagagtctcagagagcatacttaccactcatgatgaaaaccaacctttccaaaacatattgctcaaaataacaatccaacagcaaagggagttatgctaatctctagagggagaagaaccgatggtgtaaacacacacactggagcatgcagcacacagaaaacgaaaagagctttcttttgttttaaaaagagaagcccctagaagcaaagcataactgcctagcatgagatatcactagtaaacatcagattaatgccaaagatgtctataactagactgaatttctttcaagctagttatcccagcctccttcatataccactagaacaactcaaaatggcagggagaaaatgttcgaaccaggatgtataagatgttctcaattatatcagcatgagttgttaccacggcaacattagaccagaattatcggttcacttgtatccaaggcgtagcttttctaaagctttaatccaccagacaaataaaatacctttttattttagagccacatgattataaattaccagatttcttaaatttaagcactaatctacgctttttacatctttcaaagatatgaaaaaattgctgttttcttcaaatactcacacaatcccatgttgaacctggcaaggagcaaacagcagaatgattgcacctaaacgtctttcaattacaccagctcttactgctagctgtggacctcactgatattaaaatgctgtgtgctgttgctagtgactattggcgatgaatcttattgccgagatcgctgatagctttcatttttcatgagccagaaagctatactgcagcacaaatgttaaccatttaaacattctgtgttatggaagagaataatattatatacatatatgtatatctgcatttttaaaggagaatcatagaataacttatttgtaaacttccattaaattcagcattacaaacagtgtcagatgccatccatgtggtattcaaaagaaaataatacacaaaaaagttactggcaattattgcagaaatgtaaaattcctcacatgaaacaggactaagatgacagattgtatagcaaggtgggctgactgggtagcatggtgaacagattgttttgattaccagagatccaaaatttgtaccaaaatggtacaaagaatctatagaatggttccttgttaagtagaacttcagcacgtgaacttgccattttaacagttgccatgtgaggcaggacttttggtgatgtggaagtaagtcaggaaatcttcctaagaaacaactatgaagctgaacagaattatcaaaaacaatgatttcatggctctggaaatcgagcagtcataaacaacaaattaagaaacatttatttgtgacgaaccactgaactctgcctaaaaacagtgggagtcagagatgttcttgcctggggctgctcccactcctttatagctcagtcaggagagtacttctaccagggtagggctggtcatgaaaactagcagcttcacttctggaaggggctgacatgagagggggctgatttgatttgaagtggaggccaaaaaactcattagtgatattgtcaacgaaaaaagcaagctgaaagaaattaacagtctaaggctatggccttggtagggctaagcaacacattggtggtatagcaagaaacatagcatggggtaaatgaagatgagacagacagaggctacgtaagttcaccaggccacccagtctgcccaccttgctatgcaatctgactaggaggtaatgacaagcacaaaggacacgaaagagggcccagtggaaagttaaagctggtacagacttccgaactgcctaaatactgcatgtgctcctcaatttgcacacagttccatcagcactggctggtcccagtgtttgagtacaacctctgatcaatcattaaataacaattaagctacagagacacagggcaatccctaggaaaccaggttaaaaaataaaaattagaataagaagaaaaaactaagcagagaaatcagtagtcacatatcatgagggatacagattccatagattaagacaaaggaagtttttaataaaaaaataaacaaaaccaaccctcagggaaaaaataatcaaaacccagagctactaccacatgttattttaaaaaacacatttttgacaaaaacttgtgtgatccacaatgaggaaaaaaagcagtcaataaaaaatgtccctgaatgggcccaggtgtagaatttagcagacaaaggctttaaagactttaaaatagctattatacatatatgaaaataattaaaagaaaattgtgttaaatacctaaaggaaaacacgacagtaatgaacaacatatagaaactttcaatatagaaagaaaaac

SEQ ID NO: 1727 - DNA, 4001 bp, Homo sapiens
gaccccatggatggtcctcccgccccccaacagttcaacctccatgtgcccggctgagtcctcggcgatcagaaacgtgtggcagatgagacgcagcccccgctgctacacacacgagagcaggtcacaagcacgggaacttctcaggatgctcagtgggcctctccactggggccattgacagccctggcaggtccccaccagaccccgtggaaggtctggggcacccagtgtggatgggctgggctctcaggcaccctgtggacactgggctgacagatctgattaactgggagcctcggaaacatcgcagcagagcccggagcccagaggtgagtctgggaggtgggaccaagctcggagttgggcagaggaacacacaactccttacataaccaccagtggctctgaagtctaggaagacggtcggagaagggcccccactgatggctgatgcagctgggacaggaacgcggaagatgtgtgccgatctggccgagacacagacacaggtaccacagccggccccggcagcatcaacacgaaacagcttctggggggcagccggtggcccctccaatctgtccccatcccagctctgactcacccaccgagggccatcagaccaaaagccagtaaccgctcgaatcctgaccctggccacggcgctcccaccccagcagtgtattcacaccgcaagggatcgtgccagctgtgcatggccagcgtgggctcacacgaaagcagaggccaagccgtcccaggcaccgaggaaactatgacacagcacgtttctcctcgcaggcaggcgcacgtgtgaaaaccaccccagctccgtctctctcccactcaccccatcaacacagaatcttcatcactcaaggacccctgcggcccaagctggctgtgcggagcagccctgcgtctgctgaggtcccttcgcacctgggggaggggcgcgctgccagcctccccagcagccagcaccccccgagagggaaagccgcctcccccagcagcccagtccccaccttcagcagcccagtctccccaggcccacggctccccacaagcctgactggggaggctggttgttgttttggttttttgttgtttttttttttaaaaaaaacaccttgcaaaatggtcgtcagaaaagcacccacattcccacatccctgccaaacaccatgcagcccccagacccctccgagtctacctccaaccatttcagaatagaaaacaggacgccgcagccccgctcctcgccaccatccgaggaccccgatggagtgagccgtgcacattaaccctggctgtgccacccagactccaacccaacactgtcaatgcaaaacgggggctcagacaggcgggagggcaggctcgagacggaaagaccgcaggcctggaacaggtgctggctgttaccactaccagccctggcacctggggtctccagacttcacccgtggtctcatcaatctgcccacctgcagcaatgcagaatggagacgaagcggccatccgtcctggccccgacagacccacagacccacaaccaaaaagcatcggccacagtgaaactcccaacagccagcaactccctggggccaggcaggcagacgagcccaagacgatttccccaagccccccggcccccagccctccacagccaccgccacacatccaccaggcctgggccacacaccatccgtcctcggggtgagcatgtccctccagcagcccctgcctcgctcagaaggtccctccacagccttatttttctaaaaatctgtcacccgcaaaacaacagcctctcactgcgtttcccctgacattgctgggagctgctgcagccgcacgccttccccgggccgtggcaccagccgtgttgctgcccggagcatctgtgcagcgcacaggcagcggcaacgccgggactcagacccaaaatgctgactcgggcaccgtcctccgcacgcacagggcctgcagcacggctggcccggccccgggggcgcggaaaatccacgggggagatgcccccgactcaccggctttcttctcctgcctcctcagcgcagattctttatgctctgtgcgcggcgggcgtgcagggaggcatcttccttcccgttgacgagctgatgctgcgtcggctcgcctccggccccgacaataggcagggaggctcgagcgcgaggagcagatatttaacggaaggccggctgtcctgtcccccgcccctcacatccctgcctcctcatgtctccaggcccgggtggtacccggctcccccgggaagctgtagccagcagctgaggcacaaactaaaacacggcatggatgtgcaggagctgacgctgacgtcacaggaaaacaagcatctctgcatcagcacagtccagagagcgggcgggcagcagccagacccaggcagggctcggactcagcggaccttgaaaatgcgacatcagaacagaacccagctaagcccggggtcctgcaggttggcctgccaggctgggagtgggggacagcgcagctgtggccgtggcgagtgacctctgacctgcgtccagaggctgtgaatgggctcgacaccaatggccaagggccccgagcactgtcccgcagcccaggaacggagcgggaggagaggaggcataggggccttgcgatgtggttgtgtccaccccacaaaccccaccagtgtgtgtggggacggtgggcactggggggcaggaacaggaaaggccaagcttccccaggctgaaaactgtcccggctggcctggaaacgcacaccctcagcctaaggcaggagacacccgcattcccaagaccagacctcacgggctgtgctgtgcctggctgtggccagcccgggctcctagggagacccagagccgccaccgccgctgggtggcctgaccctccaacccctaccctggtaccctgacaaaccctgggacctggtcatcactggcaagtgagacctggcattttcctccaatcataaaaaacatggggggtcgcggggtgctcagctgggaattctgcccacttccccaaacgcactcggcactcgtgctgagcctacatgggccgcttcgcactgggggtgcagagggacagaggggagtgtcctgcagacctctggctctgaccagtcacaccacacgctccctgcattcatacgtgctgtgccctcgatgctccagcacctatggccctgctgaccctggagggacggccccgagaggccaaccgattcctagagacagcaaaggacttgtcccacagcgaacctttcaaatgcaaacccaccaacccagaactctcacctgggcccacctcctacacgggcccccagtcgccccaggggcctccccaggtcacagggacagcccctgcaccccagagcctggctgaagttactccacctggccgacccaatgcctgctccccacacctttcccatggaaaccacagtaaaggccccacccacacatccccctgcctccaacccacccggcgcttgcccgcatggccccgcgaggcaagaggaggtctcctctcagaagctgagtaataaacgaccttctcaacggcatcatctcctgatggctggcctcccacacctgcctgaacagtaataaaacctccatttaaatcatcaagctcataaacctgtgtttatctgcattcacggagtggactccgggccagagccccgggttcaaattccagctctgtcagcagctcaccacgaggcacggccacttctccaaagggccaagcttccctcgtcaggcggctgaccagctgcatgaggggcattccgtaaaatgtgaaacatataaacctaacacatgcgtttcactcgacttcccaaatctatggggaacgagggctggcaacctacactgcctagtgctccaaatcagcaagctaggatttctacgcttttaattggctgaataaaatgaaaaggat

SEQ ID NO: 1728 - DNA, 4001 bp, Homo sapiens
gaggtcctcgcccaccggaggggcttgctgagagttacctggcctggtgacacacgtggaggtcctcgcccaccagaggggcttgctgagagttacctggcctggtgacacgtgtggaggtcctcgcccactggaggggcttgctgagagttacctggcctggtgacacgtgtggaggtcctcgcccaccagaggggcttgctgagagttacctggcctggtgacacgtgtggaggtcctcgcccactggaggggcttgctgagagtcgcctggcctggcgacacgtgtggaggtcctcgcccactagaggggcttgctgagagtcacaggtatcggctggagtgcaggttgccaggagccaggcagggtgtgcacgaggcctcactatgtaattctctctacttctgtcagtttggcatttttcctaataaaaacttttcaagtaccaagccgctcagttctgccttttgatgtttggatgccttggctggagctccacctcccttccctggctctgggtccggccctgtccttccctggctctagggggctttgtgtccacaaaatgtcaggctgctccatcagccacagggggctggggggacaccccatcgaagtcctgggcgaggccctcatctcccaacaatcctgaggacctgtctggcatggccaggagacgtggaagggccacatgcaaatgaggtggcacctcccacacagggcacaaacgcaggagccccctcatcctcagggggtgccactcgtggtcccagcatgtgtgtgtgggggggtggggcctcatccaggcctggtgggcagcccctcccacctgagacctgagaataattctcatccgacgatgacaactatgtgtctgaaagtgaccttcccggcatcacctggtcatcacccacagcagctcccaggggcacgcagccaccctgctcctcctgacagctctgtgactacttcaccccaaattcattttgcttagacatttatttgaaaaaagacctggccaggagtggcagctcacgcctgtaatcccagcactttgggaggctgaggtgggtggaccacttgaggtcaggagtttgagaccggcctggccaacatggtgaaaccccgtctctactaaaaatacaaaaattagctgcgcatggtggcaggtgcctgtaatcccagctactcgggaggccgaggcaagagaatcgcttgaacccgggaggcgaaggttgcagtgagctgagatcacgccactgcactccagcctgggcaaaagagtgagactgtctcaaaaaataaataaataaggcctaacgtgacccttggccaaatgcctagtgcacttacttctactcccggatgggccccgggcaccctcatgaccaagccccaacctcagggcctttcaagagttgcgtctacaaacaccctgcaggccctcacccccaggcagggacaaaccagctgctggggtcacctgctgggcggcagtgccggtacacagcgcaagagctgtctcctgacgagcaggtttggaaggaacagcatggccgtgacgcagtgacttatgccttcaaagccacagggatgggaaattgcttcatggcacgacagacgtgtgctgtgataaggggttactcgttctcaacaatgttggctatgcaagcgtccttgagaagtctgaactcacaggggagctgtcacagatcaaggtcaacaagccagggtggctgtcggggtgaggccggccgcgccctcctgaataaaaggcctgggtgctgtgtaatgaggtgtgaagaataaaggctactcaccctgaaaactgctcttctctctctgaagacagcacacactcaccagtccccgctcacaccgcaacacccggcgaggaagcgccctccaactctccctttcgtgctcggccccggggggcagcagtgagccccgcaggccagcccgctgcgtcctgcctgtctggcaccgagcgatgttctgaccacccctcgccagggcaggcccagcctccctctctcctcccagtccccacccacactggcttcccctggatgctccctgcctgggctccaccccagggcctcatcgcggccatcccctgccacctgggattgtcccctcccagcctcccctcttagggcccttcccaccattcgcgccactggatgcctctggggctcccctgtctgtcccctcactcctctagaacacatacccctcgcagaccgatgctgctgtactggcccctgaactggacacagaggccctgaggttcaggccaccttcttcccctgcagctctggggcaagcactggcgtctatccaaccaccagccgtaaccttccctcagcccgtggggctaggagtccaggcttcagccaaagaaatcgcaaccaagagttggaccccctttttgatgttcgactgctggaggtgtttgagacgacccgctcccctcccgcccacatcccagtgaggtgatgagggccctggggaaagttcaaaccctgcaagcctcagcccctgctcaccccgccttgccccagagccgccacggaaaccgagacagtctccttacaggcgcgctcaagacctttctggaccatcctggaagacccccctcccctgctctccccagaaaacctcattatgtggtgagaagctccctcccgtctgcgtgcggtgctgtcatctgtgtggacacctgagccaaatgttgggcaggggtccatcccatctcttcagggtgaccagtgattacaagtgaacagctggcgtccaggccaggaggtgtttaaacgggggcgcgttgcccttcacccctctcctcccactgccgcctcaggtgcagcccccagagaccacagcagcttgtggagaggggagcggccagcactcacccgccgccccagaggcccttccttcccatctactttgctatccctgttttcccttctagacagtcctctctctctttctctgttgcccaggccagagtgcagtgttgcaatcatagccctgcagcctcgacctcctgggctcaagcgatcctccctcgtagctaggcctacagacacgcgccaccgtgcccagcctcacgcttctcttcaaggaagcggggtttgtgctgatgaggaaaagtacatgactgcatgactgatggagcttggagggcttctttgggctggggtgggggcagctttccctgcggagcacctgtgtccccctcccaggccttcccgaggcacacgcgccactggacgtgccagctgctgatgaaccatcccccacactctgtgtaactgtgtcttgaactgataaataaatcagtcttgataaataaacccttactactgcggcagctgtgtcggccgctctcccggggaagcctttcccagtcactggggctacgacttgctttttggagtcctcttagaacaaggccgggtgagaacatcagctgctgtttgtccacagtgtaagacccactgtggaaacagagatatgagtacaattcttgccccccaaaaaccccacagtctagcccggcgtggtggctcccagtactttgggcgggcgaagtgggagaatcacttggggcattccagaccagcctgggtaacaaatcaagacccccaactctactaaaaataaaaaattagccaagcgtggtggtgcgcgcctgaagtcccagctagttgggaggctgaggtgggaggcttgcttgagcccagctgcagtgagccgtgattgtaccactgtactccagcctgggcgacagagcaagaccctgtctcttgagagagagacagacggggggaggggccagaatataaaaacagtcaagagtccaaagggtaaggcccctccagcccctaggtttctgggccctgtgtctcctggttctgaaccaatccgtgacgcaggagagttgggggttgggggaggagacttgcatttttagatctctttctacaaa

SEQ ID NO: 1729 - DNA, 4001 bp, Homo sapiens
gggaagaggagggaaaacaacagggaaggagggaggaagaggaaggggtggggagagaggggagagagtccgggaagggagggaagaggaaggggtgggagcctggtctctccagcctgggaaaccagagtcaccgggtggaattacacccgccccaccaccaaagtgctcccaggggccaaagcaaggcagagggaggacggggcggcccagaactccagtggcattgcctccgagccttggtcccaggaattggacgccggaatgcaggagggtctgggcccctgcagcccctcgggtgtggacctccctctcgcaggactcccctgagctccgcaccatcacctgttgcccagtgtggtggctccagaatggcaaggagacaggaagcccaggtccctggacaagtccaatagccagaacgtcaaccataccaagttttaacctgctgacctccaggccaaaagacatggctgccctacctcttcaggtagggctggacggtcagtcccccagaaatccctttcttctggttctggcaccaaacccgggccactgcaccccgaaggttccaggtgcttgccacaggggagctgcagaggccccaaccttcccaaagaagagacaattgagcctcctcaacaaacccggggccaagcagccccagatggctgacccgagaccccaagacaaggttcgcaggaagctgaacccgctcagactcgcagggcaccatagagacccccggggcactgtcctgagaggacgtggcccggggaagttgtcacccgcctaaccctgccggccgtccctgcctctggggctcaggttgcccacgctgtagctgaggacgcaccggggcaggagcagcttttcgagatcccaaggaccagccagtgcaagtccggagcccgcattctgctcccctccctctctgcagcagcagccaccctcgcgggagcggaggtcccagttcggggctcctggagacgcgcacaggtggaagaacaaacccacgggtcctcccctccccaccgcccacacttcggggggcagcgacccctccgctgtgcctgtgagcccggccacctggtgcagcccccgccacccccagcagcgctgccccgaggcggcggccaagagtccaggacccctccgctccagcacctgaccgcgccccctcccacagccaggcaagggcctccggggggcgggtgcgacgcaaaccccagggtcagtctcggccccaccgtctcctccagaaacccctgtccccgcccgaccgccccgagccctgccgggggctgcattggagccacagcgcccgcgccccgggtctccggattttggctaaagcgagacccccgaccgggtaaacgtggagaacgtttaggaaacgctgattttaagaaacccgccaggagttttcacaacttgatgaaaactttcagtccttacaggtttgcggccggaacgtccccgcccaactttccagcgaaaacgtctaccacaatgaccgggccgaggagctcgcggcgcggggccgaccccagggaaacccggtcccggggaaggagcccgcgctgtccacgacgtgtccgcgggtgacgctcacgggcggggaccgaggacctcccgcgacagccccgggcccgcagcgacctcgccgccccttccctctctccctctcgcgcaggagccccgacggctgagccctccccgccctccctgcctcacccgcgccgctccccgccctctccgccgctcaccccccgtaatgcgccttgaggcggacgcggccgccgctcccttccatcttggggccggtcctgctgggcatggcgcgctccccccgccgccgtcagcgctgcgccccgggagctccggccatggcgcggggcgggggctccaggtggggccgcggcggaacgcggaaggcagcgctcaggaccgacggcgccgacccggtcaactccgcggaactccggcggcgcgcggggcgggagcggggggcgcgcggggcgggaccgtccggcgggggcggggggcggtgtccgaacatggcggaccgaggtggagccagcggccaatccgcggggcgggcggtcccggggcgggcggtggcacctgcggccaatgagggcgaggcggggccgccacctgggccaatcctcgggggacacccggccgcggcccaatggcgaggcgcgggcggggctacctgtcgggcggggctacctgttgggcggggcgcggcgcacctgcgccaatgggaccgcgcgcggcgcggctctgcccggcaaccggaggggccccggcctctgggacggagcggcgcccccgggaactcgctggaaacgcgagttctcggccttcgcccagaccctccgaatcgaaactcctgcggcgcgcgctgccagcccgagggccccgccgtccaggggtcccctgacatctcacacttgcggactgaagctgcgaggagcggagaacccggccagggtcacggacgggagcgtccggactcgggttctctgggccccagcccccactccgcccccagcgaatccaaggtcccctgtagggaagggccgtccacactcgtgagtgcaaccgctcacttcgcccaggtcaaggacgcggcattggcccgagtcgcccatgaccttcatttctgaagccacagcctctcgggccttactcgaggggcttgatctggacaatcgccctccaggcccctccaccgccgcccagctccctgcctcctgggctcctcccctgaaaatacggttttccctgatcagcccatcccttactggctgcatccactgaagcccagacctgctgcctgcaggacctcacccaggcaccaggtggacacccagacccagttcctggcctcggcccctctcccctgagagtggacctgctcaggccacgccctcacacccctcacccagacacagccaccaggacttcagccacgtgctttcatcccgcaggtcgtgcctggcgcctccttgatgccaggccctggggagacctgtggccacagaacccatgttctccctggagatggacaggaggcccctctcctacgcagaagctgtcgttttttcttcttaaacaccgtttgcccctccctccacccaccgagccatctctgcccctctctacagcaaagcttccgccaagccggccctgctccctgtctacctctcctgccaccacccactcacacgttttaaatacaagccgtcggttctcagacgttttctctttttttctttctttttcttttttttgagatggagtttcgctcttgctgcccaggctgagtgcaatggcatgatgtcggctcactgcaacttctgcctcctgggttcaaaccattctcctgcctcagtctcccaagtagctgggattacaggtgtccaccaccatgcccagctgatttttgtatttttagtagagacggggtttttccatattggccaggctggtctcgaactcctgacctcaggtgatccacctgccttggcttcccaaagtgctgggattacaggcgtgagccactgtgcccggcctcagacattttcttaacttggcctttggtatcagacccctcctgggaaggctcacacatccctggccccgggttccagctccctaaatctcccatccctcgccctcctggtctgcagcttttaaaactgtggagccccagcctcagcctttggcccgctttgcatccccagctcagatgggccccctgagctcccaaccaacactcacccagccccaggcatcctcctaatgagcctctcagctgacgtcttcccccactccatctttctgggtcatcgaagtccccccagtggttcccatcactcctggagggaaggccagctcctctgccccggcctcgaggcctctttgctgccccggcctccgtctttgcacggccactccctctttgcacagccactccctcttccagg

SEQ ID NO: 1730 - DNA, 4001 bp, Homo sapiens
tgggaggtgggaccaagctcggagttgggcagaggaacacacaactccttacataaccaccagtggctctgaagtctaggaagacggtcggagaagggcccccactgatggctgatgcagctgggacaggaacgcggaagatgtgtgccgatctggccgagacacagacacaggtaccacagccggccccggcagcatcaacacgaaacagcttctggggggcagccggtggcccctccaatctgtccccatcccagctctgactcacccaccgagggccatcagaccaaaagccagtaaccgctcgaatcctgaccctggccacggcgctcccaccccagcagtgtattcacaccgcaagggatcgtgccagctgtgcatggccagcgtgggctcacacgaaagcagaggccaagccgtcccaggcaccgaggaaactatgacacagcacgtttctcctcgcaggcaggcgcacgtgtgaaaaccaccccagctccgtctctctcccactcaccccatcaacacagaatcttcatcactcaaggacccctgcggcccaagctggctgtgcggagcagccctgcgtctgctgaggtcccttcgcacctgggggaggggcgcgctgccagcctccccagcagccagcaccccccgagagggaaagccgcctcccccagcagcccagtccccaccttcagcagcccagtctccccaggcccacggctccccacaagcctgactggggaggctggttgttgttttggttttttgttgtttttttttttaaaaaaaacaccttgcaaaatggtcgtcagaaaagcacccacattcccacatccctgccaaacaccatgcagcccccagacccctccgagtctacctccaaccatttcagaatagaaaacaggacgccgcagccccgctcctcgccaccatccgaggaccccgatggagtgagccgtgcacattaaccctggctgtgccacccagactccaacccaacactgtcaatgcaaaacgggggctcagacaggcgggagggcaggctcgagacggaaagaccgcaggcctggaacaggtgctggctgttaccactaccagccctggcacctggggtctccagacttcacccgtggtctcatcaatctgcccacctgcagcaatgcagaatggagacgaagcggccatccgtcctggccccgacagacccacagacccacaaccaaaaagcatcggccacagtgaaactcccaacagccagcaactccctggggccaggcaggcagacgagcccaagacgatttccccaagccccccggcccccagccctccacagccaccgccacacatccaccaggcctgggccacacaccatccgtcctcggggtgagcatgtccctccagcagcccctgcctcgctcagaaggtccctccacagccttatttttctaaaaatctgtcacccgcaaaacaacagcctctcactgcgtttcccctgacattgctgggagctgctgcagccgcacgccttccccgggccgtggcaccagccgtgttgctgcccggagcatctgtgcagcgcacaggcagcggcaacgccgggactcagacccaaaatgctgactcgggcaccgtcctccgcacgcacagggcctgcagcacggctggcccggccccgggggcgcggaaaatccacgggggagatgcccccgactcaccggctttcttctcctgcctcctcagcgcagattctttatgctctgtgcgcggcgggcgtgcagggaggcatcttccttcccgttgacgagctgatgctgcgtcggctcgcctccggccccgacaataggcagggaggctcgagcgcgaggagcagatatttaacggaaggccggctgtcctgtcccccgcccctcacatccctgcctcctcatgtctccaggcccgggtggtacccggctcccccgggaagctgtagccagcagctgaggcacaaactaaaacacggcatggatgtgcaggagctgacgctgacgtcacaggaaaacaagcatctctgcatcagcacagtccagagagcgggcgggcagcagccagacccaggcagggctcggactcagcggaccttgaaaatgcgacatcagaacagaacccagctaagcccggggtcctgcaggttggcctgccaggctgggagtgggggacagcgcagctgtggccgtggcgagtgacctctgacctgcgtccagaggctgtgaatgggctcgacaccaatggccaagggccccgagcactgtcccgcagcccaggaacggagcgggaggagaggaggcataggggccttgcgatgtggttgtgtccaccccacaaaccccaccagtgtgtgtggggacggtgggcactggggggcaggaacaggaaaggccaagcttccccaggctgaaaactgtcccggctggcctggaaacgcacaccctcagcctaaggcaggagacacccgcattcccaagaccagacctcacgggctgtgctgtgcctggctgtggccagcccgggctcctagggagacccagagccgccaccgccgctgggtggcctgaccctccaacccctaccctggtaccctgacaaaccctgggacctggtcatcactggcaagtgagacctggcattttcctccaatcataaaaaacatggggggtcgcggggtgctcagctgggaattctgcccacttccccaaacgcactcggcactcgtgctgagcctacatgggccgcttcgcactgggggtgcagagggacagaggggagtgtcctgcagacctctggctctgaccagtcacaccacacgctccctgcattcatacgtgctgtgccctcgatgctccagcacctatggccctgctgaccctggagggacggccccgagaggccaaccgattcctagagacagcaaaggacttgtcccacagcgaacctttcaaatgcaaacccaccaacccagaactctcacctgggcccacctcctacacgggcccccagtcgccccaggggcctccccaggtcacagggacagcccctgcaccccagagcctggctgaagttactccacctggccgacccaatgcctgctccccacacctttcccatggaaaccacagtaaaggccccacccacacatccccctgcctccaacccacccggcgcttgcccgcatggccccgcgaggcaagaggaggtctcctctcagaagctgagtaataaacgaccttctcaacggcatcatctcctgatggctggcctcccacacctgcctgaacagtaataaaacctccatttaaatcatcaagctcataaacctgtgtttatctgcattcacggagtggactccgggccagagccccgggttcaaattccagctctgtcagcagctcaccacgaggcacggccacttctccaaagggccaagcttccctcgtcaggcggctgaccagctgcatgaggggcattccgtaaaatgtgaaacatataaacctaacacatgcgtttcactcgacttcccaaatctatggggaacgagggctggcaacctacactgcctagtgctccaaatcagcaagctaggatttctacgcttttaattggctgaataaaatgaaaaggataatattttgaaacaccggaagagtctataaaattcagatttcagcgtgcataaagtttcactaggacacggccatgcacctccttgggtgctgcccacgcctgctcagaaccccaggcttcaactacctggccctggacagaagcagctcgcagacccctggctaggcctataaaatcataagaccaccgaataccatggccacgctgagctcccacaggaaatacgcatttatcctggtccagtgtaaacttcacacagacggccggctcagcagcacgaccactgtccttcagccaactcctctcttctaatccatcccaaaatatccagctttgca

SEQ ID NO: 1731 - DNA, 4001 bp, Homo sapiens
tatgggacatacaagaaatattttttggttataatagtagagacaagaatttttaaaaatccatactatttctttcaggtctctctcttaaatgcaccttctgagtttcttaggtatgctgtacaattacaaagtccattttacttaacggattaatgtgttcatcaactttagcaccctatgatgtatgtggtcagagtaatgagaacagggctatttaaactgcttcctcatatccttccccttaattaccagtagtgaagtttacctagaaaacaatgaggaagaagtaccatagcctacaggcacctagggagggggaattaattcggactgagaaaatatggctctggagagatactaaagtcgtactggaaatgtatgaagtctaaatgaacccctttctccccagcttcagacttagataaggtgtgaggtgtcagggatgtgcatggacccttcaaaaactgacattttcatccgtgttcttccccctcactcccccgcgaaacaaaatatacggaaatacaagtgcttggtactacatgcttttgaggctaaatgcccaataataagcacgctgtatccgttgttgagggggatcactttttaagtaaacatcaccagaagaatctcttcaaatggagaatgaagtcactctccctccctagaggctatgagggaaaagggggagatattccccctacttgcacgtgggatctccctttcccctccgacctcgctacgcctctcccacgcaggtcaggctgctttgggaggtagctgggagaaaaggcaacgctcagtcctccatggcaaagtctttggtcttctcctcctggtctcccactttgtagcgcagcagcacgcgcaggcgacgggggttgtcccgggagggcagcagcgtgatctctcctgaaacgtccgtgtcttgctccacttgcaccggctcgttcaggtagaggagcgcctgtttccagtgagtggccgggtgaaaaggcgaggtggacagcaccaggggtttctccgactcccctccagggaaggtcacctggaaccagatggcaaagccatgcatgggcgccgagccatagcagctgcagcggaagcgcccgcccactccggcctccagctcctgctccaagccggcgcgggagagctctagctgagcaaagcgctgcggccgggccagcacgtcctcgccggacaatccctgcacaacgatctccgagtggcccatgagacagcgcgtggcgaagccctccaggcagctcatgtccacaccatagtgctgcttcacctggctccagaagcccaggcgccattccagcatctggtcgctgatgggggctatgaagagctcggcggaggccggcaggagaagaccgccctccttcagccacttggttcgcgcgtggaggacggagctcagcatggactcgtgcaggagtccgtagcccatccactcgctcacgatggcatccacctgttccggcaactctacagtctccactggtcccggcaggacgtgcacccggtcctccagcccgttgaaccgcaccacctcccgggcctgttgccagatggcgctggcctctaccgcgtacacgcgccgggccccggcctgggcacagaagatgctcagaatgccggtgcccgcgcccacgtccagtaccgtcttgcctcgcagtgctgcccagttccgaaggatacccaggcggtaggcatcggtgcggacgcggtccgcgatcatctcctcgtggaccgaaacgtccgagtagcactcgtagtacagctggtcccgttcccgcttagtcctccggggtcgctccagggccgcctcccgctccgcgccatcttcctcttcagttccctcccctccttcgccgccgccccccgactcaagctttcttttcttgggctgcgacatcttggccgctctgcccggctcccggcgggcgtagcgcggcacggcgcgggctccaggaaacgggggcttctgggacttgtagtgcgcgctcgtccttcctacttcctgcggggtcgcccggccggcggcgcggaaggtctcctgtgcctgctcacgggagctgttttgtattgctcttctggtgtcctggcatcccttttcccacccacgacgcccacattctgagatcctttcattccccctcccacccttagctcctcagttttttgctttcactcccttcctgaagtaggcacgcacacttaagactaataatccacctttgtttcttctgctgaactcacctctgttttttttgtttgtttttctgttttttgttttttttgagagggagtttcgctcttgtttcccaggctggagtgcaatggcgcgatctccgctcaccgcaacctccgcctcctgggttcaagcgattctcctgcctcagcctcccgagttgctgggattacgggcgcatgccaccagggccggctaattttgtatttttggtagacggggtttctccctgttggtcaggctggtctcaaactcgcgacctcaggtgatccgcccacctcggcctcccaaagtgctgggattacaagcgtgagccaccgcgcccggcctaactcacctctggttttattccaccgaattaacatggcagcaccatccacccactaccgccttaactggacaattgtagctcttaaagtgctccagctgtggcaatttagaaactgcactacgcatttcttttttctgttttcagtgcagttagagtgcaaatgtaacaaaattaaaacctaacaatgcaaaatcttggttctgattccagtatgaccactaattagttgagtgatttagggcaaataatagaacttctctggcctttagttgcccattcacccaccagcgaatcttcattgcagttggggaagaactaggtttctggttctacttagaagaatagttacttggctttcggctctgctctgataattctgtggctctcttaagagttaaatcctgaaaagtgcagactcaagagccatgtgatacaagcaaactcgttgctaggtgtattctatatatatatgcgtttttttctctcagaaataacggaatcaatttcttttaatcactttctcaatgcaattcattttttcctgtgttttcttgtccgggcaatattgacactctcctctttctcttatatttttcttgtagtcaaccatcagctgttactctctttttgttgtccataatggaaataaaatatgtttttaaatatgtgtggcatctgtatgggtgtccgtgttattaacaaggtgggcataatgccattttctgccagcttgaaaaaaaagtcactcagagtaaaatggatttttattttcttgtggtcttgaattatgtccttgtaaccaataggcctgtattccttgtctgggatcaaagttctttcatcctattttctctattaatctttcattagcagaataggtttattgatatggcatccttagctgtactctacttctaactcaagactctccatcctggctgcttattagaattctctaaggagctttttaaaaaataccgatgcctgggtctacctcagaccaattaaatcggaatcactccagtggaacctgggcttctagtttttaaaagctccccagggaattctaatgggcagccagggtgagaacaactgtttctcactaaaatgatcttagttaaatcttgcttcgttattttaattgggtaaattgtatttttttcagtggcctgggctcaaccatttaaggctaaaaaccttgaagtatttcttctctttttctgccttggtttaatatcttattttaagataattgaggcccagtgtaggacatcagattagagttgtaaatgtgaccactttaatatgttacttttattaataggttgttacttagtgtatacttttgccattctttctttcctcaaaatgtcaccttttccttttaaatacattcattccttc

SEQ ID NO: 1732 - DNA, 4001 bp, Homo sapiens
tgtggcttttctgagctgaaatgcaaagctgggttttggatcactcttctccaataaaagcctatgggcaccttcaggctgctgtgtgggacgtggcaggacctggaagcctcctacttgctcagacccaagagggaaagagtggatgtcagctccacagatcatgcagaggagttacgggtggtgggcacccagctgtgcctgtctccagcccagcaagggcacgtctcacacccagccaggccacaaaagcttggggttggggtaaaggaaaccccagtcgactcttcttctcccatagaggtggggcatcactgtcccactcttggaagaaggatcataaagccttggatgtggggacagttacagtccagggagcaggggagtgtagaggtggtggagcctgggctcctgctgaaaatcagaagtgggacaccagcaggacatggaggatgtggggagcctgggggttcctgacttccccttactgccctgttctcaccactcacctgtctttcctgggtttccctcacctagggaaaagtgctctctattgtgcttttcaccgtgaaaatgtttgcctgccgctctcagatctgcctgccctgctgtcactctgggccagtgctggagctggcacgggtggtgaggcaagcctggcatccaggccaaccacgctgctcctgccctcaccgcgcagcagccggggcttctctccattgttcttgccctcccagattttcaagctaccccatagaagggcagcctacagtgtaaacacttcattaggtataattctgccttcacaattatttttatttttgctttggatctcaaaagcatttgactcgcctttaatatttgttcttttgaactcagtgtttttcctttaaaagagaaaagaaagaatttgtcctttctgtgaatggtaaaattaacccaattccaggaattgtttggcatttctctacatttccactatccatgtaaaaagctggtggaggctgaactaaaagttagtttccctgcttccccgacctttttcttccagtggattttatatggaaagctctcaggtacagcattgctttctgcttcagtaagaatggtcctgctaccataacacatcatgtgcccctatttgaaggtggtttgaggtaaaagcaaacttccgagagaaaaccatgatctgaatattttgaaccaattgtacagtgcccatatgctgaacctttgcttctctgcttcgagactggatatctacttgttatctggatgcttgctttggggtacactcagctgaatgttagtggcacccatattcctctcagaactaactaggcaggcacagagtgaaagagtttcaaagatatcctttctaagcggaggttaagtttatacaatagaagtttataagcttaccacctttaattaagcttactgcctttaattaagtcaacatgctatgtaaattaatattaatattaatatgtgaatcagaccataaataaaaattaaaattcacacaaaagataagttaaggtttgccaatccactttataaaggaattccttattacttaataggaatcttcactttaccaaaggactgaacttcaaaatgttcaatgctctgctaacacattgaaaacaggatttgattcatacacagcttctcaaaagcagatcccatttagtagagtgaggtctaactagtctgaaaatcgcatgcaatccctttaatgcataattccccattccctttggttcacactgtgttgagccaacagagcctcctgcatggttcctgggctcacaacccgtgcagaccctgacatcttcccaaaacccaaggcacagagaatgttaggcgacttacccctgtgatcacagcacagtcagacacagttactaggaggagcatgattgagactcgcgtggcacctctcatggtcacttggggtgaaggcaaaacactgcctgcttagatgcctctcgcttcctcccgctcagccttgtgcctggcaagctggggaggccaggctctcctgcatcccccgcctcctcccagatgtttacactcaggatccagggctgcctgtggatgcctcatctctgctcttcccttctccaacaccgatgttactcagatgatctcagaagcgaagatgagacctgaatctctaacaacatcaaatcaacatcaaaaccaataaaaatggatacttggggggctttgacggttgctctaactctcccaagaacgcagtgattcagacagttatgtatatttcactcaatgttcttttctgcctctgggtatccttctatcctacttggggcagaggaaagcctctggtaatgaattaagggatttgcaacatcaccatttatgcttccctgcaccaaactatgcaacatacaagattattggttccctctcactcacaccaagacttatctaggcatttaccatgggctcaacacagaggtagctgagaagacagaagagggtgaggtggtatccttatttctctaaaaggttaaaattatagtgaggagccataagacagtgaggaaaaaaagaccagacttgtggggctgatgttcctaagtgacacacacataaggatttgctctctcatgggctcaggatgaacaccagcaagtgtcccttggtacaatgacccaagggcagaaagccagcaaacatacagggcacacactctctcagtaccctgcagagccgagctggtatgggctgtggctgaaaggtaccagagccacaccactggccttccagttttaggggtgagcatgagagtggccttatccgtgagtgtataaacacggtggtctcagatgccagtctggtgggaagttgactttcgggatggcccctccgcctgtgagggaagcccctgaccccagccctctctgtgtcatacgacccagagagagctcccagtgctttgtcagatgatctgccttctctccacagtaataaaagccaacatttcccaaggtatgtgttgcaatatgttaatacacaaataaacaaataaaagacttctacagtcaaaaatttgggaaacacaaaccggcttgttttttgcagaacttttcagggcctttcatatgctaataagtgtttgaaacaccaagtgggaaatgcagtttgtagtatttcacaagcagattcatccacaaaacctttcttatcaaatgtcacaggggtctagggtttccacattgaaacgctgataggcatttatgagtgcagagaggaaggttaactagcacgggagctgggagctaagcccccagaggcagatgctttgattcagatcgatggcttcatgaccttgaaaatattgctaatctctccaagcctcagttttcctatctataacatgggataagaatagcatttacatcatacgattttgcgagtattcatctatttatttattcattgactatatttattgagagcctactgtatagaagacactgttcttggcactgggaatatagcagtgaacaaaacaaaaccctgtcctcatgtaattttgactatagtcaaggagacgggtaatagacaaataaacagatttgtaataaaatggccagttgtgttgagcactgttaaaaaggaaggccaggcgcagtggctcatgcttgtaatcccagcacttagaaggtagaggcaggcggatcacttgaggtcaggagttcgagaccagcctggtcaacatggtgaaaccccatctctagtaaaaatataaaaattagccagctgtggtggctcacgcctgtaatcccagctactcgggaggctgaggcaagagaatcacttgaacctgggaggcagaggttgcagtgagccgagatcgcgccactgcactccagcctgggcaacaaaacgagactccatctcaaaaaataaaaaaaaggtggtggggagaaaggcagggaaagcaacagaccttgacaagtggt

SEQ ID NO: 1733 - DNA, 4001 bp, Homo sapiens
agcagtttcacactccaacctgcctccttgagctatttaagactaagcaccacccctccttctagttctgttctctgtctgcctggagggctctcaatttcccaagaagctgggaaggggccagagacctgggagtctgtggaaagctacttactcctcctttaccatccccacgctccatcactccaccaaccttcagcttcagcagggggagtaacgggctggcacaccagaagaatcaacaacttgctaaactggactttgggtgatgtctccccccgcccactgcgtccccctcctgatctgctcaggcaagatagcagctcttccctccctcttcccgccctcctcactagtcttcccagtaacaattactctcacctctcctgtcctccctccccagtcctcctaactggggcaaaacggtaggtaccacccagacgagaccagaccgaagctgcccaacaccatagtctgccagcgatggctgggagattcatcgcctcccatttctgctgcccaagaaccccctactcttacccggcccgcgatcctccggtcctcctcgtgctggtgtcccaatcccaccgccacgcgaccccccgagcctcccggtgccgccttaccctactcaacttgacccagccctgggtccaggagctcggaagaggggcgccgcgcgcgtttcccgggacccatcaccgctcccctccaagccggatttccacaattcggcttcgacagcgttttgagacgaaagtaacagagcgcccccccacctccctctctcctcctcccagttcccggtcctctgctggggttaaaaaaggagaagtgaaaggtatgcaaatgacaagcaaattggaagagccgggaagaaaggcagctataataaacaagacaaagagaaaggacaaggggaccggccccggagttttagcctggggagatcggaaggatggggtttggcggaaagcggggatctccacgaacaaaaaagcgacccggtccctctcgcggtcctctctcctgagaagagagagcaggagaaagaaggaaagggagcaaacgcctcctcacaccccagaaacagtacacaaaaggtgacaagatcagcgacaagtccagcaacatcagcctcccccccatcgccaccgccacccccagccaccagcaggaaagagaaagaaataaaagccaagaggatcacttactcttaggaactgggaggagcggagcgctgagttccacggaggctcccgcttagaaactgtttagaggctattttattatgattcatttgaataacaccattttctcctggggggaataatgtttacacgggtctgagtaatgggaggctcttttcttcctttctcattcaagaacaagacagtgcaagtgattctggaaaaggggagggactcacgaggggaagaagaagatacttacgcggtgcagggagcagtgggaccgagcctctctctctctctctctctctctctctctatctctctctctctcttttttttcccccggcagagagaggaaaacacgcgagtgcacacacggtgatatcttgcgggtgatgaatatgataattggacaagggacggtgagtctgtgcgacagcgagcgagcgagcggggcgagtgggagagggagaggggagagagaggcgggaggggaggggagacgagagaagaggagcaggggagaggcgaggagagggaagaagaggagaagaaaagaagaggagctaagggaagaggagagagcaggagaggaggagagagaagagcgggaggagaggagagagcagcagaggaggagagaggagaagggtaaagaagagaagaggagcgaagcggagagggagcaggcggacccggcgagagctcttttgcgccgctctgctttccccggctgcaatggtgtattatttcagagcgctccctcagctgagggctccgctccacaacaagatttactttaagacacagctgaaggaaacaggaagactgcacgtcacagtctatctgacgtacccggccccagcacccaatcgcgaggcgccttcggattcaaggggggatagcaaggcaagagaacttgggaggaaaaaaaaatataaaaggggtgggggtgaggggctgggaagagaggaggggagaggggccctgcgctccccctccccggcctccatccccggcccccacccccacccccaccctgccacagcttcgggacgactggatcgccgcgcctgggccggagcgagccatctgcgggcactatgcaaagcgggagacggcgcgagcggcgcccggctcacactagctcttccaggacgcaggtctttttttttttttttctttttcttttttcatttcccagatacagctgatcgagttcgccgagtggccgagcgagtgagcgctcctccgacttgggtggaggaaggcacggaaaagtatacgggagaaaaagtgggggttttaggggtgggggtggcataggaggagggagggggggatctgcaaatcattccactttttaaacgatcataggtagtgtcaaggatacgtgtcacccttggttccttttaaaggggaggtggacaataaaatacaggtaggtttggtattaaaataataggtgccagaggtttcacatcgggtccgctgcatctgttattagacgaagatcaacattggctgagtcccagtttatctccagtccaaattatcaggaagaggaatatttacccttggttacctctgacattagttggattgtaggtaaagcagcctttaaaaatatatatgttgcaaacatctggcgattacccttcactaattcactcgccccagaaagaccaaagatagctgttcaatacaggatttacacagttttgacgcctgggcaacaaactttaaagtttattaggcaagaaatttcaaacgcataaatcgcaggctctaaaataaagccctagaaaatttactttggtttgacatttcttgcttgaaaaataaccagcaaaatttctttagataatgtggctcttaaagatctccttgggctttgcaagttacaaatgcaagcgagcctcagccgcagctagaacgtccctttcaccgggcacagtaaacggcttttaataaagcagccgcgtttatgacctaaagatcctataaaagctgggacttgcaagagctgcgaagcagaaacattcatacatagtctattagacactcatttttgtaagtaggaggaggacaagtagtcttcgtgtgtccctcaaatttaatcagatcaaaggttgaatcatgctgtgtcgtgacaacagggtatttatgaggtgtgttacaagtacactggccaaacactaccaatgtcttctgcgacacacacacacacacactccttcctagggaatttacaatttcagcctcaaattcaccaaaccgtaaagaggatattaagccctccctttgaataagaatagcgatgttagtatgtccgagtctatcccggcaggaaacttttggcacgaatttcaaacagtgaaaaggagaaaaaaaattaggtcggtcaggttaggtgtcggcgataagaaaagagattgcgggagcatccccagccttcttctttccccttttgccgcccccacacactccccccacgcgtctatcacggaagcaacacagaggagcgcacacgcaccactcacacctccaactattgactgttgtatcaggtgttctaaccgggatgtgacagttgaggctgggagcagaaataatcaacatgcccattagatacaggacggaataatgcttctattggttgggtcccttcgaggtaagcgggtgtattgagcggggaaacttgggatctgagaatggatcaaagctactttctttcttatttttcgtcctactagttttctttaagaatcttggtttgtacatataagttagcgccagcccacaaat

SEQ ID NO: 1734 - DNA, 4001 bp, Homo sapiens
cagcagtagactgccaatatccttaagaaaaataaacaaacacataccaacttgcccccaccccccaccccaagaactcacatggcagggctcaaaagaacaacagcccaattcccattagcccagacaatcctattaaccaggacaaccataaattcataaacctctccaaccctcgagcaagcattgtggtctagagctgtacagacacacacagacacagaggaaatttgcacctgtctttcttgacacaacacacctgtcaggccctgcccatgcgcactctgctaatagatttctgcctacctaggttaggaaaggaaatgagttcttttttttttcttttctttctttttttttttttttttaaataagggagggcatgagtggaaaagagaacaggagaagggagtcttctagccttgactttgcgaggaggccaccctgtgcttcctctgtttttataagctcaaggagacagcacagatcttctcggaaaaataaaaacaagcaggtgagtttccagccttcccccaggcagagtagccttctgggttgccaagaacagcagtttcacactccaacctgcctccttgagctatttaagactaagcaccacccctccttctagttctgttctctgtctgcctggagggctctcaatttcccaagaagctgggaaggggccagagacctgggagtctgtggaaagctacttactcctcctttaccatccccacgctccatcactccaccaaccttcagcttcagcagggggagtaacgggctggcacaccagaagaatcaacaacttgctaaactggactttgggtgatgtctccccccgcccactgcgtccccctcctgatctgctcaggcaagatagcagctcttccctccctcttcccgccctcctcactagtcttcccagtaacaattactctcacctctcctgtcctccctccccagtcctcctaactggggcaaaacggtaggtaccacccagacgagaccagaccgaagctgcccaacaccatagtctgccagcgatggctgggagattcatcgcctcccatttctgctgcccaagaaccccctactcttacccggcccgcgatcctccggtcctcctcgtgctggtgtcccaatcccaccgccacgcgaccccccgagcctcccggtgccgccttaccctactcaacttgacccagccctgggtccaggagctcggaagaggggcgccgcgcgcgtttcccgggacccatcaccgctcccctccaagccggatttccacaattcggcttcgacagcgttttgagacgaaagtaacagagcgcccccccacctccctctctcctcctcccagttcccggtcctctgctggggttaaaaaaggagaagtgaaaggtatgcaaatgacaagcaaattggaagagccgggaagaaaggcagctataataaacaagacaaagagaaaggacaaggggaccggccccggagttttagcctggggagatcggaaggatggggtttggcggaaagcggggatctccacgaacaaaaaagcgacccggtccctctcgcggtcctctctcctgagaagagagagcaggagaaagaaggaaagggagcaaacgcctcctcacaccccagaaacagtacacaaaaggtgacaagatcagcgacaagtccagcaacatcagcctcccccccatcgccaccgccacccccagccaccagcaggaaagagaaagaaataaaagccaagaggatcacttactcttaggaactgggaggagcggagcgctgagttccacggaggctcccgcttagaaactgtttagaggctattttattatgattcatttgaataacaccattttctcctggggggaataatgtttacacgggtctgagtaatgggaggctcttttcttcctttctcattcaagaacaagacagtgcaagtgattctggaaaaggggagggactcacgaggggaagaagaagatacttacgcggtgcagggagcagtgggaccgagcctctctctctctctctctctctctctctctatctctctctctctcttttttttcccccggcagagagaggaaaacacgcgagtgcacacacggtgatatcttgcgggtgatgaatatgataattggacaagggacggtgagtctgtgcgacagcgagcgagcgagcggggcgagtgggagagggagaggggagagagaggcgggaggggaggggagacgagagaagaggagcaggggagaggcgaggagagggaagaagaggagaagaaaagaagaggagctaagggaagaggagagagcaggagaggaggagagagaagagcgggaggagaggagagagcagcagaggaggagagaggagaagggtaaagaagagaagaggagcgaagcggagagggagcaggcggacccggcgagagctcttttgcgccgctctgctttccccggctgcaatggtgtattatttcagagcgctccctcagctgagggctccgctccacaacaagatttactttaagacacagctgaaggaaacaggaagactgcacgtcacagtctatctgacgtacccggccccagcacccaatcgcgaggcgccttcggattcaaggggggatagcaaggcaagagaacttgggaggaaaaaaaaatataaaaggggtgggggtgaggggctgggaagagaggaggggagaggggccctgcgctccccctccccggcctccatccccggcccccacccccacccccaccctgccacagcttcgggacgactggatcgccgcgcctgggccggagcgagccatctgcgggcactatgcaaagcgggagacggcgcgagcggcgcccggctcacactagctcttccaggacgcaggtctttttttttttttttctttttcttttttcatttcccagatacagctgatcgagttcgccgagtggccgagcgagtgagcgctcctccgacttgggtggaggaaggcacggaaaagtatacgggagaaaaagtgggggttttaggggtgggggtggcataggaggagggagggggggatctgcaaatcattccactttttaaacgatcataggtagtgtcaaggatacgtgtcacccttggttccttttaaaggggaggtggacaataaaatacaggtaggtttggtattaaaataataggtgccagaggtttcacatcgggtccgctgcatctgttattagacgaagatcaacattggctgagtcccagtttatctccagtccaaattatcaggaagaggaatatttacccttggttacctctgacattagttggattgtaggtaaagcagcctttaaaaatatatatgttgcaaacatctggcgattacccttcactaattcactcgccccagaaagaccaaagatagctgttcaatacaggatttacacagttttgacgcctgggcaacaaactttaaagtttattaggcaagaaatttcaaacgcataaatcgcaggctctaaaataaagccctagaaaatttactttggtttgacatttcttgcttgaaaaataaccagcaaaatttctttagataatgtggctcttaaagatctccttgggctttgcaagttacaaatgcaagcgagcctcagccgcagctagaacgtccctttcaccgggcacagtaaacggcttttaataaagcagccgcgtttatgacctaaagatcctataaaagctgggacttgcaagagctgcgaagcagaaacattcatacatagtctattagacactcatttttgtaagtaggaggaggacaagtagtcttcgtgtgtccctcaaatttaatcagatcaaaggttgaatcatgctgtgtcgtgacaacagggtatttatgaggtgtgttacaagtacactggccaaacactaccaatgtcttctgcgacacacacacacacacactccttcct

SEQ ID NO: 1735 - DNA, 4001 bp, Homo sapiens
agttttaataaagacacggtttcaccatatcggccaggtaatgccttacctcaagtgatctgcccaccttgacctccgaaagttctgggattacaggcgtgacccactgcacctgtctctactaaaaatacaaaaattagccaggtgaggtggtgggcacctgtaatcccagctacttatgaggcagaggcaggaaaatcacttgaacccaggaggcggaggttgcggtgagccaaaatcatgtgcactccagcctgagcgacagagtgaaactgtgtctccaaaaaaaaaaaaaaaaaaaaaaaagccaggtgcggtggctcacgcctgtaatcccaacactttgggaggccaaggcgggtggattatctgacgtcaggagttcgagaccagcctggccaacatggtgaaaccgcatccctattaaaaatacaaatattagctgggcgtggtgacctgcacctgtaatcccagctactctggaggctgagacaggagaatcccttgaacatggaaggcggaggttgcagtgagccgagatcgcaccactgcactccagcctgggcgacagagcaagactccgtcccggggaaaaaaaaaaaaggtgtctaaatgggagtcaataaattgactgacctcaatttccaagctcagctattcccagcagtgccacttatcaaagatctgggaatcatctttcaagatgttttaagacatcttttctccaaaaaatccagtctgattaacttctacattcttggtaagtttagcctctatactagagtctataagacttgatgccaaatagactcacttttggtatatccaaaggaagctagtagattgaagtgatgaaactaagactgaaagattttctgcctcagtgacaagttacgtgagtaattctatggtggttctattaccccacaatgagtagacatacagcgtaccaatttctacatattacacatgtattgcacaaaagcggcatatccagatgccatagaaagtgaaaacaagagttcacacagaaacagttgggacactgagccccaccatttacaagcccttgggcaagttaagtaattctttggagccacagtttaccatcttacaaaatgagtactgccatatttacatcctaattcattcaataaatatttattgagtaactactaagtgtcaagcaatgtactaggtgcggtggatacataaaacagtgagcaaaactaacaagagtcctcaccttaacgggtcttatattccactagaattgaatgataggctagaaagtataagcaatttgaaagcccaaagcaataaatgaggtgccactgttacctccataagatgacgtgcaaactaaacagccaatggataaaaaagtttcaaacggtaattagccttgtcactaatcaaatgctcaacaataactgcgaggtgcgggggtagtgggggtgcggaaggaaagcgaggtacaatgatctctcctctcaatgagcaggcagcagaatccaaatccagtcttcagaaggaattccttactccgtgctcttgtttgctacaacctgagtttccctctgcagccccccactcccccgctaatcttcatttttactctctccgtcactccaaccagtctcttactctaccttgttctacctaaactcctcaccccagagctggtctcccaacccggtctccttcccgcccccgcccttttcctctcaacaatctcattccaacctcttctcccaccaaaccaggtactcctttcacactccttcccgctgaaccctcccgcttcggtcctccccttggactgagtccccggccacagtggcgcggactggaattaccctctgtgggcccggggccactactcacctcacaaacttcagcccctgagacggagcccgaacgttacaccggaaccggaaaccttctgaccgccctacggcgtgccgtcgctaccgccaccgccgccgccacgccgctgtctcccaacacgtgaccaaggagggccgggccgccaattcgcgcagccgtatttgccactttcttggaggctgaacgcatgcgtcgcagaaccgaaaagtttccctgagcaatttccttgctttctatttcccaggctaaacctattagctagatttctgccaaggttttttttttagctttttttttgagacggagtctcgctctgtcgcccaggttggagtgcagtgacgcgatctcggctcactgcgagctccgcctcccgggttcacgccattctcctgcctcagcctcccgagtagctgggactacaggcgcccgccaccacgcccggctgattttttgtatttttagtagagccggggtttcaccgtgttagccaggatggtctcgatctcctggcctcgtgatccgcccgcctcagccttccaaagtgctgggattacaggcgtgagccaccgcgcccggccgatttctgccaagttaatgtctttaacttcctgaagcggaaattgggctacttgctgttttcctcatatggagaataagtgcgcaaaagtaaacttaggctagaatgaagagcgaggcttctgcgtttgtgttcaaacacagcctttctggtagaaagtaaaccctttctccctaatttaacagtggtgtcaggccgggcgccgtggctcacgcctgtaatcccagcactttgggctcaataaatgacaagtgagacctaccagtattgttttctccattctatcaataggtctatatattaacttctctccaaaatgaggctctaacctactgaccctttattttttatttttattttttattttttgagacggagtctcgctctgtcgtcaggctggagtgcattcggctcactgaaacttccgcctcccgagtagatgggactacaggcgcgcgaccaccacgtccagctaacttttgtatttttagtagagacggggtttcaccatgttggccaggatggtctccatctcttgaccgcgtgatccgcccacctcggcctcccaaagtgctgggattacagggttgaaccaccgcgcccggcccctactgactctttaaatcgatgattcataacaacatgtgtgtggacaaagatagtttggaaaaagattgtccagtattatgacacaatttcttatatgagaaatggaaaaaattccattatttttatattataaactatccaaactaaagttccaaaatgtcttcttggtggtaggctgactagaagatgcagttgttcttcagggaggttattcacattccccagatagtaggagatttttgtatctaaagataacaatgtacataccaagccccaccttccctgatggggcagcacgacataacaggataaagcctggctctgaaggaacaagttgggggagtttgaacctactgctcaacttattcacaaatcagtttccccacctacagcttctaacaccaatgtctcacaaaatattcactcaaaaagtctgttgaatgggttaatgagtttcaacattgcagggttgttgtaaatttattttgttttggtgcttctaacagtctgcgttcaattccctatggagaaatgtgtttctagaaactggttttaggccaggtgtggtggcttacgcctgtaatcccaacactttgggaggtcgaggcgggtggatcacttgaggtcaggagtttgagaccagtctgccgacatggtgaaaccccatccctactaaaaaaaatgcaaaaattagctgggtgtggtggtgggcacctgtaatcccagctactcaggaggccgaggcaggagaattgcttgaacccgggaggtggaggttgcagtgagccaagatcgcgccactgcactgcagcctgggcgacagagggagactccatctcgacaaaacaaaactgattttatttccaatttttagaattggatacatttaaactgtagctttccggttactagctgtgtttccttc

SEQ ID NO: 1736 - DNA, 4001 bp, Homo sapiens
taagtaacctctccaatgtcatagttaatgggcaacagaatctggatgtgaacccagatcttacacctcttaaccaccaccttttgttgtttgattttcacccctgagcgtccagtgcctaccaacatatcaggcactcacttttgcttaatatgtatttagtgaatctgtgaaatcctttttcagggaaaaattaccaaaactgagaaagtaaagtagaagattaatacaatcagaacagataaaatacaaacttggcagggtgtggtggctcatgcctgtaatcccagcactctgggaggcccggggggggaggggattacctgaagtctggagttcgagaccagcctggccaacatggtgaaaccccatctctactaaaaatacaaaaattagccaggcgtgatggcacatgcctgtaatcccagctactcgggaggctgagacaggagaatcacttgaacccaggaaatgggggttgcagtgggccgagatcgcaccactgcactccagcctgggcaacacagagagactctgtttccaaaacaaaaaacaaacaaaaaatacaaactcaagggctcaaaagcaaaaatctggagtggaactctctagaaatgagatacattgtgtacacccctcttaaccaaagcccaattctaaaccgccaaaattaaacctcttatattagctagtgaacattgcactcacttgaaatcttcatttttgataaactctacaatgatatccttctcgggttgaatttgaagcatcttcaaggttaaacacagaaagggtgttggttttatgttgccaccatagacgccacccacaaaccttaactccatggctttatcgactacaagttcagctaaaaaacaaaaacaatacagtaacatattagggctaagctcttcctagttggagtggagttagttcaagctttggttctcctaaatatacatcaacagtgtaatattaggagaacgaatgtgtattaataacagtaacgacaacagctaatatacattgagaatggataataaaataggtaccctgctaagcttttcatattatctcacttaaccttttttaacaagtcatgaagaaagttctagcaatgttcttatttccaggtaaggaaaatgagggctaagaaaggtaaagtgacttgctcaaggtccacagattgtcacaggacatggatttaaagccacaattcaaatcggaagattacctggaagacttctctgaagcactgatatttataaatactggaaccggcccagatctaagaatagtaagatcatgaatttggtttcaggcatattaacgttaggtccttaaagaccttcaacagattgtgtcaaagtgttatatccggatccctgagcttaacactgttgcaacccagcctgctatcattaaatacggaataactcacaacacccaactgagacagccttcagaatatgaccttaccagattcatctgtgcctctaatactcaacacaagacgaggcacttagcaggcactcaaaatttttctgaatgatcgacatactccgttccagtaccacccccagaggccagtcgctagtcctacccgcgctcggtcaggagaaatgggccacaagggggctgagaggcgctccgcgcgcttccacttacctgtaagtccaaagcactcctctttccagtacttggactcatagattcgcgttcgaatgatcttctccaccagatattgagggttggtgccatggatgctgtgcgcatccttcactgtacggttagccattttagaatgccttcaattctatttccgtcggatcctttaatgcctcacatccaggttcagaaaaagcacctagaggaatggagaaaggtggaagaagtttcactaaacagcttaggcgaccatcttgaagccggaaacaccgtagtgtaaagggcttccgctccccgcgtcgcctatcgaatcaatgatggcggctgcatgttagcggatgtacgtcatgcgcccctcttaggtgtacggagtgggcggggcgagctagttggtgtcgcaacgaagggacggtctgggggcggggccacgccgattggcgcgaagttttcttttctccttccaccttcttttcatttctagtgagacacacgctttggtcctggctttcggcccgtagttgtagaaggagccctgctggtgcaggttagaggtgccgcatcccccggagctctcgaagtggaggcggtaggaaacggagggcttgcggctagccggaggaagctttggagccgggtgagtgtggcgtccagcgggctgcgagggactcgggggagggcgcatcggaacctctgaaactgaggacgttctctgtagactcagtcattgattcttttagctgacatgtaccaagcgcctgttcagtgccaggcactgttctgaactgttaagagcgttcctctgttccacactccgattcctaaaaggcttcccgcgctgcagggaactgagtttgcaggggggaaggcggaagccaacagcctagaagcaggagcattcctgccctccgcaccctgatgctcagtgatgactttccctccatctgcatttgtaaagcactctacttgtttcgttctttgagctatagtgtaggaaccactacagggaaggcggagcagaggttattaccccattttacggacgtaaattgcgcccagggagggacgtgtcttaggtcgcttttcgtgactaagcagtctgggctcctacccagatctttttttcagatgagctcctaactgctgggctgtctgtcattcaccttcttttcagaagagaagtctggtggcccccttcctacttctcttttctaaccccggaattgaagagtcttctgctgtgacagttggaaaaggcattcttatcctgatctatttgtgaaactgcaatgattatatacgattctagttgtctgtaacacatgaataatagtaccctcgtctctgctgtgttaggtgggctggaaatgccaaaggagtttccaatatgacagaatggtttaagtccctttgcaacagtttttaactttaatggagggcaatatgtggactttaggaggtttgtgaatctgccgaaattgaatgcaaaattttgcttgaattatgttagttccatagtattcatcaaatgatacttaataaataaaaccactgtaccttacaaataaatgcaagggattaaggtagtgggaaagtggatttaccattttgcattttttcacttaatcttccattatcctaaaatagtgcctggcacacgatgggtacttaataaatattggttgaataaacggaagattctattttctccattttgtgggtaagcaaattgaggcccaatccacaatgttcagtcagtggctgggaagcctgatttattgtaataagtacaccaaaagcaagctctcagttacatattaacattatccagtttcacacagtgtgttgtaaggtgaagtagttaagagcacagtaattgcagtctggcttttccgggtttgagttaaggctgtgccatcctgtataagataggataagttatcaccttgaagtgataataacatctacttttcttttttttattttgagacagagttctgctctgtcacccagactagagtgcagtgttgcgatctcggctcactgcagcctccacctcccgggttcaagtgatttgcctgccaccatgcccacctgatttttgtatttttagtagagacggggtttcaccatgttggccaggctggtcccgaactcctgacctcaggtgatccacccacctcagcctctcaaaatgctgggattacaggcgtgagccactgcgcccagcctttgtatttctgttttatccttgtgtgcattttataagcgtcatgaagacatttacaacccctgtatcactgtcttttaatttcactttgttagatgttttacac

SEQ ID NO: 1737 - DNA, 4001 bp, Homo sapiens
gccgcagaaagagcaggaacccaattttcaactgtttaaagtttactgcataaataaagctaaggattaaatgttattcaccatactgtatccatgctaaaaaggtcttaccttttaaaagctaaaaaaactaattcatagaattacaatcagacctactctcgtaagaggattccaaatttatttgtgtactttatcaacccaaagttgaactgtattcaagagatgttttctataaaaagcaactaatctctcaaaatccttcaataacctaattactcaactgggggaaaaggtgggcaagacaaaagagaatgtccttttgttaccatctctacacatacgttcaaatgatagaaaacactttgtgcggtctgtcaagtttttaagagtgaatatagacaaaaatggattgtgtattagatgctccggataaaatttttaaagaccactaaggctattattaatattctttaaaatagaaattaactttcggaggcctggaaggtattttttatactacataatttgcagggaagtggaaaaagcctacctaattggtgaaggaccaaaagcaatggccaaaaaaacccacaaaaatctaattagtcgttcatttaaccagggaaatgcatttatggcgattgagcatgattaatagtgcatacctctacctgcgaccctgggctgctccgagcctcgctgcaagactgagtcaatcctgctaacgaaacaagaactgagacaagagtgcagtgaggaggcgccaggtgagctccccagcacagccaagccagcaccgaccctgccgcagaagcccagggcccagataattctaaattagcccaatgcacaggtggctgagacctcttactcctgacttcctgctgggaaaatttccaggccttctgtacacctcttgaaatggcacctctccaccctcatccccccaccccacccgacacacacgcactgaccatttccctgcctggatcggatagtgagtaccaacaacacgaggccaatactgaagtcattacacgccctggccaggggtgagcgggagaagcaccaacaagttggcgctcagcagatccacgtcaaaaggaataattttaaagctgtaaactggaaaggcttctgttactctttcctcctctcccccatccctcttgcccaactccccccaggggtgggcaggaggttgggggaggagagagatcaatagtggcgggctctcccggccctaaaaatctaaaatggaaacgagagggcggccccagtccgacccctcccagacacactacaggccgcagccacccctccgccgaaccaccttcccccacccacaaatcttcagatttcgggggccgccttcgcccgtttcctccataccccctcttccgaacttacccccaaagccaaggcctacacacttcgtaccttaaagtagatctcgtccaccacctcgtggtaggtcttgagctcgtagagctgtactttgaagtaaggcgacgacaggatgttggtcaggatcatggggttgaggttcatggtcttctcgttgccccagagcgggagcacattgccctgcttgccggagaccgccggcttggtagcgccgccgccgccgcactgctgctgttgctgagccgcagctgcagccgcctggtgctgcggctgcgagttgcctgtcagcgcggggctgttgttagccatgttgcggcggaaggaaggagggagggaaggaggggggggagggggccaagctcgatctcgctcttcgggacaacggtctgggaccctactccatcgaacgtcgtcgggagaaggggccgcctcgctgtgccccagctgggcaagagagggcacccgacgccgacaaaatgaccccgggccaagagcagacagcgaaacccagaccgcgagaactccacgcagaaggcgagccggcagccagggagctcgatctcttccgccaactgcccctgggaacaagatggcgggcccggcggatatgacgccacgcaccccagcgttccaagctgagctggcggccaatcagagacgctcagttgggctggagcgtcctcttcctaggtccccgcgttctctgcacgctgaagtcgctgcagtgacctccgtacctgactcttaggggatttctcctgagaatttgggggccgggggagagggttgtaggcctaatccgttgttgttgtattttgactgggggcttgatttcttttgtcgggagctgagccaggaagggttcgcatggctgcggtgtgcttgctaatatcgtcactctgacttctgcagagtatccgagaggggtctcctgggatctcagttttaaggttctctggaaggtacaatggtcagggaccccactcctccaggagattctgatcaaaggtcacgtacttcgccagcctctagtgtccagccagaagtcttaaatttattcatccgtaagattgagataacatctggctgggctgttgtgagcattgaaagagctaatgtacttgtagtgcctagtagactgttccaggcatctggtaggcgccttttctttttctccctgctccagatctttggattctaggaatgtatccggagtgataaacattgggcgagatactgtatattgggagtgggtgtgtgaatgtgtggggagtttgaatgtggcaatcttgacttcagtggcgcatacacaggaggagaaaaggataagatggaaactttggggaaaatccacatctggatgaaaataaaccagaagaggagagagagagagcgaagaccagcagaaaagtatttaaaccaagagacagttgtttgacagaatacaaggaaatagaaaagataagtgaatggagtgattgattagtgtttggagctgtacggtacgaaagtggatatcctgtctggttcctttgttttaggttgcaagagaactagaaccctgagaggagaagcagttttcaccttcttactagcaaatcttgtttttctctatagtggtttttattaacttccaaaggaaaactgaagatcctaacccctgtgtcatgagttatcacgttaaaagtccatagaaaaaattttttttaacccagttctttttgtgtatatattttttgccttgataatactagtttattgagtttgccgagtgacacattgccaaatcttatgccctatttttaattcctcagatacatgatctttctgtatagtcttagacagtctttacccctagtctgtttggatgaagagcttggtagagaggttgagtttgatatctaagtgtcagcggcatcaaactcggagccaggtattatgataaagtgctttaacatattcagtgaatccctacaacaggctgaagatgttatttttatccccattttttagaaaactttattcagttataattgaagacctctacgctgcacatatataaagccgtaagtttggtttgatcagttttgacatatatgtatacccattaaaccactactacaataaacataatcttctgtcaatcccaaaagttttcttgtgccctttgtaatccatctctctttccaacctcataccgaagcaaccactttctgtcagtagagactagtttgcattttcttgaatcttaaataaatgaaatcattatccccacacagtgttctctttttttttgcctccttattgcatgtatcagcaggttgtgttttgttttaattactgattagtattcagttgtatggatttatcactattttgtttatctaatcattgatgggaacagcatttttatttgtaatagccccaaattagaaacaacacaaattgttgttgaaaatgctgtgaacatttgtgactagactgtctggattttttttttttttttttgagacagagtcccactctctggcccaggctggagagccctctttcagcaggaagtagccagatagacttgacatccctcttca

SEQ ID NO: 1738 - DNA, 4001 bp, Homo sapiens
ctgaggttttgagtgtgggcaggtcctagccccttgctggattttctcatgtgtgaagtgcacaagtgggtgaacctaggatatgttgtgggtggggtggtctcagtgaccttcaggaagcctctttcagaactgctgttttatgcaccggtgaggtctgtgttttattcctgtttcagattactcccctcccccaccaaaggagaagacagttgtcacaaggacaatgaggggtttgatggtggagaaaagagagcacacgtcaagtcagatatcagccttaggatcagctttattatgtattttaccttcaccagggagaagaaggcaaggaagctggagaacagaccagcctgcatcacacagacacaaatcacatctctaaagagtgtacatggtgagaactaagggcccacattagaccagctatgaagcacagagattgacaagggcaccaaacatccatcttatctttcccttctggttgtttggattcaatcgtttacatactttcggttcattttaaaaaagcacaaccaacatttcaaagttcaataatttgctgttctttttagtgtacagagacaaaatcaccaaatttttgatttttgaaacaccgcaagccgctttgtctcaacacctgtggtggtggtggtggtggaggtggtggtggtggtgataagtggaaagtccatcagaattcagtttgttttgaggcttatttgagagcctgaaactctgaaagatgaatgaaggtatccttggctgttacacacccagagctgggtgaatttttgcaccaaggaagctgtgctaggcttctgtggtcttccctgacaaccacaccattcctacatttgagaccttccatcagactgctgagaacaatgcttattcacagagggtgatgaaatacagaaagaactgtcttcagagacacagaccaagtcctggaatgctaaggaagccaggaggcaagaaggtacattgcacacagaggtacccacagaagaaggtcaccagagcgtgggctggggtcagggtttcatctgctggccatcttcttgaacccagatgacatatgagcagctactttcccttgccaggggatgagcacttctcctggactttctgtgggcaaacctccacacattttgtctggaatagctcctggcatggctctgcacactgaggtggacactggtcttggcatggaggtaggtatggctcttggccttgctgtgggcatttttcttgacttgattcctggcactgagaaagacatacctcctgggcctgcactagacacttatcttggcaggggtgctggcatgtggggaggcacacctcctcagcctttgcttggcactgctcctgggtctttgggaggcatggagggggcacacatggctgcttgcactgctgctcactgaaggacatcctagggtgatttgcagagcctgaaaaaaacacaagattcgaaattatctgtattaaaaatatcagcatgggaactggggaatgaagggttgagaaagaggaatgaggagtggatggaagaactaatggaatggaatgaggagtggaagtaagaactaatttcttggctgctttttatctctttctcttttctatcctggctgcagctccctgtggcacctgtctccaaagtgggagtgttctcctggcctctgtctagacatccatagctccaaaccccagtcttaccacaggtttttttcccttctcttctagtctacgaatccttttgaaaatcaggtgcaagagactagactagataggcaaattctagtctggatagaatatacaggatagtttgtgaggcccaagaaatggcaaaccacttaaaaaatcagtagaaagtacagtccataagaggaacagaacagcggccgcctaaagacagagtaacagggagagagagggcacagatgccccacttacctgatcttcaacaagactcaacaaaggctgtggactgtgaagcccagcaaggtgggacttttatatgttgcttagtccagcctcccgcgggactgactggtcacatgggctgtggtattaattgtggagtcaccataacaagcttcctctgaaattgccgatggtttgagtcactgcttgggatgcctgttaatcagactgcattttggcctgtgggtcctcaccagacctcagcagggaggggcttctctcagatctctctcatcagaggcagcaggaaaagaatgttcataaagtgttatctcagtctgttcaaccaggattccttgtctgcccaaactggtacaggatgtggtgagagataagatccaccttgctcatctcatcttcaccaatgggaagattttatgcctaaggcctggggcctctctgggtcaagggcttgtatggcctgttgcagacacttcttcatcaagcctagaaagtcacccttcagatgcaaggatgaaggctcgtcctgtggttccaagcgaacaaagggctttcagcctgctgaagagagtgattttcctgcgtgatggtcttgagggaaattgcggttcatttgttactcttgggttgtgaagtggggtgaaggggaagagagaggaaggagaaggcagacaatcttcatcttctcaaccttgatttatgacacccttatgaaagtggagttactcacagagttttcatagtgaccaggagaacaggctggaacaaagttaacttgtctctttgccttctggaaaacgttttcttagaactcaagtcaataaaagtcaggggatgaaaggaaaagtttcaaagcaaacacacccagttttctctacctctactttctagtttgggctgttagtttttacctggtgtgttctccctgtgcctgtgggaatcctaagcattctgcaaagctttactcatgtctaccaccctctgagagcctttcctgattactctaaaccagaaatgaatccacctctttatgcactcccatggtatctattatttatattattcatatgacatttactattgaaattaggactttccagatatttatatatagatcttattttttcctgggttataagttcctagaggataggtactatgccataggtatagtaagtggaagatgatggaagacaaatgattattgatggggtaaatgtattaatgaaggaatacagaaggtggatgtgggagagctgggagtagaggaaaatctcatttaattgaaaatgggaaaagatttactttgaaagaagcccccatttccttaaaatggtggttctgtgtttgctgaagttgaccaaattcaagggtctttaaatatgatgatgttcccttcctttctccttaatttaaagttatgttctcacacacaggggcctgttgtggggtgggaggagaggggagggatagcatttggagatatacctaatgttaaatgacgagttactgggtgcagcacaccaacatggcacatgtatacatatgtaactaacctgcacgttgtgcacatgtaccctaaaacttaaagtataaaaaaaagttatgttcaatctcttaacttgaaggggtaggtttaagtcatttcctaagaagaatatttggctaaaatcaaaaatgtctcaaatgtttatataggttttggatgcttgatacctgaaaagtttttaaaaggtaagctggggagatcaggaagcatttttgacctttgagactggttctcagaggttaatgtgacatcaccatgagccccattgaggtcctggcagtagacagaggcctgagagtggaaggacttggaatacccaggtgtatatctgaagagaaaaagtcatttggggcatctgggagagtaggtgtagggtggggagactcatccttctttttctcctcctttttcatctcctcctttcaattctcttcctctttgtatttttcatcttttcttagaatgctgttgaagagacaaagcaactctcctgtgt

SEQ ID NO: 1739 - DNA, 4001 bp, Homo sapiens
aaaattagcctctaccccaagtccaaagtggatatattccatttttacaactttcaaaactttaaccttagcatgcaacaatattcatatactagtcaagctaaagaaaaactactagttaataatgctttatcttatttagttactgtagtttataatttaaaaagcaggttgaaggtttagagcatcccctttgggttcagacagtatggaattgaacctacacaataccaccaataactgctatgtgaccttggtcagactactctctcagatttcatttcctcatctgtaaaatggggatgatcttaatagcacttttctcaaaggtctgttgtggagattaaaaaaaaaatgtatgaaaaggacttattactgtgctcagtgtatagcaaaaggtcacctaatggagaacagccacacataagctaagcagagcaaacacaatcacttaaaaaggctatattctgaaaatccacttacagaaaaggagagaattactatttgactacatgctaaagacaaaattcaagttcaatttattcctaattttttaggggatcaatgcatttggggtgagccagaaaagatgctgcagtgcatctgtgacacacacctaaaaatggctccagtcaaagcagcatcttaattaccaatatgggaggtgaaatctagttttgaaaaatggtggggttaggcttggtaggtgcttagtatcaccctattatttttatttgcaggagtaagctattaagtactcaacaatcaaaaaatcctccgattcttctggtgcattccaaatgaaaatcttacagcagagccgcctactgtacaattctaagtactctaacgaggtatgaatctatgaacccaggctgaaaaccagccaatgcggaaatccaggtagctttataagccagcaaacatcaggcatgtcagaccctcaaaagatcccaaataatgtcaaaacacacatacatccctttaaattaaaggtactcctctcatgcaaaggaaggaagactctatcaatgtctctatagtggccccatgcccttttcttcagtcctaaaacggggcctttaccctgacaccaccaatatcaacgctatctcaaagacagggagctaccgagattcaccacgcaagttagaggatggagcggcctagagtgtgaaaagactacccaaatcctcctccggagttgggcagcacttccctagcggaagtagggttggtcttgattccccgaagagcctctcatctaaccaggtctttaaaccagaccctcccatacattgctcattgcaagtcccaccctcactacacaggaagaggtagacagtgaaagccccggctgagtccttcagttgtttggggaaacgcatacccgacactaaaaaaaaaaaaaaaaaaaaaagacttcacgtccgccagtccaggaagacggaaacccccttcgcttacccggcaacatgcgtaatcccctcgcagggccaggactggggtctaggtgggagcaagacagaccggtccagaactcccgctgcagaccacatggggcgggtctgactccggtttcccgctccccaagctggaggccgacttccccagacacagagatgatggtaaccaaacagaagggaaatgcccggacccaaggccctctccacgcggccccctagcctccgggcgccagggtctgggtgcgctcccacgccccaggccgcactctggccgttcccgatggggccctctttgatcgcggcccccacaccctcgctttccttaccggtcagggtgagtgtcaagtttgcgcacttcgagggtctccgccgatctctgatcgaaagaagggggagggaaagctggggttaaaggggtggccggaagggccaccagactggaaaagccgaagctgcggatggacaaaccgccaaagcactttcgcagctttccgagggggagcgagcgagcgagaaaaagaagcaagatggcggctagccagcccctacgtactacgtcatgacgctaagtacgtaggtcaaatctccgcaagaccacactcctgcgcagagacggccggatcacgtgaagcctccgtggcggcccaaccccgacagagggtgctggcgcttcctgctggacggagggagtttctgcaatcagaattatcttttcaggacaaagcttggacctgagacctttctaagaagtcttgaattgaccacgtttacaagttgataataagcctcagtgaaatgagcactcttatgtctggtgggtggatgtgtaaatggttgaaccagcagttcgccagtatgtctcagtgaatttggggcaagctgagaagtcttggtgtattgaaaagttatcacagagagtgaaagtaaaactagtgtgaggaacagagtagcatgggctgctgagagcactttttaagtttctaattatggatgtgagataagccattcagtttatttatatgatctctccatcacagtgttcagctccgttgaatagtaagattcacccatgctggcttttactaggcaagtgtaacataggcagatgagtgtatctggaagtgggagactacaatgatgataatattatgtcagaacagatggcgaatgtttagtaaatggtatcttttgtcctctttgtgaactacctatgacatatttaaaattcaaggatttcttaccacttctggtctgaacgatcttccccgccagtagctggtgtatgtccatggaattgtcactgtagcaatgttagaataaatgaaataataaagagaggtaaattatgaacacctccctccccactaatattaatttgaagtagaaaagtctggacttgcttggtggctcatgcctgtaatactaatactttggtaggtcaaggcaaaaggattgcttgagaccaggagttcaagaccaatctgggcaacatagtgagaccctacctctgcaaaaaaattaaaaagaaaaaaagctagctaggcatagtggcacatgcttatagtcctagctacctgggaggctggaggcaaaaggatcacttgagcacaggaggttgaggctgcagcgagactctttctcgaaaaaatagaaaagaagaaaagaaaaagtttttttattgatatagggtcattgccaggggaaagcctactgatcatccacaagaggacaaggaagcattactttagtgaatttctacaaccttctaggatctggtctatagtgtcctggtcacagaaacatctttctttgtttttttggaggcagggtctcactttgctgcccaggctggagtgtagtggcataatcacaggtcactgaagcctcaacctcccaggctcaagcaatccacctgtctcagcctcccaggtaggtgggactacaggtgcttgccacaaaacctggcttttttttttttttttttttttttttgccagtagagacgaggtcttgctatgttgactgggctggtttcgaactcctgagctcaagcaagcctcccgcattggcctcccaaagtgccggaattaccggcatgagccaccacgcccagccaaatcatctgtcttgagcaatggagaacaacttcagcaatcagatgaaattacattaaccaaggtcataagactgacacgtatggccgggcgcggtggctcacgcctgtaatcccagcactttgggaggccgaggcgggcggatcacaaggtcaggagatcgagaccatcctggctaacacggtgaaacccagtctctactaaaaaatacaaaaaaaaattagccgggcgtggtggcgggcgcctgtagtcccagctactcaggaggctgaagcaggagaatggcgtgaacccaggaggcggagcttgcagtgagcacagatcctgccactgcactccagcctgggcaacagagcgagagagcgagactctgtctcaaaaaaaaaaaaaaaaaaaaaaagacatgtattaaattattaat

SEQ ID NO: 1740 - DNA, 4001 bp, Homo sapiens
ctaggattacaggcgtgagccaccgcgcctggactctccctacatttttcgtttttcattttccctggtaaaacgtttaaaaacaatcatagtatttctcagtgcattttgttagaactaagagtgcctatgcaaacacttaagtaatgctgcgggtgcagcctctcaagcacccaaaccctaaagagaacgtctctgtctctgcgcctagccctttatgcggaacttgaggacacctggttcttcattcctcagagttggccacctttctctggtgtccaggccagacttcctcattcagttcctgtagcagtctgctaatgcattgggtggatcggccctaggccgcttttggctaaaaacacccaggggcgcccaggccggaactaaggaagcagggtgaagaccaggcgtcttgagcacaccagaggctctctctgcggcttgctgtagcgtggcccgcggggccaccactgtgcccggaccctgtttccaattgtttctatgtgcagtttgatttgtatgtctattctttgagagtctgaaataggcaacgttttgtgaaaatcatagaatgctggagggccccccggttccacgatttccaaatttgaagacaaaaatggtaaccagcaactactgacatagaaagcaaccagcctcatttgagaacttacagctaagttcagactcttgcaacctcgaggagaagagggagtatctgtacatatctggccacatgtcacctgggatgaacagggtgaccggtctgttacagacttgggggcatggggatacaattgcagtctctttttaaggcactagcgaagcgagattttcatgggtcgcgaggttggtcggtgaggatggggaagggaaactggacttttctgggcgtttaagagccaatagggagagctcctctaaggtgacactggcctccgcactgaagctcgcgcctcccggatgcagctcgcctgtgcgggatcatgcggggctggatttcaggtttcacccttaaaggacattccctttgcttggcccgagttttcccaagccagccgggcttttgactctgccagtctcaaacccatttgcggtagaggcaacagcagggggcagagagcagctccagcgtctggggccgggcgttctctcggggcctcccggtcgcgcccggccttacggtgcccgcgtggagagtgcagcctgagcagcgccaagtcctgctccctgtgcctggtgccctccctcaagccgtcatacgctgcccgagagaagcccttccaacccgactcagcatctttaacctgctgctttcccaaacagcgctggctctctgagtttgcaccccgctaagaccttttcccagcccagccccgccgccccgcgtgcgggatgaaccgagccggtgcctagccgaagtaaagagagtccgccgcggacagagtccctgcctgagaccgcagggcctcggagtgtccccggaccttggagcctctctccagcgtcctccttggctatgccctcggccgagacccgcttttctcatctggtttcccctgtgactggcccttcctttgaagtctgccatcacctctcctggtcccaggaccttgtctttctggccgcggacgggctctagctgccctacacgggtccccgccctctgtcccgggcacacacccccgtgggcatgcgcccctcactcactgtcctgctgcggggtgtcgctgccgctggtgagtcccggcgactccagcaggctccggccagcctcgcccacgttctcatccgcctgtgccgccaccatgtccccggcttcctccaggtctagcaggtgactgacggagaagttctttttcgcctgcagggtgtcgaggttgcccgggctgtccaagcggccgcccagcgccggttgccgctccagaacgtgcccgtagctggaggtcatggtctcccccaccgatcccacccacccccctcttcccgctcgaatcaacaccaaacgctgtgggcgcgaggggggagaggagccgagtggggaagaaagaggggggtagtggagagagagagagagagagggaggaagagggagggaaggagaggaaggccaaaaaaaaaaaattggaaaagagggtgggggacccccttctgtagagcagagcgttgtgcaccagccgccttccgcagcattggttgatttcctgaggccaagtccggcgcggtccaaagagataatccacagtaaaatacaatattaaaaagtcaccctatgttcaagtcaggagaaaaaaatcccttccaactctccaaaagtgtccacacgcacagactaaaaataataacaagggggagagaggaaagcggaggccagcagggcgggggagttaggcaaacagaagaagagagaagaaggggtgggagagaagaatcaaagtgaatggtttttttaaaggttaaaaaagttattcccaggcaagagttcaagcaccaacagaagaaggcttgttccagctttaaaacatcttcaagaaaacgtgttcccccctctctgcactcctgtggattctcaggagtgactaaagtttcaggaggagagggtgatgtcttgcagatgtattagagagcaggattctcactttactttttgtaaagagtaaaaaaaaaaattaagaattaaaaaaaaaaggcttcaagagtccgacggagggtgctggtgggttcccccctttccccttctctctctccccctcttcttgctgggctcctttttccttctcagttggatcaagaagctctctggcacttcaaaaggcacaaactggcatgcagaggaggctttgtagggaatacaagaaaattggagacccctgggagggcagatctcgacttaataggagcctgtaattacgtggcaaagcctttgtgctgtgcctgacgtttcacagaccccctttctccatcacaatctccttcttcctcctttccctgggaccaaaaaacagtctgattaagaaaaccccctttgccaacatcagagttagagagaaagggagagggagggaacaagagagagggagggagagagggagggagggagggaggaagggagagagagagagagagaaagagagaagagaaatgagagagggaagagagcaagagagcccctttggatttctaaaggtctaattatcattcccctgcaataatatcacggggagaaaagacaaactgaaactcacagtcacttcaaacgtgctgattattttgcttcggcattaactcctccagatttgtttaagatcctgttggaaaatctcatttgcatgttttgataacagctgtggggaaatttggaaaaaatccaccaccatcacaatcaaattttcttctccttctgccttcccccaaaccgcccccccccaaaaaaaaattttctgctgttctaacagtttggggcggagtacagggagaaagtaagcatattaaggctatttttggttccgtagagggagcctattaaataatgtaataaaaataacaaaagggatgataataggaagttctctcacgcctctcgcaaggactaaaggcaggttggggagatccagagggcaccgagtttatttgaggctttccccgccattaggcataccaggactagggcaatgagaaaagtacgtgtttattaaactggaagaaaggactccaaatatatattataatctttctccctacccccgccaattttgtaacttctacggtaaggccaaagttgcttccccaggcgaggacgctaaacccagagggtcccgctgcccagattccttgaagcaggcaggagcactcccagaggcaggagttggggaggcttccgtgcggttctgcgtccagcctggctgtggtggcaggaggacagagaggggcggaggaacccccatctaagtctacggataatcctctgtcgtccgtctgcggagccctaacctgacaga

SEQ ID NO: 1741 - DNA, 4001 bp, Homo sapiens
atatactgcataccaacttcacatcaaagtagctgtatttttctgcatacaacaaagccagtcagaaataaaacaaaacaacaaaatatccacactgacaaacaaataaatgttgattgacaggtggggattccagtccccaaacacctggacccccttagctggcagagcattttcttccctgtggtggaagagaagccttcatcctgcccacaaagccctgcactgtattcctaccttgttttgagactagtccccatcccgtagcccagcaattggcactggtaaggttcacttctggagttgcaaggcaaaccgggagcacggactcagaaaacacaatgcgggtcttcagctgcaccagggccacgtcacctccgatggggtggtacatctcatatgtggggtgcaggatcaccctgttcacctcataccactgggtgtggttgccggccaccctgaggtttacgaggcctacgtacatgtcatagattttgatattcttgtccctgtgggggtgagaacagaggtacaatgcccgcagcttcctgtgtggtcagcccacaggcctggggaggccaagcgcaaggggctggcactcactcggtgggattgaaaagccagtttcttcctgcagcatagtagggacctatctggctgtctggaagagttgccccctaaagagtcgacttggcccatggaggctctggggacccaagtctgtacacgaccaccagctgtacaggccagcagcccatgcatgtgagacctgctctgactcttactgacaacctggttgcacacatccctctggaggccagatggccacaggagaggcgtgcctgctgtgcggggcagctgtggtgaatggggctgttggaggagcaatcgggaaggccaggtgcttagagaccagccttgcttatgaggacctggctgtgcacttgaggagcagcctcacttttgtgggacctggctgtgcacttgaggaccagcctcacttgtgggaatctggctgtgcccttgaggaccagcctcacttgtgggaatctggctgtgcccttgaggaccagcctcactcgtggggacctggtcgtgcacttaggggaccagccttgcacatggggaccaggctgtgcatttgaggaccaacctagctcatgggaacctaactgtacacttaggggatcagccttgcatatgaggacctggctgtgatcttggggaccagcatcactcttgaggacctggctgtgcacttgggggaccagcctcaagaatggggacccagctgtgtgtttggggaccagcctcactggtggggacctggccttgcgcgggtcgacagtggtgaagggagtcgacaatggtgatgggggaggcttgcgtggggtccatccaagccgctgtgggcactccgtgcaggcccagctacccacaccatcccaggccggcgcccgcttacctgtgaaagcagtgcgcagctgacagcacccagtactcattgaggatggagccgccgcagacgtggaggcctgcgtagtgcacgctgacctgccacggccacttcctctcgggcgcagggacgccgcccaggattttcccctccatgctgggccgaccacaggctgcagggagaacggagctgacggtggagccatgctggggccacgggagaggtagggcaggcaggggacgtgggggaggggcaggggacacaggaggaagggaaggcaggggacatgggggaggggaagggatgggcaggcgacatgggggaggaggcccagcaccgacagacgccccaagggcactgtctccagccgcccatccgcccctggggcagggcctacccacgctgccagttagggagattccctggttctctggctgtctgtggaccaatgctgcgacccggggaggggccaccaccaggagcagcagcagaaggcccagggcagagggcccgagtgggcccatgacggaagcaggggcagccatgaggctcgaggcagcgcccccagcgggtgactagctcccgacatgtgactgtgtctccagcacaggattgcgcccccaacaggtggttgcaccccaacatgtgactggctcccactagcagatggcactcccagcaagtgagggcacctgacctggacatgcgactgcacccccagcacatgtctgtgtctcgtggatttacctctcccgacctgggcacatgatggctcccaagctggacatgtgacagtgccccaaccatacctcatatgcctaggtgtggcattccattccacagtcaggtctaaacacactggtccatttgagaattctgtgttttgaatcgtgatgttctcagttttctccatggcccagcttaattctgttaggtcaatgacaatttatacatctgccacccagctatcaaaaaaaaaaaaaaaaagaaagaaaagaaaaagaaataggctgggcaccgtggctcacaccataatgccagcactttgggagggtgaggcagatggatcacttgaggtcaggagtttgagactagactggccaatgtggcgaaaccctgtctctactgaaaatacaaaaattggctaggtgtggtggcgtgcaactgaaatcctggttccttgggaggctgagacaggagaatcgcttgaacctgagaggcagaggttgcagtgagccgagatcacaccactgcactccagcctgggtgacagagcaagtctctgtctcaaaaaaaaaaaaaaaaaaaattcattaagccttcatttatatctactaaaatttatcccattgattctacattatggtgagttgtataattatttcatgatatattacaatgtaataataatagaaataaagtggacaataaatgtaatatgcttgaatcatcccaaaacaatttccctgccaggaggcaactttggaactgggtaacaggcagaggttgcaacagtttagagggctcagaagaagacaggaaaatatgggaaagtttggaatttcctagagacttgttgaatggctttgaccaaaatgctgataatgatatggacaatgaaatccaggctgaggtggtctcagatggagataaggactggagtaaaggtaatgcttgccatgttttatcaaagagactggcagcattttgcccctgctgtagagatttgtggaactttaaacttgagggagatgatttagcatatctggtggaaaaaatatctaagcagcaaagcatcaagaggtgacgtgggtgctgttaaaagcattcagttttaaaagggaaacagagcataaaagtttggaaaatttgtagcctgatgatgtgatagaaaaagaaaaacccattttctgaggagaaattcaaactggctgcagaaatttgcataagtaatgaggaaacaaatgttaatggccaagacaacagggaaaatgtctctccagggcatgtcaaagagctttctcacagcccctctcatcacaggcctggaggcctaggaggaaaaaatggtttcttgggccagtcccagggcccccatgctgtgtgcagcctagggacttggtgccctgcattccagctgctctagccatggctgaaagggacaaaggtacagctcaggccatggctgcagagggtgcaagccccaagccttggcagcttctacatggtgttgagcctgtgggtgcacacaagtcaagaactgaggtttggggacttccgcctagatttcgcagtatgtatggaaacgcctggatattcaggcagaagtttgcagcaggggtggggccctcattgagagcctctgctagggcagtgcagaagggaaatgtggggttgaagcccccacacagagcccccactggggcactgcctagtggagctgtgagaagagggccactgtcctccagaccccagaatggtagatccaccgacaccttgcactgttcacctggaaaagctgcagtcactcaaggccagcctgtga

SEQ ID NO: 1742 - DNA, 4001 bp, Homo sapiens
tagatcttgctccttgggggatgaatgcagggagagaaaggtcgagatgccagcagtattggaaaaatcaagtatttttccagcttcatattgctgtagagaatatactattcgggctgggtacagtggctaacacctgtaattccaacaccttgggaagccaagccagggggattgtttgagtccaggagtttgaaaccagattgggcagcatggcgagaccctgtctctataaaaatacaaaaaattagccctgcgtggtggcactgcctatagtcgcagctttttcgggaggctgaggtgggaggatcacttgagccggggaggtgatcacaccattgcactccagccagggcaacagagtgagaccctggctgaaaataaataaacaaatacaaaataaaaatagagaatatactactaacctgggggtcgggggaggctctggaggatatatgctggagagtagatgcatgcaaagaaatactatttggtgaggtttcaggtccaagggcactttaccaaatggtggaagagaccagtcatttgggttactggggggtaaaatccaactgtttagcacttagaacggtgccccaaaaactctacattagtcctccaataagcgccctgtggtggactcagaggtaacaaaaagggattggttccaaatggccttatgcattgaaataactccccaaatttgtttttcacaaggaaaatgtctatgtaattggtgttaaaatggaccttctccccaattcaatatgaagacaattcatttattccagcagctgagtctgcagcaggaattagtgactttcaggatttgttaaagaccagaatctgtccctcaggggaatttgtagagtttaagatatctaaaaaggaaagctcagcaagccatctatctaggtttcttcagggcagtataactcaaagtagaggggccgggtgacctcctggagcctgtctctggttagctttttgctgctaactggggataacagcctaatgcctcatgacggctcagcatggctgggtgagtccaactgagtcagagagcaccaaaaataagccacaaagcattgagtagtcatatttatggttttgattccaaacacactttgtgcttatcccttccaagtggagaatttttatgtcatttgtgtgcgttaaggccaaaggagaaacctggaggcaaaggaatgctggttgtgggtcaacaaatatgcctgatggattttgtatgtttggcttaaaaacactgacttaaagtaaaatactgtgactacttctaacctagaaatgagttcagcccgccagacagaaactgccattcggaggaaataaggccgtgagcaccggttccctccacacccccgaggttcacctggaggccagtgggccaagcgaagccttgggagcggagaactcaaagaggggcggggagaaaagaataaacacacctcgcggggctaggctggcggcggcacagtcctggtttttttgatggaactgaccaagatgacagcaagcagaggctcaaatgcaggattcagacccaagacttctccccgctctcaggcggaccccaaaggcggggagccaaaaaccgggagactgaacaagcagcattctcacgctcctaaactggcttctcgctcctcgctcctcatgccccaaaactgatcaggccccaacccccctccccacaactcagtgttccctccacacggaccgtcgaggctcccccagatcccacgtcttcgtccttcctggaccccgtgctccattccttacagtcacagacagggattcgttacctgcagagcagctcgacaaccctgcaggtagtcctccatgatgaagcccaaagtacgccgtcgcccctggtcgagtagaggtgcccctggtcgaggagaggtttccccgacgaatgcagcccgcccgggactcagggactagaggccagagtcaggaggcgggactcgaacccgccacacggcgaatcggcctccgaccccgggaggaactgcgtaagcgggcgctccggagtccggcgtcgccccgcccccagcggcggaggcggggctctacgcccagaggctcctgggacgtctttccggcgaggccaagggggcgtggcgtggggcgacgtgggaaacgtagtcccgcaactccgcaatgtccctagcaaccgagggaaggattgttttctgagggatcagtcgttcggtaaacaaatgtgtatgtgtcacagtaacccattattgtggcatctgaactttccctctcagatcaggccaagtataacatctttacatatatcacaccgagcatctggtgacattttaaatgacacttggcaaaacagatcatcttctttctacaaattctgccctttaccaaactgactcagtcgccaccaattttgtggttgttcatgttaggagaacattagaataatctttgacccctcttgttaacacctacagtctcctgccaactcctgctgcttctccctttgcaactctgtagcctgtttttttctacagcctcggcaaatatcttcttcctttcttggacggttgtaaccttggctttttgctctctgccaccctaattgttccaattgctctttcagcctttagagttgcttgaaatttcatcctgtggcggccctgtacatagagtttagggaacccttcagaatgtggagttaggttccaacctcccttaactgccactttccagccgcagagtagtgcaggtactgcaaataaatggacactcatcatcaaaaattccctcatttatttatctatccctttatttcctaccgtcagcctcacaccagcttttcctgcttccccagctgtaaatcgagaggaggtgactgatgagaggcctgcagtggaaccaagatccagagcacaggcgtgttggatctcctgcctgctctgccagttcttttcttcttcttcttctttttgagacggagtcttgctccgtcttcaggctggagtgcagtggcaggatcttggctcactgcaacctccacctcccgggttcaagcgattctcctgcctcagcctcccgagtagctgggactacaggcatgtgccaccatgccctgctaatttttgtatttttagtagagatggggtttcactatgttggccaggttggtcttgatctcttgaccttgtgatccgcccgccttggcttcccaaagtgctgggattacaggcgtcagccatcgcgcccagagcctggggcttctaccacaccctctgcactctaccaggtgcacaacccaaccagtttcatttctagacttaaaaatgatacagcaaggacttggaaaggagctctctggagggctccagagggaaaagagctgggtttgtttgtttgtttttaacattaattgagtaatacatgcaaatatcgtgctctttgctcctgcttctgtggatccagagcaaaggactgccatacccagagagagagcccagatccaacaagctgcttctgtccagcccttctcctccctacttagcaagggcacttgctcttccctattctcaccagagaggcacaagcgctccgtcccttctagaggcaggcagagggaagagaaagggtctgttgtttttctctcctgtttctcgctccctctctgctgatcacaaagctgctgaccgggtcagaaagtcctgatggaaatccaccagcgctgggcaggcccctcctcctccagggagcttgtccttgcctaatttttcttcgtcctgatgagaacaaaaaagagagagagaagaaaagaaaaaccacaaacttcctttgaaaaccagcttgtagtcagggcccggagcgcatgccatagactcggcgactcaggaatcctgaagactctctgagcgacctggagcaccttggctgtgtccctgcctgccttcaccctcctccagtgcccccagtactgggcgtgagtc

SEQ ID NO: 1743 - DNA, 4001 bp, Homo sapiens
gactccacaaaactttcccagcagtagtggagagacacgggtaggagttgaatacaggaacctcctgcgcaaaaactcaagagataaagacagtgtagccagctatgttcaaatcctggtgcttaaagcactgaagccacataactggactagctgcttaactccctgaacttgtttcctcttctgtaaaaaggtaataataaactatttcagtgtcattgaaattcttaagatcttaaattctaatattctgtacaagatagctttttattatgaccaactcataagcgagatatatgtcattattaacatcgataacagagaaaggccaaagtaggcaagaggcaaaccccccttggggggacggtgagcagctacggaggggagacaggtgtgacattatgcaccacagctccaggcaccccagcagcagcccctagcccttgctcctcctcctccttgctgctctttcaaatagacaggaacaagccactcactccccacatgtgaacatgctggactcaagacttggcacatgggcacttcaacaccaaagggtacagagttttccccaaaaacctgatacatccatcccacttcaaagcaacatgcccccaagccctcactccagtctctgccctggaacccaaggctcaacgtgggcgtcgtgaggacgcagctctgaggtggggccaagaaccaggccccttctgcacctgcgccagtcaccggctgcccacaaccacattcaggagagaagaacctgaggctcacacacctgaagcagcttatcccgagactccaattaccgccaaaggtcttggctgaaggccttggaggctcaggtgtctgcagaattggctacagaggcatcagaggcttccttactggaagctggggtcggtcctaatcaagttacttcgtagacagccttggcaaccccaggctgtcgcttctgagttaagttagtctacaatcgtctctatggaatgctctcaggttctccatttgtaaatagggatgcagttacttcactcaacaccgttcatacctttcaaagggaatacttattaaggcaataaacaggggtgaggtctgctcggagggatggacagcagatctagaagccaggacactggggtcgaagcctggctctgctatatcgtacctgggcgaccttgggaaaagtcactttagctctgtggcctcagtttcttcatcagtaaaattcagaggggggactagcttctgtctcaggttccttcagctccaaaagcttgcttctggctgtctcctcactgctggaaatgcctgataaaacagccaaacaccgctgctaacagaaaccggctctaggcttgagcctgcggccctgcccctcacgtgcgggcagagcccccgcgcgcctccttcccggggaaagcatgcccaggacccggtgctagaggccgaatggactcggcgcaacggaggtctccggcgagagagaagaagaacaaaacgcccccgcctgctacacgcctcagagacccacgtgcaccgctcctttaaatgcaccggccctttaaccgctcgcgccgcgcccacccccagccggggctcggcggcaggcgggcgcagggaagtggggacgcagtgaggccgaaggcctgagggccgctccccgcgatccttccacgacccagttccgggccggcccagccgccgcctgccgggcactctcctctctccgcccccgcgctggccgcagaggccaggagcgctgcgcacgcaggggccgcagacccacagccggggaagggaccgtggccagaggcgtgcggagggcagggcagggccctcagggcgcagccccaccccgggccctcagcgccgcaggcgacagggccctggcctgggcaccccccggcaccgcccgctcacctgctctgccgccgcgctccagcggagtttacgcagctggctgagcgcccggccggacccggcgccggcccaggccccgccccacgcccgcccaggccacgcccggtgggcgacgccgcgttccctcgtccactggggccccacctggagtcccgggcgcgcggggagggtggccttcacgccgcgtggatgacagggtcatcccgacgtcggaactaagcgacgaccttagaaggagtggaggccgggcctgtcatcttcctgcgggcctggcagcagcgtggggcggtaggacataggcttcgaggacactctttcttgtagttttgggtccacatcccctcctcctcccggttgttctcacattaaaggagcactaatggcccaatgtgagctaacaccatgagaatgttcctggtctgttccctagggcgcttcagagccaccaggagctctgcataaaattgaacaggaataaattgctgcctgacctgagaattggcctagggggttgtggttccaggatttggggtctgtggggtaggttgagattgtcaataatttggcgttgtctgagtagttttacttttttttttttaacttaaggtgaaattcacataacataaaatttaccattttaaagtgggcatttcagtggcatttagtgaattcacaatgctgtgcaaccaccacctctgtctagttccaaaacattttcctcattccgaaagaaaaaccccatacccattgagaagtttcttcccaatgccctcttcccccccagcccctggcaattaccagtctacttctgtctctatatttacttactttagatacttcatataaacggaatcacagtgtgtggacttttgtgtctttcacttagcatgttttcgaggttcatcctcaggtagcatgtaacagactttattcctttttatgactgaatagtgtttgtgtgtgtatatgtatatgtgtgtgcgtgtgtgtgtgtgtatcatgtatgccacagtttattcatctatggacattggggctgtttgcatcttttggctttgtgaataatgctaccatgaacatgcatgtacatgtatttgtttgagagcccatttttatttggggagggtacatacataggggttgaattgttggatcgcatggtaattcaatttttttttttttttgagacagagccttgctctgttgcccagcctagagtgcagtggccgcaatcttggctcactgcaacctctgcctcccaggttcgagcaattatcttgcctcggcctcctgagtagctggagttacaggtgtgtgccaccacatctggctaatttttgtatttttagtagagatggggtttccccatgttggccaggctggtcttgatcctgaactcaagttatctgcctgccttggcctcccacagtgctggattataggcatgagccaccgtgcccagccttcagtgtttaactatttggggaaccccaagtggtttccacgatggctgaaccattttatattcctaccagcaatgtacaggatcccaatttctccacatcctcaccaacacttgttattttccattttattgttatcctagtaggtgtgcagcggtacctcattctggttttggtttacattttcctaataactaatgctattaagcattctccttttcatgtgtttgttggccatctgtatatcttctttggagacatgcctattcaagtcctttgcccattttaaaattgggttgtctttttgttgttgggttgtaagagttctttatatattctggacactagacccttatcagatatatgctttgcaaatatttctctcccattctgtaattgtctttttcactttctgatgtcctttcatgcacataaaactttaattttgatgaacttcagcttaactgttttttcttttgttgtttgtgcatttggtgtcctgtgtgagatatcattgtcaaatccaaggttgtgaagatttactcctgtgttttcttctaagagttttatagttttagctcctatatttaggttgttgatccattttaagataat

SEQ ID NO: 1744 - DNA, 4001 bp, Homo sapiens
agagtctcaggccgagcgaggtggctctcgcctgtaatcccagcactttgggaggccaaggcaggtggaccacgaggtcaggagttcaagaccagcctggccaagatgaggaaaccctgtctctactaaaaacacaaaaattagccgggcgtggtggcaccgcctgtaatcccagctactcaggacgctgagtcagagaattgcttaaacccaggcggcaggccaggcgcggtggctcactcctgtaatcccagcactttgggaggccaaggcaggtggatcacgaggtcaaaagatcgagaccatcctggccaacatggtgaaaccctgtctctactaaaaatacaaaaattagctgggagtggtggcgcgcgcctgtagtcccagctactcgggaggctgaggcaggagaatcgcttgaacccaggaggcggaggttgcagtgagccgagatcatgccactgcactgcagcctggcgacagagcgagactccgtctcaaaaacaaacaaaacccaggagggggaggttgcagtgagccaagatcacgtcactgcactccagcctgggccacagagcgagactgtctcaaaagagtctcctatatgcgagcaaggagcttgattttgtccattgctgtagcaccagcacctagaacagtgccttgttcacagcaagcactcaagcacattaactaagagaataaaaagggatgtattttaggccgtcttgggaagacagaaaaataagtaacaaagcagtcaatacatatgttaagtaaatggccacaaaatttaataaatgccttctgataagcataacaatttctatcatacacaccctaactcaaaattatgtcacccgaagatgattctcttcaatgttctggaagttaaatatcgaccaacaaagtcactttataggacagtggggaaatatgtcaaaacttcacacacatcttctacgagtcagtaaaaaagatgaaaaagtggtaactgcaggtggtaaaacttcgacaggatcagcatatacttgacaggaaatgcagcatctcataccactcagtacaaagaaaatgtctgccttccctgactttaaaaaagagtagctatgtaaaaacttaactgacgaaaacagaaactgaaagtaaaaatgtctacagcatatatatgtacaacttaatattgtgaacattttcataccacaaaagttttttaaaacttgctttaaacttttaaaaagtcagaaaaaattttggtcaattggaatcggcatgatgagaaatctcttgaaaaccattctaaattccagttcctataaaatcagactccagacaatatatccagccaaagctacgactgccttcgcgcttctgaagaaactatacaccgcagcatgccctactacaaaccagttgctttttcttccaggaagcacgtttaactttttgtttgtttgttcaaggcagtcatactaggcacgaaaagatgaacggagcaaagagtgacccttggccttctccgggttcaaggtaggagttccggctcctcacgccttctttaccaagcaccagccggagcttctcgcttccgcaccgagttaggacccaggggtgactcagcggtaggacaagtgccgccgatgtggtctagcttggggaaggacggcgggcgcctgaggagggcataacatccccaggtccggccagtctcgggttcctggggagccccatgacacggcagaacccaggccgcgcggccaggtcccgggcctgcccacccataattcccacccgacgtcccccagctgcacggacctgtcgtactcagaccgggtaagaaacatggcgagggtaggaggaggcagcggctacgcggggattctgaggaccaacacgactccaccggcacccaactcaccggcagccaactcacccacacggccgcagtactaaggaccaactgcgcgtgcgaccgcgacctctttagcccgccctcctgtgcctgcttcctattggctggtagtagttcccgcctaggtgattgggccaacgcgcttcctcacgagggcttggttggtccggaggaggaggaggaccagggaggtacttccgccttaaatcgcgggtggttgctagggacgataggcacccaaggcgtgtagtgagttcgccttgtagagaagatgtgagcccgccccaagactggcaattggaaaggcttgcatgcagagctgggttgtctgaaccctgacataataggtccctcgccggctcccgtaatcccagctagaggactttggtcccgtttccggcaaggccaccacctgacttctcttcgcaggattccctctcttagggttcctccacggtgttctccatgcccggtcgagggctccaggactttgggcggtaatgagtcggctacagtgggtctgagccggcgccgcggacgagtcccttcgtttcagccagtttggctcgtttattgagaaaagtggggggcgaggggttagtatgtaagaaagtcttaaagtttccacatggttaaggtaattttatcaactctttcttgcacccctccccctagtacaggtttcagacctaaataacctagagttcaggatccagacttcaaaatattcactgctttttctgttgtttgtgaaaaataagtgttttctttgagcccagatcgtgctattgcactccagcctgggcaacagccaaaccctatccgaaaaaaaaaaaaaaaaaaaaagcgctttctttttcgacgcttcttgcttcccttcaataagttgcttgaggagcaactttgcagcttcgtaataacactgtaattcaagtatttgttcaagaaaggcaagtaagaagtcttggcacgggggtggggaatatagggaaatgttggtcaaatgatacaaagtttcagtcagagaaggtggatgagttctatagttaataatcatatattgtgtacttgaaattgtgaagagggtacaccttaaatgttctcaccacaggaaagtatgtgagatgatggattatgttgattagcttcatttaattatttgcagtgtgtgtgtgtatatatatgtatatcaaaacgtcacgttgtataccataaacatgaacaatttctatttgtcacttacaccttaaagctggagtcgggggaaagaaatcatttatcaggcagtatatgctggaaagggaaatgccagcatctcatttccagttgttaatgtgataccactagtcaagtccttaacctctcaaggcctgtatctctccagtaaagttcattcttggtcctagattaggtttgtaagtcaccaaggcatttcaaaggtgcaggaaatgtaaaaataagccttttgagtattaaccaagattagttttccccaccctttattttctgacttccttcatggattcagtaggagtttagtttggtcatccctggccaatcagatgtttagcactaataaaactgaggaagaactccaagtagcaatcctctgggatctgttagatttctgagaaaagaatggtaatttttagctttcttgtcagctttctgacaagctttttttttttttcaccttatcagttattttctatggaaaagtcttggtcgtaaattcactacagctgctctttagaagttcttttatggccaggcacaggggctcacgcctgtaatcccagtactttgggaggccgaggtgggtggatcacgaggtcaggagttcaagaccagcctggccaagatggtgaaaccctgtctctactaaaaatacaaaaattagctgggcgtgatgttgggtgcctgtgatcccagctactcggaaggctgaggcagagagttgcttgaacctgggaggcagaggttgcggtgagccaagatctcaccactgcactccagcctgagcaacagagtgagactccatctcaaaaaaaaaccaaaaaaaacggagttattttactacgtaggtact

SEQ ID NO: 1745 - DNA, 4001 bp, Homo sapiens
gccactgtacctgtaaacaattctttaagagtctcaggccgagcgaggtggctctcgcctgtaatcccagcactttgggaggccaaggcaggtggaccacgaggtcaggagttcaagaccagcctggccaagatgaggaaaccctgtctctactaaaaacacaaaaattagccgggcgtggtggcaccgcctgtaatcccagctactcaggacgctgagtcagagaattgcttaaacccaggcggcaggccaggcgcggtggctcactcctgtaatcccagcactttgggaggccaaggcaggtggatcacgaggtcaaaagatcgagaccatcctggccaacatggtgaaaccctgtctctactaaaaatacaaaaattagctgggagtggtggcgcgcgcctgtagtcccagctactcgggaggctgaggcaggagaatcgcttgaacccaggaggcggaggttgcagtgagccgagatcatgccactgcactgcagcctggcgacagagcgagactccgtctcaaaaacaaacaaaacccaggagggggaggttgcagtgagccaagatcacgtcactgcactccagcctgggccacagagcgagactgtctcaaaagagtctcctatatgcgagcaaggagcttgattttgtccattgctgtagcaccagcacctagaacagtgccttgttcacagcaagcactcaagcacattaactaagagaataaaaagggatgtattttaggccgtcttgggaagacagaaaaataagtaacaaagcagtcaatacatatgttaagtaaatggccacaaaatttaataaatgccttctgataagcataacaatttctatcatacacaccctaactcaaaattatgtcacccgaagatgattctcttcaatgttctggaagttaaatatcgaccaacaaagtcactttataggacagtggggaaatatgtcaaaacttcacacacatcttctacgagtcagtaaaaaagatgaaaaagtggtaactgcaggtggtaaaacttcgacaggatcagcatatacttgacaggaaatgcagcatctcataccactcagtacaaagaaaatgtctgccttccctgactttaaaaaagagtagctatgtaaaaacttaactgacgaaaacagaaactgaaagtaaaaatgtctacagcatatatatgtacaacttaatattgtgaacattttcataccacaaaagttttttaaaacttgctttaaacttttaaaaagtcagaaaaaattttggtcaattggaatcggcatgatgagaaatctcttgaaaaccattctaaattccagttcctataaaatcagactccagacaatatatccagccaaagctacgactgccttcgcgcttctgaagaaactatacaccgcagcatgccctactacaaaccagttgctttttcttccaggaagcacgtttaactttttgtttgtttgttcaaggcagtcatactaggcacgaaaagatgaacggagcaaagagtgacccttggccttctccgggttcaaggtaggagttccggctcctcacgccttctttaccaagcaccagccggagcttctcgcttccgcaccgagttaggacccaggggtgactcagcggtaggacaagtgccgccgatgtggtctagcttggggaaggacggcgggcgcctgaggagggcataacatccccaggtccggccagtctcgggttcctggggagccccatgacacggcagaacccaggccgcgcggccaggtcccgggcctgcccacccataattcccacccgacgtcccccagctgcacggacctgtcgtactcagaccgggtaagaaacatggcgagggtaggaggaggcagcggctacgcggggattctgaggaccaacacgactccaccggcacccaactcaccggcagccaactcacccacacggccgcagtactaaggaccaactgcgcgtgcgaccgcgacctctttagcccgccctcctgtgcctgcttcctattggctggtagtagttcccgcctaggtgattgggccaacgcgcttcctcacgagggcttggttggtccggaggaggaggaggaccagggaggtacttccgccttaaatcgcgggtggttgctagggacgataggcacccaaggcgtgtagtgagttcgccttgtagagaagatgtgagcccgccccaagactggcaattggaaaggcttgcatgcagagctgggttgtctgaaccctgacataataggtccctcgccggctcccgtaatcccagctagaggactttggtcccgtttccggcaaggccaccacctgacttctcttcgcaggattccctctcttagggttcctccacggtgttctccatgcccggtcgagggctccaggactttgggcggtaatgagtcggctacagtgggtctgagccggcgccgcggacgagtcccttcgtttcagccagtttggctcgtttattgagaaaagtggggggcgaggggttagtatgtaagaaagtcttaaagtttccacatggttaaggtaattttatcaactctttcttgcacccctccccctagtacaggtttcagacctaaataacctagagttcaggatccagacttcaaaatattcactgctttttctgttgtttgtgaaaaataagtgttttctttgagcccagatcgtgctattgcactccagcctgggcaacagccaaaccctatccgaaaaaaaaaaaaaaaaaaaaagcgctttctttttcgacgcttcttgcttcccttcaataagttgcttgaggagcaactttgcagcttcgtaataacactgtaattcaagtatttgttcaagaaaggcaagtaagaagtcttggcacgggggtggggaatatagggaaatgttggtcaaatgatacaaagtttcagtcagagaaggtggatgagttctatagttaataatcatatattgtgtacttgaaattgtgaagagggtacaccttaaatgttctcaccacaggaaagtatgtgagatgatggattatgttgattagcttcatttaattatttgcagtgtgtgtgtgtatatatatgtatatcaaaacgtcacgttgtataccataaacatgaacaatttctatttgtcacttacaccttaaagctggagtcgggggaaagaaatcatttatcaggcagtatatgctggaaagggaaatgccagcatctcatttccagttgttaatgtgataccactagtcaagtccttaacctctcaaggcctgtatctctccagtaaagttcattcttggtcctagattaggtttgtaagtcaccaaggcatttcaaaggtgcaggaaatgtaaaaataagccttttgagtattaaccaagattagttttccccaccctttattttctgacttccttcatggattcagtaggagtttagtttggtcatccctggccaatcagatgtttagcactaataaaactgaggaagaactccaagtagcaatcctctgggatctgttagatttctgagaaaagaatggtaatttttagctttcttgtcagctttctgacaagctttttttttttttcaccttatcagttattttctatggaaaagtcttggtcgtaaattcactacagctgctctttagaagttcttttatggccaggcacaggggctcacgcctgtaatcccagtactttgggaggccgaggtgggtggatcacgaggtcaggagttcaagaccagcctggccaagatggtgaaaccctgtctctactaaaaatacaaaaattagctgggcgtgatgttgggtgcctgtgatcccagctactcggaaggctgaggcagagagttgcttgaacctgggaggcagaggttgcggtgagccaagatctcaccactgcactccagcctgagcaacagagtgagactccatctcaaaaaaaaaccaaaaaaa

SEQ ID NO: 1746 - DNA, 4001 bp, Homo sapiens
tacaggcatgagccactgtacctgtaaacaattctttaagagtctcaggccgagcgaggtggctctcgcctgtaatcccagcactttgggaggccaaggcaggtggaccacgaggtcaggagttcaagaccagcctggccaagatgaggaaaccctgtctctactaaaaacacaaaaattagccgggcgtggtggcaccgcctgtaatcccagctactcaggacgctgagtcagagaattgcttaaacccaggcggcaggccaggcgcggtggctcactcctgtaatcccagcactttgggaggccaaggcaggtggatcacgaggtcaaaagatcgagaccatcctggccaacatggtgaaaccctgtctctactaaaaatacaaaaattagctgggagtggtggcgcgcgcctgtagtcccagctactcgggaggctgaggcaggagaatcgcttgaacccaggaggcggaggttgcagtgagccgagatcatgccactgcactgcagcctggcgacagagcgagactccgtctcaaaaacaaacaaaacccaggagggggaggttgcagtgagccaagatcacgtcactgcactccagcctgggccacagagcgagactgtctcaaaagagtctcctatatgcgagcaaggagcttgattttgtccattgctgtagcaccagcacctagaacagtgccttgttcacagcaagcactcaagcacattaactaagagaataaaaagggatgtattttaggccgtcttgggaagacagaaaaataagtaacaaagcagtcaatacatatgttaagtaaatggccacaaaatttaataaatgccttctgataagcataacaatttctatcatacacaccctaactcaaaattatgtcacccgaagatgattctcttcaatgttctggaagttaaatatcgaccaacaaagtcactttataggacagtggggaaatatgtcaaaacttcacacacatcttctacgagtcagtaaaaaagatgaaaaagtggtaactgcaggtggtaaaacttcgacaggatcagcatatacttgacaggaaatgcagcatctcataccactcagtacaaagaaaatgtctgccttccctgactttaaaaaagagtagctatgtaaaaacttaactgacgaaaacagaaactgaaagtaaaaatgtctacagcatatatatgtacaacttaatattgtgaacattttcataccacaaaagttttttaaaacttgctttaaacttttaaaaagtcagaaaaaattttggtcaattggaatcggcatgatgagaaatctcttgaaaaccattctaaattccagttcctataaaatcagactccagacaatatatccagccaaagctacgactgccttcgcgcttctgaagaaactatacaccgcagcatgccctactacaaaccagttgctttttcttccaggaagcacgtttaactttttgtttgtttgttcaaggcagtcatactaggcacgaaaagatgaacggagcaaagagtgacccttggccttctccgggttcaaggtaggagttccggctcctcacgccttctttaccaagcaccagccggagcttctcgcttccgcaccgagttaggacccaggggtgactcagcggtaggacaagtgccgccgatgtggtctagcttggggaaggacggcgggcgcctgaggagggcataacatccccaggtccggccagtctcgggttcctggggagccccatgacacggcagaacccaggccgcgcggccaggtcccgggcctgcccacccataattcccacccgacgtcccccagctgcacggacctgtcgtactcagaccgggtaagaaacatggcgagggtaggaggaggcagcggctacgcggggattctgaggaccaacacgactccaccggcacccaactcaccggcagccaactcacccacacggccgcagtactaaggaccaactgcgcgtgcgaccgcgacctctttagcccgccctcctgtgcctgcttcctattggctggtagtagttcccgcctaggtgattgggccaacgcgcttcctcacgagggcttggttggtccggaggaggaggaggaccagggaggtacttccgccttaaatcgcgggtggttgctagggacgataggcacccaaggcgtgtagtgagttcgccttgtagagaagatgtgagcccgccccaagactggcaattggaaaggcttgcatgcagagctgggttgtctgaaccctgacataataggtccctcgccggctcccgtaatcccagctagaggactttggtcccgtttccggcaaggccaccacctgacttctcttcgcaggattccctctcttagggttcctccacggtgttctccatgcccggtcgagggctccaggactttgggcggtaatgagtcggctacagtgggtctgagccggcgccgcggacgagtcccttcgtttcagccagtttggctcgtttattgagaaaagtggggggcgaggggttagtatgtaagaaagtcttaaagtttccacatggttaaggtaattttatcaactctttcttgcacccctccccctagtacaggtttcagacctaaataacctagagttcaggatccagacttcaaaatattcactgctttttctgttgtttgtgaaaaataagtgttttctttgagcccagatcgtgctattgcactccagcctgggcaacagccaaaccctatccgaaaaaaaaaaaaaaaaaaaaagcgctttctttttcgacgcttcttgcttcccttcaataagttgcttgaggagcaactttgcagcttcgtaataacactgtaattcaagtatttgttcaagaaaggcaagtaagaagtcttggcacgggggtggggaatatagggaaatgttggtcaaatgatacaaagtttcagtcagagaaggtggatgagttctatagttaataatcatatattgtgtacttgaaattgtgaagagggtacaccttaaatgttctcaccacaggaaagtatgtgagatgatggattatgttgattagcttcatttaattatttgcagtgtgtgtgtgtatatatatgtatatcaaaacgtcacgttgtataccataaacatgaacaatttctatttgtcacttacaccttaaagctggagtcgggggaaagaaatcatttatcaggcagtatatgctggaaagggaaatgccagcatctcatttccagttgttaatgtgataccactagtcaagtccttaacctctcaaggcctgtatctctccagtaaagttcattcttggtcctagattaggtttgtaagtcaccaaggcatttcaaaggtgcaggaaatgtaaaaataagccttttgagtattaaccaagattagttttccccaccctttattttctgacttccttcatggattcagtaggagtttagtttggtcatccctggccaatcagatgtttagcactaataaaactgaggaagaactccaagtagcaatcctctgggatctgttagatttctgagaaaagaatggtaatttttagctttcttgtcagctttctgacaagctttttttttttttcaccttatcagttattttctatggaaaagtcttggtcgtaaattcactacagctgctctttagaagttcttttatggccaggcacaggggctcacgcctgtaatcccagtactttgggaggccgaggtgggtggatcacgaggtcaggagttcaagaccagcctggccaagatggtgaaaccctgtctctactaaaaatacaaaaattagctgggcgtgatgttgggtgcctgtgatcccagctactcggaaggctgaggcagagagttgcttgaacctgggaggcagaggttgcggtgagccaagatctcaccactgcactccagcctgagcaacagagtgagactccatctcaaaaaaa

SEQ ID NO: 1747 - DNA, 4001 bp, Homo sapiens
gtggctcattcctataatcccagcaccctgaaaggccaaggccagcagattgcttgagtccaggagttcaagaccagcctgggccacatggtgaaatcctgcctccactaaaaatacaaaaaattagccagatgtggtggtgcacacctgtagtcccagctacttgggaggctgaggtgggagaatcacctgaacccgggaagttgaggcttcagtaagctgagatcacaccactacactccagcctgggcaactggagtgagaccccgtctcaaaaaaaaaaagaaaaaagaaaaagaaaaaaagagaaacacagataagcaatctcgagataaaaatccacattaccggccaggtgcggtggctcgcgcctgtaatcccagcactttgggaggccaaggcgggcagatcacctgagatcaggagttcgagaccagcctgacacctgaccaacatggagaaaccccgtgtctgctaaaaatacaaaattagctgggcgtggtggtgcatgcctgtaatcccagctacttgggaaatggaggcaggagaatcacttgaacccaggaggcagaggttccagtaagccaagattgcaccattgcactctagtttgggcaacaagagtgaaactccatctcaaaaaaataaaaataaaaataatctgaattattattttcaaagttctactttcactaacacatagagactttcagtcacaggtattaagtaatatggtttgttacaaaaacactttgaaaaaactaaacgtactcttactatatgatccagcaatcacactccttggtatttacgcaaaaaaaaacttatgttcaaacaaaaacctgcacatggatgtatacattagctttattcatattgccaaaacttggaagcaaccaagatgtccttcagtaggtgaatggataaataacctgtagtatatctagacaatggagtatttttcaatgttaaaaagaaatgagctatcaagccatgaaaagacatagggtaaccttaaacgtgtattaccaaataaaagaagccaatctgaaaaggctgcataatccatgattccaactatatgacatgatgggaaaggcaaaaccatggagaaagtaaaaagatgagtggttgtcaggagttgtggggatggagaaggatgaataagtagagtacaaaggatttttagggcagtgaaaatactctgtatcctgtaatggtagatacatgtcattatacatttgtccaaacccataacatccacaacagcaaaagtaaaccctaatgtaaactatggacctgggtgattactgtcaatataggctcatcatttgtgacaatgtatcaccctggtggaagatgctgataatggggaatgctatacatgtgggtgaggaggaatgtgggaaatctttatacttcttctcaattttgctgtgaacctaacactgctctaaaaaatagtttttagggggaaaaaaaaagggtaagttgtcacaggccttcatattggtgtgtcccaaccaattctctgggaatgaatatttgccctttgggctgtacctattaataacaactgtgcacaaagacattggacttaagaatgaacaagtagcaacaggaggggttctggaaggccaaaaaagggcaaaaatactactcatgtataatgagaatataaaagaagcacaaaggatttttctgctctatctaacaatgtctgatatattacttacccgactccgaagacagtcagccaggtttcggcgtgtgaagttagctgctgccgtgggagacaattcatatcctggtagaagagataaagagtcatacttaaagtaaagcagaaggaataacagtgccccaaattattcactacccctgttcctaaagcccaccatcttttgtacactcagagtaaacaaagcatagactgaggggtacaatcctactctagtccctttcctcatgcaacagctatgaaatagctggttagtactgacagcaattcttggccacaaacagaaccagttctatagtggaatgaaacttctagcagccttgcttaaactattcattcatcaacacactgtggtttctgccgtagaaggaaaggaacacgaatacacaagaagtgaaaaaaaaagaaaggcgtcttagatgccaatcttttaaaagtttattttaaaaaggatattgggggccagtcacagtggctcatgcctgtaatcctagagctttgggaagccaaggtgggaagatcgcttgagcccaggagtttgagactagcctgggcaacatagtgagacccccatctctaaaaaaaatttttttttaaatttctaggcatggtggtacatgcctgtaatcccagctacttaggaggctgagtggagaggatcaattgaccccagaagttcaagtgagttatgactgtgccactgcactacagcatgggtgacagagcaagaccctgtctctaaaaaaacgaaaacaggaacaaaaaggatattgggaaaagagaggctagaagttaggactacctcagagtcatagtttattaaaaaaatattttaaatgttactttattaagaagtataatatgactttcaaaagtataagccacagaaaaagaacatttccatcattctgcagtatttttaaaaatagagtatctcaagtgttaaaacttcaaaaataaaagttgtcataccaacaaaggtacaacccagaggaatagcatcaggtgtgcatgtaataacgcattcactttggagcttaatccccctgtagaatgggaccagtgccaaaaggcacaagaatgatccataactcagtgggcccacacagaaaatgtcagtatggaaagacacacagcagtgtggttaagtaattgcttacaacatttcaaataccactgtcaaattaggagagattcagattcaaatcctaacaaatatttattgagcagcaactatgtttcagggtctatgctgagtgttttcacatgtattattgtactttatcctcacaagtctattagtgcatattaaatcataatgaaagcaatccttggccaggtgcagtggctcatgcctgtaatcacagcactttgggaagcggaggcaggcagatcactcgagcccaggagtttaagaccattctgggcaacatgatgaaaccccgtctctactaaaaatataaaaattagccaggggtggtggtgcacacctgttttcccaggtagttgggaggctgaggtggaaggatcacctgagcctgggaattcgaggctgcaatgagccatgattgtgccactgcactccagcccaggcgacaggagtgagaccctgtctcaacaacaacaacaaaaataataataataatttaaaaaaagaggccaggcacagtggctcacacctgtaatcccagaacactttgggaggcccaggtgggtggatcacctggggacaggagtttaagaccagcctggccaccatagcgaaactctgtctctacttaaaatacaaaaaattagccaggcatggcggtgcatgcctataatcccaactactcaggaggctgaggcacgagaatcacttgcacccaggagctggaagttgcagtgggctgagactgcaccactgcactccaatctgagcaacagaacgagaccctgactcaaaaaagaaaaaaaaaaaaaaagaaggaacctagacaagtgggaatactattcaattctttacttaaccccctaaacaccactgaagatctgaccattatcctaaaggcagaaaagtcatgcctgattatctgcatatagattttctctttctttcccttattttagctcagttctttaacttatataagaattactatatagagttacatacacaaaactgtacttggcaggtaatttaagggtctttaagggcaattttaaccaaacacagtttttgtctgtgcactgactttagaccctaaaacccagtaacaaa

SEQ ID NO: 1748 - DNA, 4001 bp, Homo sapiens
tacaaactaatcatagaatttcataaagtataaggtgctatgttaagtgatttacattaattcattaaccttttgagataggtgctattacattaccaccttatagatgttagctctagggcacggagttagagaaatttgcttaaggtcacaagtggcagaacctgggttcaacctatgcagtgagtccagacattttgcccctaagtactataatatactatactatactatactatactatactatactatactatctatactaaattactcaatacataattttaagaagattttggttgtttttctgcagaatctaagtttgttttccttaactgatcaaagacgtgctactgttgaaaaagtattaagctttggttcagatgacttaatggtcatttgacaaatatgtttgggcacctacgtacacttagtattattaagtacctgcctagtgctaaggatttgcacataactcatttactaaatcctcccgacaagtttgtgagtttggtattgctaatcttaaagatgaggaaatctgggcactgcaaaataacttatacaaactcataaggcaaataaatgacagggctccaatctcttaactccattaactacttaaatataaggaaaacctggcagccattgctctggaaaactggaaaagaagaatcgggagccacgggaagaaggaaaatgccaagcttctggtcccacagtctcactctccccaggatcccaccttatgccgccaacaaactaacctcattactagcgacaccaggaaacttatcagagattcggggatctagagagccagtcccacagtctcactctcctcaggatcccaccttatgccgccaacaaactaacctcattactagcgacaccaggaaacttatcagagattcggggatctagagagccaggctctgggcaggcgcttaaacatttataaactgattccctttaggcaactctcaccaagcaagaagcatttagcgaaggccagagcagagcactgacccaggagccctggaggagcaaatgccaaggtcccagacctgtctgcctgtttcgcctgtaatcccagcactttggaaggccgagacgggcggatctcctgaggtcgggagttcgagaccagcctgaccaatatggagaaatccacatctctactaataatacaaaaattagccaggcgtggtggcgcatatctgttcccagctactcgggaggctgaggcacgagaatcgcttgaacccgggagacaaagactgtgctaagccgagatcgcgccattgcactccggcctggacaacaagagcgaaacccctctcgaaaaaataaataaataaataaaataagtacgggcagggcaggccggcttccatctctcagatcctccctggtacttattcaacccccgacaaactccttctggccgctcctacaccccaggcctggccgggcctcccctgcttcctctcaccgtccttcatctggacaatattgctggcggccacccggtcggaggcgacaagaacatagtcggggccttggataccgatgaggtactccatggtggcggaaggccaggggctgcaggtccgacacagcacgagactcgcccgcttccaggtctcaccggtgagacagcacctcagagcgaagattggcgcgacgcctgcagcacgacttccacggcgctctcggatgacgtacaactgtcgcgagaggttgcaaagcgggcgcggcgccgggtgccttatgttcagtgcttgtctctgggatcgtacgggtctcctccggagcaggctgtgcaggtcacttgccttatgtgacgcccagtttctctgtttacacactaagattttaaaagtggctttaggataaaatcacgcagtgtatgtaaggtgccgagcacgtgtgggtgtcaaaaaggggtaggtagccaggcagccgtttccctacgttgctcggtaaaatctccccagaaacccctttcctgcaagccagattggagaaaaattaacttgaggggagccttacttccatccttcacaaaaatagtatatggttggattaaagatataagcatggccgggcgcagtggctcacgcctgtaatcccagcactttgggaggccaaggcaggcggatcacctgagcttgggagttcgagaccagcctgaccaatatggagaaaccccgtctctactaaaaatacaaaattagctgggcgtggtggcgcatgcctgtaatcccagctactctggaggctgagacagagaatcgcttgatccctggaggcggaggttgcggtgagcactccagcctgggcaacaaaagcgaaactccgtctcaaaaaaaaaaaaaaaaaaaaaaaaaaaaaaaaaaaaaaaaaaaagagagggagagagatacaaacatggaagaaaaagtagaaaaatatttctgtaatttttggaagagatgtgtttctaagcttgacagggaacccagaagcaatatgagaaaagacttgacagatttgactacctaaaattacacgtctctatgtggtgaaagtcattatcatgctcaacagtaaatgtaaattgggaatgtttcaattgtagaaatagttactattttggaccttatagacagaagaaaggaaaaagttaatatctataacttaaaagatattcctacaaaccaatgggaggggagccgggtgagacaataccatttttaaaagacccggcagggcacgggggcggatcaagaggtcgggagttcgagaacagcctggccaatatggtgaaaccccgtccctactaaaaatacaaaaaattagttgggcgtggtggcaggcgcctgtactactccggaggctgaagcaggagaattgcttgaacctaggaggcggagattgcagtgagccgagatagcgcccctccactccagcctgtgcaacagagagactccatctcaaaaaaaaaaataaaaaataaaaaaagaccaaagactaagaaaaacaattcacaaaagaagcaacacgaatggccaataaacatgaaaagatcctcaaccttgatggtaattaggaaaatgggaaataagaaacaatgagaaagtataaattgggggtaaggttctaagttgtacaacctttttatagagaacaattttaatatctgttaaatatgcataaccttttgaatatgtccaaaagaaatgtttggacacacagtccaaatatttgtgtaccgagatactcagtgttgccaggggcagtggctcacgccagtaatcctagcactttgggaggccaagacgagcggatcacgagttcaggagttcgagaccagcctggccaacatgatgaaaccccgtctctactaaaaataccaaaattagctgggcgtggtggtgcggcacctgtaatcccagctactggggaggccaaggcaagagaatcgcttgaacccgggaggcagaggttgcagtgagccaagatcacaccattacactccagcctgggcaacagagcaagactctctctcaaaaaaaaaaaaaaaagagagagagatatttagtgttgcagcactacaacacaaaagaggaccaacttacgtgtctaaaagtggagacattgttgggccgggtgtggtggctcatgcctgtaatcccatcactttggaaggccaaggtaggtggatcacgtgaggtgaggagttcgagaccagcctgaccaacatggtgaaacccggtctctactaaatacaaaaaattagccgggcgaggtggcaggcgcctgtaatcccagccacttcaagaggttgaggcaggagaatcgcttgaacctgggagacagaggttacagtgagctgagatcgtgccactgcactccagcctgggcaacaagggcaaaactctgtctcaaaaaaaaaaaaaatgtagtacagtcatagtggaatattgtgcacccataaaaagaatgagatgaatc

SEQ ID NO: 1749 - DNA, 4001 bp, Homo sapiens
ttaatgtcttggactcttctatgggttataagtaatatactgcatcccctataatgactaaaagtactgtgtacataagtaggcttaaagcacattctacttttcaatgtgatttcacatacatttgggatgaaacaaaagacctgtaaagataatgattattgttctacctagacatgacttaatgttaaaatcacttgcttgtcaaagaccttagtattcaaaataatggacaaatttactctcaaaacaaattcactcctttggaaggactggcttacaaacaaaacttctacaaactaatcatagaatttcataaagtataaggtgctatgttaagtgatttacattaattcattaaccttttgagataggtgctattacattaccaccttatagatgttagctctagggcacggagttagagaaatttgcttaaggtcacaagtggcagaacctgggttcaacctatgcagtgagtccagacattttgcccctaagtactataatatactatactatactatactatactatactatactatactatctatactaaattactcaatacataattttaagaagattttggttgtttttctgcagaatctaagtttgttttccttaactgatcaaagacgtgctactgttgaaaaagtattaagctttggttcagatgacttaatggtcatttgacaaatatgtttgggcacctacgtacacttagtattattaagtacctgcctagtgctaaggatttgcacataactcatttactaaatcctcccgacaagtttgtgagtttggtattgctaatcttaaagatgaggaaatctgggcactgcaaaataacttatacaaactcataaggcaaataaatgacagggctccaatctcttaactccattaactacttaaatataaggaaaacctggcagccattgctctggaaaactggaaaagaagaatcgggagccacgggaagaaggaaaatgccaagcttctggtcccacagtctcactctccccaggatcccaccttatgccgccaacaaactaacctcattactagcgacaccaggaaacttatcagagattcggggatctagagagccagtcccacagtctcactctcctcaggatcccaccttatgccgccaacaaactaacctcattactagcgacaccaggaaacttatcagagattcggggatctagagagccaggctctgggcaggcgcttaaacatttataaactgattccctttaggcaactctcaccaagcaagaagcatttagcgaaggccagagcagagcactgacccaggagccctggaggagcaaatgccaaggtcccagacctgtctgcctgtttcgcctgtaatcccagcactttggaaggccgagacgggcggatctcctgaggtcgggagttcgagaccagcctgaccaatatggagaaatccacatctctactaataatacaaaaattagccaggcgtggtggcgcatatctgttcccagctactcgggaggctgaggcacgagaatcgcttgaacccgggagacaaagactgtgctaagccgagatcgcgccattgcactccggcctggacaacaagagcgaaacccctctcgaaaaaataaataaataaataaaataagtacgggcagggcaggccggcttccatctctcagatcctccctggtacttattcaacccccgacaaactccttctggccgctcctacaccccaggcctggccgggcctcccctgcttcctctcaccgtccttcatctggacaatattgctggcggccacccggtcggaggcgacaagaacatagtcggggccttggataccgatgaggtactccatggtggcggaaggccaggggctgcaggtccgacacagcacgagactcgcccgcttccaggtctcaccggtgagacagcacctcagagcgaagattggcgcgacgcctgcagcacgacttccacggcgctctcggatgacgtacaactgtcgcgagaggttgcaaagcgggcgcggcgccgggtgccttatgttcagtgcttgtctctgggatcgtacgggtctcctccggagcaggctgtgcaggtcacttgccttatgtgacgcccagtttctctgtttacacactaagattttaaaagtggctttaggataaaatcacgcagtgtatgtaaggtgccgagcacgtgtgggtgtcaaaaaggggtaggtagccaggcagccgtttccctacgttgctcggtaaaatctccccagaaacccctttcctgcaagccagattggagaaaaattaacttgaggggagccttacttccatccttcacaaaaatagtatatggttggattaaagatataagcatggccgggcgcagtggctcacgcctgtaatcccagcactttgggaggccaaggcaggcggatcacctgagcttgggagttcgagaccagcctgaccaatatggagaaaccccgtctctactaaaaatacaaaattagctgggcgtggtggcgcatgcctgtaatcccagctactctggaggctgagacagagaatcgcttgatccctggaggcggaggttgcggtgagcactccagcctgggcaacaaaagcgaaactccgtctcaaaaaaaaaaaaaaaaaaaaaaaaaaaaaaaaaaaaaaaaaaaagagagggagagagatacaaacatggaagaaaaagtagaaaaatatttctgtaatttttggaagagatgtgtttctaagcttgacagggaacccagaagcaatatgagaaaagacttgacagatttgactacctaaaattacacgtctctatgtggtgaaagtcattatcatgctcaacagtaaatgtaaattgggaatgtttcaattgtagaaatagttactattttggaccttatagacagaagaaaggaaaaagttaatatctataacttaaaagatattcctacaaaccaatgggaggggagccgggtgagacaataccatttttaaaagacccggcagggcacgggggcggatcaagaggtcgggagttcgagaacagcctggccaatatggtgaaaccccgtccctactaaaaatacaaaaaattagttgggcgtggtggcaggcgcctgtactactccggaggctgaagcaggagaattgcttgaacctaggaggcggagattgcagtgagccgagatagcgcccctccactccagcctgtgcaacagagagactccatctcaaaaaaaaaaataaaaaataaaaaaagaccaaagactaagaaaaacaattcacaaaagaagcaacacgaatggccaataaacatgaaaagatcctcaaccttgatggtaattaggaaaatgggaaataagaaacaatgagaaagtataaattgggggtaaggttctaagttgtacaacctttttatagagaacaattttaatatctgttaaatatgcataaccttttgaatatgtccaaaagaaatgtttggacacacagtccaaatatttgtgtaccgagatactcagtgttgccaggggcagtggctcacgccagtaatcctagcactttgggaggccaagacgagcggatcacgagttcaggagttcgagaccagcctggccaacatgatgaaaccccgtctctactaaaaataccaaaattagctgggcgtggtggtgcggcacctgtaatcccagctactggggaggccaaggcaagagaatcgcttgaacccgggaggcagaggttgcagtgagccaagatcacaccattacactccagcctgggcaacagagcaagactctctctcaaaaaaaaaaaaaaaagagagagagatatttagtgttgcagcactacaacacaaaagaggaccaacttacgtgtctaaaagtggagacattgttgggccgggtgtggtggctcatgcctgtaatcccatcactttggaaggccaaggtaggtg

SEQ ID NO: 1750 - DNA, 4001 bp, Homo sapiens
ttcggtgacagtggcgatttgaaactggaagaaagcagagcattcaataatgcccacgccttaagtccttaaatgaaaggtcaggtggaggtcttccccaatgtgaaaataggagtcacacaagtaaggcaatctgttcttcaaagcatagagacccagggattgcaagtagccagagcccgccaattaggttcccagcacatccctcacccggttgtaagaacgggcatctcggtagtacagcactcgcatgcagcgttctactaagtcgcgggcctcggtctggcttagcactggctgcttctccagaacttctcgcagcagaggctagggagattgggggaaaaccatggggggatattgggctgaataacaggctagttgtctcaaatctatggtataaaaagcattagagtgaaagatgacattctacttcttgcctcaccagaatgaactctgcttagaaaataagctaagagccacttcaggaagaagttctagggtgtcctctctttgcatgtctactgactcccagtcatgtcatcttgtcactggaatcagtgtcaacacctacagcccccagactacaaagaaaaccatctgcccagtaatagcgatcccagcccatccctcatatcagaatttcaggagaaaagcagacaaccactaatccatttccttttgtcttccctttcccccacctctagacttactacttacctgagccaagtatgcaccataaccagtggccagcgaaggggcttcataggctacaccaagcatgtccacataaccgaggaagctaacaggacacaatgggtcaaaactcatttcaccttagattcatcttagctgaagaaggggaccatggggtctgagttaaagtgggattcacttggggagaagagacagaagagatactacacaggtactaggttgggtggtaaaggaaataagttatttgtattcatatgaacctctctccatcagcatagcctccgatgaccatggtgttccacaaagggttcatcttcgagcgccggctgtacatggccctggtcagccatgaatgaatagctctaggactatagctgtgtccatctcccagaagctcctcatcaatccttaaaaggaattggttgtgagaaaagggagagaattaagtcggggtctccacccatccccaaaagaagttaccacaccttcccccattttacacctaatgccaaaaactttattgcaaacacagatcgcccacctccaacaactcttccagtcccccgctgcaacaagtccccccatcccatcgaagggaataaaaaacaggggactcccctctctacttgggaaccactctcctgttctctggatgacttacaccatctggccgagaacttgcttcaaatactggaaatcagcgtagtcgccagaggcacccagcatggtactgttgttgactcgcataatgcgagagatgttgcggaaacgagccaaggagccgtaggatcccagcatgtctgcggcaatcaccactccgccctcgaacttaacgccgaggactgaggtcccggtcaccatggggttcctaaagagtgagaacggtgggagctgagaggggggatggactgcgccctctttccgcgcactgagctgcgcttctgattttctataattccttccaattattctgcattctccaggactccgcgccctgagctcccctgccgttcgcgcgcccccggggtccccgcctcaccttcccgggctctcaaaaccagccggcagcaccaggccccacggtccctcccgctacgcaaacgaaagcgccgagaacttactgggtccgcgtgattggacctctgtaaagtgcagacgccggatccatgaaggaatcgggagtggacggaatgcggtaaaactgtcctggggccggaccccccgcccaaagtccggaccgcgaccccaaaaacgcttccatcttagtcacggtagcagaaaaaatgaaagcgcttgcgccaacggaagcggaagtgatccttcagtgtcatttctttctttttcctgtagacgacttccagcagccatgttgatgaggtcgtagctgaacatgcagtaatcctaggtggcgaccgagacagggagttgaaattgcccaacatcgcttcgcatcgcatcgcatctccgtggagtttggaccagatcacagcgttctaacacacgattcaaggaggagggaggcatgaaggtggggtggggaggtggccacttaaagacgctgatcctgagtgagacgtcacaattttttattttattttttatttttttgagacggagtctcgctctggcccccaggctggaatgcagtggcgcgatctcggctcactgcaacctccgcctcccagattcaagcgattctcgtgccttagcctcccgagtagctgggattacaggcgcctgccaccacgcctggctaattttttgtatttttgctagagatggggtttcaccatgttggccaggctggtctcgaactccggatctcaggtgatccgcctgcctcggactcccaaagtgctgggattacaggagtaagccgcctcgcccggcctagaagtcacagttctcatgttccttttgtatcattatcaaaaagcccacatgaaaatatcagtgaacacaggatctcttacatctgtactcctcagagcagccccatgtggcaggcattattcgacccatttggtaaataggaaaccgaggcttgcggtgtagtgatttacccagtcacacagccgataacggtagaactgaatcttgaagctagaataaaaaaaggaatcagggccgggtgcggtggctcatgcctgtaatcccagaactttgggaggccaagacgggaggatcacttgaacccaggaattcaagaccagccttggcaacatggtgagacctcacctctacaaaacaaaacaaaacaaaaaattagccaggcctgtaattccagctacttgggagggtgaggtgggagaatcgcctgaacccgagggaggttgcagtgagccaaggtggcgccactgcactccagcctgggcaacagagcgagaccctgtcacaaaaaaaaaaaaaaaaaaaaaaaaaaaaagaatacacttgtgtataccctgtggggtgtgatagctcaggtggatcaagcactctctgtgggaccttagacaagtctgaaagtttccttattgtcaagggcccttgcccacctctaaagaaacagaaaaattccattggaagtgtaggggtgaaactaaattccaggggtttccttctcagtgtaactccatagcaggggctggaaactgtcttgaatcaaactggtgaattttgtcaaagataaacaaagccggacactaaagtggaaaggacagatttcaatcagtaataactactacaataaggaaaaacagttcagcatgaactgaactcaactgcaatttgtatgcaagtaatgggtattttatagggaaaatgaggttaggggacagtgagacagagggtcagtagagtcagggaagtgaacatttacagaattagtcaatgtaaatgtgcttaggtcaatgatgtctgctagctggcatttatggaagttaggattccatcctcccacagagactggtgaggataccatcctcaacactgtccttaggtgtcttttgtttgtttgttttttgagacaaggtctggctctgtcacccaggctggagtgcagtggcatgatctcggctcactgcgacccttgcctccccggctccagcgatcctccagctgcaacctctcgagtagctggggactacagatgccacacccggctaatttttgtttttgttttttttctttttttcttattttgagagggagtcttgctctgttgcacaggctggagtgcagtggcacgatctcaactcaaagcagcctccgcctccctggttcaagcgattctccagcctcag

SEQ ID NO: 1751 - DNA, 4001 bp, Homo sapiens
tcaacgcctgtaatccctgcactttgggaggctgaggcgggtggatcacctgagctcagcagtttgagactagcctggccaacatgatgaaaccccgtctctaccaaaaatacaaaaaagctgggcgtggtggcgggcacctgtaatcccagttactcaggaggctgaggcaggagaatcacttgaaccagggaggcggaggttgcagtgagctgagatggcgccactgtactccaacctgggcaacaagagcaaaactccttctcaaagagaaaaaaaaaaaaaaaagtgggcaaaggacatgaacagacatcagacactttatttttatttatttatttatttatttatttattttattattatttttttttttttgagagggagtctcactctgtcgcccaggctagagtgcagtggcgccatctcggctcactgcaacctccacctccggggttcaaacgattctcccacctcagcctctggagtagctgggactacaggcgtccaccaccacgcctggctaatttttgtatttttagtagagatggggtttcaccatgttggccaggctggtcagtaactcctgacctcaggtgatacacccacttcagccttccaaagtgctgggattacaggcctgagccacgccccagccagacacttttcaaaagacgatatacatacagccaacaagcctattaaaaaaacctcaatatcactgatcattagagaaatgcaaataaatcaaaaccacaacgagataccacctaacaccagtcagaatggctattactaaaaactaaaaaaataacagatgctggcaaggttgcgagaaaagagaacactgttctatcgttggtgcaagtgtaaattagttcaatcactgggaatcacttgaaccagggaggcggaggctgcagtgagccagactgggccactgcactccagtccgggagacagagcgagaccgtctcaaaaaaaaattattcatcgtttatctgaaactcaaatttcactgggcatcctgtatgttatctggcaatgctatgctcccccgagaaaataaaaagaagaaatctcataggtgcctgtttcacccaatcggtgatttgtgttcgtcaactattctgtattacattcagtgattacacttagaaggaactcttgaaaccctgcaaaaatttatgtcctcctcttctaatgtgactcgtaataggtactcagcccaagcctgaaactgacaaagagagctacctcaccggataaagcctttgtgtcagacagccgtgggtttaaatcttgactccaccacttaactagctgtatgattttggacaaatcacttaaaatcgctgagactcggtatcctgaaccgtaaaatggagagataatttaccttaaggtgtggttgtgaggtataagtgagataaacaaaatgactgatacataaaaagcaatctgtaaatggtacctttgaagatgatacagggaaaggtaatgaagttagagacgagggaatggggagaggaagggattaataatctattttcctaatagacgttattttgcaaagaaaggagggcagaaaactattacgatgagtccgaaaagcagaactgtagctaaagacagacccgggctgctctagagaagacggcgctagaacagagaaaggaagcaggaatgaccagtcaatgaccgtccccctgggggtaacagtggtaacccgggactatccgccactccagggccccgggatgactcagggagtccagcgggctccttacctccggggccagggccgcctctcgcccatgagcccctggcccccaccccaggccctccctgccttggcgctacacgcgcccggaacccagctctgcccctcctgccccgaagtagctcctcaccacaccatagtgctttccaacaccatcttgccaccttcctccctcccgaccgggtctccgggacggcctaacaacaactcctccaattggcccgtcgctcttcaccaatcacagacctcggcttggccagctgcttccgcctccgtcccccacgttgcgttctgggagttgtaggtgccgccaaacaaatttgtaggcgtcttgagggtagttgaagggaatcgcggtaacacaaaaaacaggatctagcctccactttccctgccattgcagttctcagttggggtttcccgctggccggatctcaggggagctatggaggaacctttgaaagtgctgtgtcgattccggcttcggcattttaaaaaagtgtcgggatcggccgagcgcggtggctcacgcctgttagcccagcactttgggaggccaaggcgggcggatcacgaggtcaggagttcgagaccagcctggccagcatggtgaaaccctgtctctactaaaaatacaaaaaattagccgggcatggtggcgcacgcctgtaatccccgctactcgggaggctgaggcaggagaattacttgaacccgggaggcagagattgcagtgagccgagatcgcgccactgcactccagcctgggggacagagtgagactccgtctcaaaaaaagaaaaaaaaaagtgtcgggatcgctaatgactttctacagccctcagttccctgtagaattttaattcaacaagcccttatacccttcaattgaatttatttgtatatttatctcctccctcgtttaactaagggtgggcaacgtgcctttttttttttttttttttttttttttttttttttttttgagacggaggagtctcgctctttcacccaggctagagtgcagtggctcgatctcggctcactgcaacctccacctcctgggttccagggattctcctgcctcagcctcccaggtagctgggactacaggggcattccaccatgcccggctaattttgtatttttagtagagacgaggtttcaccatgttggccaggctggtctcgatttcctgacctcagatgatccacccacctcagcttcccaaagtgctgggattacaggcgtgagccaccacacctggccggcaacgtgtcttaatctttacaattccctaagcccagtacagagcccggaaaagatttgacaactcaattatattaactaatctgccaaagaacaaaccactaaaccgttttggttaatcaaaaattacattcaaggcctgatgcaatggcttaggttttataatcccagcgttttgggaggcccaggcaggaggatcaactcaggctaggagtctgagaccagcctggacaacacagccagactccgtctctacaaagttttattgtttgagacagggtgtcgctctgttgcccagattggagtgcagtggcctgatctcggctcactgcaatctccacctcccgggttcaagccatcctcctgcctcagcctcctgagtagctggggctataggtgcatgccaccaagcccagctaatttgtttttaattttttgatgtgggaggatggcttgagcgcatgagttcgagaccagcgtaggcaacatagccagaccccatctctgaaaaaaaaaaagtctcaaagtgttgggattacaggcgtgagccatcacatcagctggatatttgatattaagcaatttttttaggcatgataatagtgttaaagttatcacccttataaaagtaggctttattaagggttatatgttgtattcatagataaaaaaagtatatgaagtttgggatttaacttaatcctctggaagaaacaaatagttttgttttttgagacagggtctcaaagtaaaacaaaagagacaaggtctcactgggctggagtgcagcagtggtgcaatcatacatagctcactgcaacctctaactcctggcctcccatctcagcctccgaaaactgggattacaggcttgagccactgcacccggccacgctggtcttatttatgttgataattattgaggctgggttatgtgtacatagtggtt

SEQ ID NO: 1752 - DNA, 4001 bp, Homo sapiens
ccccggactgggggagtcgatcgggtaagaggagaagatgctgggcttttggatgcagggaacagattgcaagtgggtgactcctgaaacacaaagagagagagaaaaaagactagagtggaaaaaatatctgttctgtggcttaaggaattaagaaatagaggtggagagttgtctacatcccagtaaggaagggtagaagttagctgctaacatcaccacatcaccatcaccatcactattgccaataccatttattgagtttatcatagacatatactcagacactgtggtaagagttttggttctcttttttcatggttctcatttaattccaacaattctagatgtagaaatgctatccctgttttaccaataaggaaaccactccctgcatcatggcacacaccatgtctggggcacacctccaactcaactctctcaactcaccctcttcatgttggagggcctctttccagatgtagcccggagagccctgactgaccccttcctatcattactccggagtcgaggcgtcaggctgcttggggagggggtgctccgcgtcaaagagttcacagtgggcagcaggtctcggacaggactatccttcagcacaaaggtctcccgccgaggactgggcttcactcggcgaggccccaggccctcgcctgcgctctcccgatcctgcagggcacactgctccagctgagcggccagccggttggcctcatcgaggatctcctccagcttctctggactgagggggcctaggctgagcctcacaccctggggggcaggtgccactgcatttgggtcacttcggtgggagaggccccgtcgaagtggtttctctggagtcaccaacactgttatgtcttcctcctcacggctgagacaggaaacaaaccaggcatcatgcccatgcaaaagggaacaggagattatgcaagggagactgcataaaagccccacaacagagccagggacatgaccctaggccccgatgcccatgctggctgtgagatgtggcctctgggcgatgagatacctggttctatggggcctaataggcctttagcatttacggacatcagaaatgatgccaggatggagatgcagcaaatccacttatccttcttcttaacaccctgaaatctaactccagcttctcccttctctccccgctaccaatagtgtcatagaggcccgagtcagccagccgcccagcagccccaagtgcgccaaaccttgctaagttaccaacccaagccaataattcagcagtaagggattcgagacaaagaggtactgttagaggaaaataagtgggataaagaggctggtacctgtcagatggtgacagccccccaaagtccaaggtctcatccacaataaaccttacatctgaaggggaaagaagaatgaaagccagtcatgggtccctgatgcagctctccatcgctgggtctcactcctccctttcattcttccctccctcctttccttaccttcctccaaatcctccatgtccagccagcaggagcgagagtccagttagatctgagctggagagaaaccatacctttcctcaggtatccattctgcccaaggctcgcagctagattcagggtgcaagccagggtcgggggtcatgctggaggcaaagcaagcgcccaggagtggcacctcccgcacagctactcctgctacctccgggaacgatacggagggctcccccaactgcccagattgccctggagccgccctgcatcctggcctctcctcactgggggcggcctgcacgccccatcttcctccccgccactatcctcagggttctgcactccccaagccacctttccactcccctggcatcacacgcgaagcacacctccagcccaccctgtgtccacttcccgcgccgccttatcttccacgcaacaggctttctcccgcaacctagtcccgggaatcagctccgagggggcggggctcctttcgaatctctcaggccccacctactcaagccacacgcgcaccgtgattggtgaatcctcagggggaggggctgaggagctgccggccggaagtcagccggtgggggctgggggagaaccgttcccagaagactgcatcccggtggcggagccgagggttgaggctgcgagtgcgcgtgctcgcgtgcgcggagactctctttcccgtaggcagatgggagcagagcgcggctggccaggagggaagaaacggacccacgagtatggaactcgcgccccgccccgctccctctgctgggccgccgagcacccagtctccagaacggttgtgctgcctaacgtggccgctaaccgacgctctacgggaggaaattcgttttcttgggcgcactcaatatgcaggcgccgcattggccgaggttcctcagttgtgggttttttccaagttaagggagcacctaaacacttatattgtaggtatattgaggttctcttagaagtacatcctccatcgcctcttcaagaacctgaggcagctgaggtgcaaagaaagcaacgggcttttcacgcaggcaggcttaggttcaaatgcaacccaagtttaactgacctcagaacccaagtttcggtttagaggcggctgccttgagtatatttgccctcttttcacctctcttcgcttatctgtgaaaggaggatgttggtcctcgcagttacggtgttacgaggataattatgaaggcgttttctaccgtgtgcccttaggggatttagagggggtgtttgtaagtagccccctctgaactaaaagcagtatttgtaaaatgcttaaaccaacttgttaggagtgttgtctctgttgtttctaaatgttgcccgggccaccagtgaacttgtcagaggcttcaaaccagaacgactccatctggaatagaggctgggtaaaataaggttgagacctgggctgtattcctaggaggttaggcattctaagtcacaggatgagataggaggttggcacaagatacaggtcacaaagaccctggtggtaaaacagcatgcggtaaagaagccagccaaaacctaccgaaaccaagatggcgatgaaactgacctctggaggtcctcagtcctcattatacgctaattataatgtattagcatgctaaaagacactccagacagcatcaccacggtttacaaataccatggcaacatcaggaaattaccctacatggtctaaaaaggggaggaattcttagttccagggagttgcctacccctttcccggaaaactcatgaataattcatcccttgtttagcatataatcaagaaataaccataaaaatggccaaccagcagccctccgggctgctctgcctctggagtaggcattctttatcccttttctttcttaataaacttgctttcactttatggacttgccctgaattatttcctatgcaagggccaagaaccctctcttggggtctggatccggacccctttctggtaacaacaggaggagacagcaggtccgcacaagatacagatctcaaacatccctctaataaaacggtgcagtaaagaagccggccaaatctgccagaaaccaagatggtaaagaaagtaggccaggcgcggtggctcacgcctgtagtcccagcactttgggaggccgaggcgggcgaatcacgaggtcaggagatccagaccatcctggctaacacggtgaaaccccgtctgtactaaaaatacaaaaaattagccgggcgtggtggcgggcccctgtagccccaactactcgggaggctgaggcaggagaatggcgtgaacttgggaggcagagcttgcagtgagccgagatcgcacctccgcactccagcctgggcgacagagtgagactccgtctcaaaaaaaaaaaaaaagaaagtgacagctggtcatcctcactgcttattatatgctagttgtaattcattagcatgctaaaagacact

SEQ ID NO: 1753 - DNA, 4001 bp, Homo sapiens
catgcctgtggtcccagttactcatgaagggactgaggcgggaggatcgtttgagcctggggtctccaggctgctatgagctgagatcgtgccgccactgccctccaacctggatgacagagtgagattgtgtctcaataaataaatagtaaaacatttaaaaaaaaaaaggtggactctgggaccagactcacctaagtttaaattccattacagcctcttagttgtggtacattaggcaagtttcttaacctctctgagcctatttccatagttgtaaaatgaagataataatacctacttcataaaggttttacacaactgcataagataatacttgtggccgggcgcagtggcttatgcctgtaatcccagcactttgggagaccgaggcgggtggatcacctgaggtcaggagttcgagaccagcctgaccaacatggagaaaccccgtctctacaaaaatagaaaattagccgggcatgatggcacatgcctgtaatcccagctacttggaagtctgaggcaggagaatcacttgaacctgggaggtggaggtcgcagtgagccaagatcacgccattgcactccagcctgggcaatgagagcaaaactccgtctcaaaaaaaaaaaaaaaaaaaagataatgtttgtaaaagccttggtgtttggctcccaggaggcatgtggtaaatgctgggttttttttttgtttgtttgtttgtttttaagacagagtctcgctctgtgcccaggctggagtgcagtggtgggatctcagctcaccgtaacctccgcttctcgggttcaagtgattctcctgcctcaacctcccaagtagctgggattacaggcacccgccaccatgccgggctaatttttgtgtttttagtagaaacatggtttcaccatgttggccgggctggtctcgaactcccgacctcaggtgatccacctgtgtttttattatcagtgtgctctaagtcctagggccataggaagcagcactgagacagctgggagtgctagcttctcctgtcatgctctttagtgcggctgggacccccggctcagctctgcccttcttgctccactgtgtggcctggctgccagtgcatgagctcgggagggtaagaagtggggatgggattactgacctactgactgaacagtagggcgggtgcatctaggggaaggggagttctgtgatatgtacagatggttgcattgctgtgtgtctgtgtgtgtgtgtgtgtagggaagatatttgtgagaccttgcggagtaggtttgtttgcagtgagtgggtggagggtcttccgggttggggtgtggatctgtcagtgcagttgtgcatgttgtgtgtctgtaaggatgttttcccttgggttaggatctgcatcatgtgaggcaatattgtccgttggtgcccgttcgtgtatgtgtatagggagggtcatgggttgtatctgtggatgatgagggtctgttgtgtgttgtgaagggattctgtgggtgacgaggatgtgttttgtgtggtgtgtgaggaatgctgcgtctgttggtgagtgtgtgtgaatggccctgaggggtgagaggattgtgctgtgtctgtgggcaacaaagacgggccatgtgtccttgagggggtgccaacaggagggaaatcagacatcacctagctctgtggacccttccagaatctgagcagccctggggattctgcagggcagctagacaaagcggccgaaacttagcccttccctcaggccaccagcctcttacctgagaaacagcagggacaatggtccaggcagtgacaaagaggctgaggcagatgggggtcccctgagagcatgtttcctggacggcttctcggggaggtcctggatgacttctcggggagctcaggaagcaggtaatgagtgcacaggaggcagaggacgggcccaggcacaggtgtgtgactcactctgctctaccctccaatgagcagcagcaggatgaaggattaggaaaggcctgcccccgggctctgctgggtgggcagggcagctgaggccaggaagccagctcctggggcggggccccaacaccaaggtcaccgggaatacccacatccagccaggcacaccagctcatcccacaatactgggctgggcccctctgatgctgcgcccctctgggaggaagggctgggcttgggctggcaggggagagaggaactgggtcctttgactgagggggagatgagccctgacctagagaaggttttagccctgtcctcaggagcccccagcctgggggagatggggacacagccctgtcctcaggagccccaagcctgggggagatggggacacagccctgtcctcaggagtccccagcctgggggagatggggacacagccctgtcctcgggagcccgggcttcaattcaatgggtacagccccaaatccagtgagccccaagttgatgaaaaagacccaaagctgctttcagaaggcaccctgtctgaggggacacacagccagtttgcccacaggaggccagtacaatgggtgtgacaaagccctgcccacaggtgccctcaacagaaggggagacagacctgccttcagaaatgcccagcctctgggaaagagaagtttctgccttctgaagccatatccggctgagagggagacaaagccatccctgtccccatagccatcaggctgagggagaagacaaacccttgcacctcagagttctggcaaaagcctaggactgcacccagtgctccagctttgcacgttctgcactgaaagttactctatttctattaatacctctccccaccgccccctaccacaaccaaaatattgggcttagcagggagcagaggtgtcaggccacagaggaaagcaaactgggccatggcataggtgaacattctcaaatgccagctctaagaatctgccagatgagggcttaaccgccgcctctggtcctcagcttgagccctgcagtgaatgttttctgagcctatttcctgagtctgtaagagccacacatactccctacctcacacttagcatgatgactggcacgtaccaggaattcagtaaatgaaaatcactttatttacccaagctcctgttgagtgtcccaggcttaggggtcaactcctttccccacatcagactcagttggagaacttgttaaaaataaaagtttagccgggcggggtggctcacgcctgtaatcctagcactttgggaggctgaggtgagtggatcacccaaggtcaggagttcaagaccagcctggtcaacatggtgaaaccccgtctgtactaaaaatacaaaaattagccaggcatggtggtgggcgcctgtaatcccagctactcgggaggctgaggcaggagaatcgcttgaacccaggaggtcgaggttgcagtgagctgagattgcaccattgcaccccagcctggttgacaagagtgagactccatctcaaaaaaataaaaaataaaataaattaattaaataaaggcttaggccaggcgtagtggtgtatgtctgtaatctcatcactgtgggaggctgccgtagaggatcacttgagaccaggagttcgagaccagcctgggcaacaaatccagaccccatctctaccaagaaaaaaaaaattagctaagtatggtggtttgcacctgcagtcccagctatttgggagactgaggtaggaggatcgttcaagcccaggagattgaggctgcagtgagccatgattgcaactgcactccagcctgggtgacagagcaagaccccatttcaaaaaaaaaaaaaaaaaaagattctgatatagcagtgctggtgatggggccaggaagagtaaaattttaacaagcacccaggcgattccaaggtagcagcccatggagcaatacaggcttggaaggactccagaggaagccaaggagaggagggttcaatccttcagaggctgtttc

SEQ ID NO: 1754 - DNA, 4001 bp, Homo sapiens
gagacggagtctcgctctgttgcccaggctggagtgcgatggcgccatctcagctcactgcaacctccgcctcccaggttcaagcaattctcctgcctcagcctcccgagtagcacccgccaccacgcccagctaatttttgtatttttagtagagatggggtttcaccatgttcgccaggatggtctccatctcttgacctcgtgatctacccgcctcggcctcctaaagtgctgggattacagacgtgagccaccatgcccggcccacagaggtcagtattttaacctgcaatctgcaaaggaggaaagtggaacttccgaacaactcaaggccccggcttgtcagcaggagctgagatcgaaaccccggatgcccacctgaggcccaggacccagtcatctaaggggctgaactctttctccggcggtttgtcagcacctaaagatagtggtgtctcttttgcttctctagcactccccaacacacctcccacccctaccgcctcccccaacacacacaccaccccaaacacctggaacacagctgggtattcagtcagagctaaaggagagcagccagaggtgtggggagagagcctgctggttctgtcatatttcacaagtgagtgagtgcacagccccatgtctggacctcctgcaagcagaggacggtgggtgccagcctgggccctgtccccagcacctgggacctgataggggctattgtttgtgggcttggccctgtgtataagaacctggttattttcagcacccccttccccaccccgcaaacctagcatttagtgagttcctaagtaccccgccctgtaccagatcctttatatgacccgacaattctgtgggggagatgggattatcattatttgacaatttagaaaactgcacagagatggagcgtaacttggccaagaccacacagctagtcaagtagatgtcatttggctccctgagatccaagctgcccccatcaccaccatcaccacctcccagtagggtctctggggtcagcactgccaccatcaccaccatcaacacctcccagtgggatctctggggtcagcactgccccagcctcagaaaagccaaacttgggtgttgggttctccaggaatgtttggacactagaagttatttctaaacatgagactctgggcctgagaaaggtgccagaaaaatcccttaaaaacagaagcagccgagcacagtgactcaagcctgcaatcccagcactttgggaggccgaggcaggctgattgcttgagcccaggagttagagaccagtctgggcaacaaggcaagacctcgtctccacaaaaaatacaaaaattagccaggcgtggtagagcatgcctctagtcccagatactcgggaggctgaagtgggaggatcacctgagcctggcaggtccaggctgcagcgagccatgatcgcgccactgcacttctgcctggacaacagagtgagagaccctgtctcaaaaaaaaaaaaaaaaaaaaagaaaagaaaagaaatagaagcacccatctgcttaggtgcagcctgggggcatgaccttggtttgcctcctgaggacatttttatatgcctcccccttgcccagcaggggccaggattcccccttacctgtagcaggggcagcggcttcagctgcagtgaccgtgtgtctctgtctgggtcctggccccagcctcagcctctatgctgtctggcaattgcagaagtgaagaaacagagcgtatcactaccaagtcacccctgggaggaaatgctgtggccctagggcctctcaaggggtaccacaggaacttccaagctgggccgccaggacctgggcactgcacagaggcttctcaaagagcgagggatggggtggggtgtagacagcgcccgaggccaggagctaaggtgagaaagaggaaaagcaagagagagaaagcaagtgcatgtactcaagagagcgaaaaagggagcatgagagtgagaaagaggagggaggagagatgagggaccaggaaaatcaaaggagaaagggaggaggcaggagggagtcgggaaaaaaaatgagagggcggaggaatggatggagggagcgaggctcagggaaaaagacagatgtaaacaccgggagagatgagaggaacaaggagattcagggacaaagacaaggtaagatccaagacaaaagacgagatgacaagacacagacagcgagcatgtgcctgtgcacatttgggtctgtgcgtctctggatgggggtgagagagaaaataaaagaaggggagtggaggaaagagaatgcccgctgggatataaagtggagggagaagagaggagctcggaagagccactgtggtcaggggcatgacagggcagggcctccctggagaccaagaaacattgagcccagaaaccccatgggaacagatctgtgggggtggaggtggaagctccctgagaccgtgttttgtagagatagggtctccctgttttgcctaggttggtctcaaactcctgggctcaagggatccttccgcctcagcttcccaaagtgttgggattacaggcatgagccactgagcctggccctgtgtttgtttttttgttcatgcggttgatttctggagagaactggctccattgtccagtagaatgttctatattctggacttggttgattgcttccttgtgaggtcctttaatctattcctctgtctcctgtattttctgaaaacaggtttgattagattcaaatttggacatactttcttctttttttttttcacccaggctggtgtgggttggcagcgtatgagttcatgggagcatgcaggtgaagaggggtggacaatcgatggtgaatgcacatgaatctctgagtgtaggtgtgagggtatgtgtgaaagtgagctggtgggggcatcccgtgtgcataagtgagaggtgagccagagtatctgcctcagtttccagtccatttacccactcattccttcaaccaaccaacaagcaccatctgagcacccccaggcaccaggcactggggtggaccctgtctaaagaagcaagtccctcagatacatcagccgacccaacaacctcctacacagagagggaaactgaggtcccgacaggaccagggtcccacagcaaggcaggtataaggagagtcgggggcctgcatcagcatccagtctcagctccgctctgggtatctgggccaggctcctcctcctaatgtcccttatcaaagccaaaaatggctctcaaaggacaaaacactttttttatttttttattttttattttttttgagacagagtctcactctgtctcccaggctggagtgcagtgatgcaatctcagctcactgcaacctctgcctcccactttcaagggattctcctgcctcagcctctggagtagctgagattacaggcaagcactgccacgcccggctaatttttgtctttttagtagagacggggtttcaccatgttagccaggctggttttgaactcctgacctccaatgatctgcccacctcagcctcccaaagtgccaggattacaggcatgacccaccgcgcctggccagaacaaaccacttttaacatttgcctcagtcatgtagaactagagccaagcatctgccccctcctccacctccagccccccatcacacacaggcagacacactcagaccacataacacttgcacactcgcatacactcagcgcctactctcatgcgaagatgcccactcacactgtgttcctccactcacctgcacactcacgcccagtctcccctcactcacacctgccaggctcatctccttcctcgagttcatgcgtccatactgctccacactcacgcaccgcacacactctcccaatccccatgtcctgccagggacactgaaacaggctcaggccaagcactttgggagaccaaggcaggaggattgctgagcccagg

SEQ ID NO: 1755 - DNA, 4001 bp, Homo sapiens
tattttcctaccttcacgccaactgcaacctcagtgacgattctgcaaagaaaaaataagtagtttcaacctcctgttattcttctaatcactcactctttggctctaaaactttttaggatagtccatcattcataaatcttccagccactcacacacagatggggataaaaaataccacagatgatccgtgacttacctgtactgttaccaacctggttttctaaaagtaactttcaaatgtgagacaacttgtggtattttttaacaacacattcaatagccaaaaagaacaaaacccaaaacactatgccatttctacaatgccagtatactgagattaataatttaacgcttaaactctttagtagtctccacaggaaccaggaatcaggaaacatgaattctagtgcaagttttgacatcaatttccgtgttgatctggggggaatactgaacttctctggatttgtttcatctggaaaataatctttaggtaacatctaggatgatttgaattctgtgagactgtgttaacttttataaaatcttgtttttagtaccttttaaaacacaccaaactctaggcgcttaaccaaattgttgattcttcaaatactcactgattttaataaatgtacttgttaaatgatactatgtttacactcccaaaagagctgcatactgctgtatttttgaccttaagcgtgccccctttctaacattgagttaaattactgagtcttttcaggtgtgaagcatatgagcgagacatcggtccctaccatttcacagtcttgcctctcacctcactcagcattccgtcttgactcaggttcgcaaagatgcagcatggttctgggtttttatagtcgtttttccagaaactgaccaaagtagctaaagagatagccctttgttgactatctgctcttgtttctgccattgctgttggcctttgcccatgtgactgatgtcggcttcaaacacttcgttttttagatgatttaatttctgggcccttttgccaagccttgaatgttttcagtccccacaaaaaggcattttttcctccctcccgcccccactaccagactcaaatgaaaacaaaggagtatgacatctgccctcccccttcctcccgccgccgcacgccctccccccttccccagcggctcccactaggctttccccggagctcccgccaccggcatctctcccgaccacggagggccgggcgaggccggagaggttgctcatggctggggtccacatggggtgcctctctcctcttcccctagaggctcccccaatccaaaggcctgtctctgcccatcccactcgctctcacaggcaccgctaacccaagggtcgggtcccaaggtacggatcgaaatggctcctagagggggcagggacagaccggggagacgttatggggttcccaccccatcccccgccgccaagccggtgcccgctcccactccgggatcctcacccccgccatcgcccctatgcctccccagcctccaagcccgctttcttctcattttctcgaccaaagcccgccgggggaagcaaagggaggggtgtgtgcgatggggcgggggttgggtaacggcagcccagccctgggaggggccgcgggagggtttctccccggcccgggaccgggccgaaggacggtccaactcctctctcacacacaccttctcgccggcccgattacatacccgtccattgccgaaccggacaaagcttcgctcacaagaaccgagccacgcagccagcgagccacacaagcggcgagaaaatggcggctggggcccgacggaaattgccgaaggtgccgaggcgcacgggccaccgcgcggcagcggcggcggcggaaagagccgagcgcgccggcgcccggcagcgggaggcgagcggcagggcgctgggactagggggagtgggcgccgcagccgacgcctcctccgcgccttcgcgcgcctttctccctccgccctccgcctgccgtcctctggaacctggcgttctgctgcagaccgcggcgacctggtttcccctccttgtgggggcgtgggtgggacacctcccaacagctctccacactctctctgccctgactgcaggacgcccccaggcagcctccacttttcactccaagccaagtaccagcttggctaccgtcaacctatgcgggccaaggaaaaaacattggatagcttttctcctaagccatcttttatttgcagaccggctccagcctctaaaacaaaaatctttaccccactgaacgagaccacttggtaacaacagtactttctcaagcaagtagaactcctcagactgaaatacaggcttttgcttcaagacctgtagtaccaagccaagtggaggaaaatgtgattctcacttcagttggtgattagtgtgcgcctgtagaaaatattcacaatacgctaggtggaaatagacacaaatggagccatgtgttaaaatgctacaatagttggagtttaacatttggaggcatgaaagggaaagtggagatgggagtgggaacaactgagtcttcagattggttagagaaagtagaagcattaaaatgggctatgcaaattgactccctttgctatatcttacggtctcaatttttacttgatactatagtggacattttacttcaacgtgtttttatcagaggctcaacaaaattgggaaaggcacccgcttgaaaatttgctcagtgagtagcgactttgccagtacccatccttctcctgcacccttcacctccacccccaacacacacaaggacaaatgcacttctaattctgaaaaatgacaaatactccctgtgtccctccagttactctcaatactcactctgggtttttctgtgtctccttcaggcaaagctcttatcctttgctaattggaatttcatatactaaatgatattgtgtataatttttagaatttttttttttgagacccagtctcgctcttgttgcccaggctgaagtgcaatggcgcaatctcggctcactgcaacctcggcctccctggttcaagcgattctcctgcctcagcctcccgagtagctgggattacaggcacgcgccaccacgcccagctaactttgtatttttagtagagacagggtttctccatgttggtcaggttggtctcgaactcctgacctcaggtgatctgccctcctcagcctcccaaagtgttgggattacaggcgtgagccaccgtgcccggccataaataatattacttttaaattggatagacccttaaagagcatcttgtccaaacactttgctatagaactcttcaaagcacccaaatttttacaaattcttgatttgcctatgggattgtcaatcgttaaaaaaaaaaaaaaaaaaggccgggcacggtggctcacgcctgtaatcccagcattttgggaggccgaggcaagcagatcacctgaggtcgggagttcaagaccagcctgaccaacatggagaaaccccgtctcttctaaaaatacaaaattagccggggtggtggtgcatgtctgtaatcccagctactcgggaggctgaggcaggagaatcgcttaaacctgggaggccgaggttgcggtgagtcaagatcgcgccattgcactccagcctgggcaacaagagcgaaactctgtctcaaaaaaaaaaaaaaaaaaaaaaaccacatatcaaatttcctacaataaccacttcaccttaaaccttaaaataaaggatctgttattagtgccactaataatcacttttcacatatttgtggtttcatacatgtgttttcactcaacaattgaatgtgcaagctaccaaagggcgggaactatggtattaattcttggtattccccacattcgctcgatcgatattgattgattggttctcactttatcttggcaaagacaaaccattctatgaggagggaagcttgtcctt

SEQ ID NO: 1756 - DNA, 4001 bp, Homo sapiens
tcccagctacttgggaggctgaggtgggaggacctgagccctggaggtctaggctgtctctactaaaaatacaaaaattagccgggtgtgttggtgggcacctgtgatcccagctacttggaggctgaggcacgagaatcacttgaacccgggaagtgaggttgtagtgatccaggatcgcaccactgcactccagcctgggtgacagagaaagactctgtctcaaacaaacaaacaaacaaaaaaacaaccccccccaaaaaaaaaccccaagaaaatcattcttcttttatgcttccttaagaaagtgaggatttgattccatctgaccctggctattgcctcaaagtgtggattctgtattgcttttccattaaatgggcctgggtgcctgagtcctctccctgcaggcttggccagattatttactcagtttccccagccttctagttctaacttttctgattctgctggtcagaagtgatttctccctaccctatcttataccacataatcacaggatgctctgtattgtattttagttattccagcacatattttactttctttgctactgaaagatgaatcttgttttagctgcctttgtaaaaccctgatgcattgtcaaagacacacatagaaagttagcaataaatgctaacgtacaaaatcacagacaaatattctatacacccaattcacaaggtctaacatctgcagatgtccatttatggttgtgggagggaacggtgttcctagatgcccaggtgtaggactctggccagcaggtgaccctccagccccagggccaggcctgctagagctcagtagccagctcctcaccccgttcttgtcttgggctcaccatacctgagcagctatggccagtgtccacaacttaccttctacccagagctgttccaagtttgtctcaataatggccatgcggagacctaatgccagggccccaaaggccaacagtcccagaaagagcactttgccacaatgtctctggatcccgcatcccagagagaagagcaggccctggaagtaagcacgaagccagagtggagccttcaggctcccagctaggatctgggatggaaagagaagggtcagccaggcatcactgcaacaatgcatgaaatccttcccttctcaccctgtatatctgctgcccagccctcgcttcttgatttctggatgtgggacagggagcaccaacacagacacaggcccagacttggaagatgtaacacccaccatccccagcacacacctgaggaaggcataggcctattttcctttcttttctttttgttttctctcctttttttttttttttttttttttgagacgcagtctcgctctgttgccctggctggagtgcagtggtgtgatctcggctgactgcaacctccgcctcccaggttcaagagattctcctgcctcagcctcccgagtagttgggactacaggcgcccgccaccacgccctgctaattttttatttttagtagagacagagtttccccatgttggcctggctggtctcgaactcctgacctcaggtaatctgcctgcctcagcctcccagtgttgggattacaggcgtgagtcaccgcgcccggccggcataggcccattttctgagagcaggatacatatgtacacacacctgtcgtcgggtggacacagaggtgaacccacagacattcattctcactggccagacgatgaggagacaccggcacagacacaccgacacacacgcacaacttgcttgcggtgctggctctcacttgccttcagacatctaatgacactcggcacttcaagacatcacaaaccttgcagaggcccgagtgacagacctggctccgctctcttccttcttccagctccccctctactcacctggggtgctgcggttcgagctgggggtgtgtaactcgggggcagctctctgaggggcggcgatcgagtcatgctggcggggatggggggcgcgggcgcccccaacccgcgttatctgggcgctcccataggctagcccggtctcccggtaccgctgggccccgcgtagggattcagtggggccgccaaggcgcgggcgtgggagagactgtggggtgtgggtgttaaagcggctgggagggaggagtgcagggagctgcgggtccggggcgcggcgccgggattcacccgctccgtgggccgtgggccgcggcggctggaggaggaatgggtcccgcgcgcaggcggaattgctggcccgagacgcacagcagggctcgaggtggcaactgcagtccccgggaggcggctggagctccagaaaagggagctggccggggcgacgccctcccattggctgaggggcccgcaaattaccctagccgcgcggcccggcccgctgctaggtaacggcgccgcagggggcggggcgggagaccacccaggctgggccaccccgcgcctccctcccgcccgcggggccccagggaggaggagggagggggatcccggagaggcgcagcgccggccaagtgtaagtccagaggcttacgctgagaaagggcctttgcgggctctgttagggatacacttttttttttttttttaagacggggtctcactctgtcacccaggctggagtgcagtggctccatctcggcttgcaggctccgccttccaggctcaagccatcctcccacctcagcctcccgagtagctgggatcacaggcatgcaccaccacgcccggctttttgtatttttggtagagaacgggtttcgccatgttgccccggttggtctcagactcccgagctcaggatatccgcccgcctcagcctcccaaagtgttgggatgacaagcgtgagccaccgcgcccggcctagggccacaatttctttttcttttcttttttttttttttcaggcttaattcactttatttttcttgtataaaaaccctatgttgtagccacagctggagcctggatcctctgcgcggagactctggtgtgggtcttgacgaggtggtcagtgaattcctgatagggagacttggtgaatacagtctccttccagaggtcgggggtcaggtagcagtaggtcttagagatggcatcaaagtgggtagggccacactttctttccgacccaatcaaagcccaagatttcttctgttcactcttcccggcttccattcttgccctcttcagtccactctctccactgagaccagagtcatttctctaacatgcaaatctgatagctccaaagcacaaggcccacttggagcacagggccctgtgtgatctagctaaagccttctctcccatagttccctcacatcagtgttccctcgttcctgcctttgtacatgttttggtccttttgtcttggcagataatcttcaaaaactgaacttgaatcacccccaaaacccacctttttttttttttttttgaggcaggatctccctctgttgcccaggttggagtgcagtggtgccttcacagcacactgcagccttgagctcccagtctcaagggatcctcccacctcgacctcccaaatggctgggactacaggtgtgcaccaccacacctagctaatttttgtaattttgtatagacagggttttgccatgttgcccaggttggtctcaaactcctgggctcaggtcatctgcccacctgggccttccaaagtgctggaattataggcgtgagccactgtacccagcctaccccctctttgaaaccttccttgattcatgtctctctcctggcagataattgcttctttgtgctctgcataacaactcaatttatatatgtataattgcatttatgacacaaaaacttatgtacttgaaagtctgccttcttcaccagacaataaataggtgcttaataattgttgagtgagtcactaagagttgcagaattcagggtgtaaaggattggaaattgggaagaatagaggcaat

SEQ ID NO: 1757 - DNA, 4001 bp, Homo sapiens
tctgagagaatggagtcagctccccctaagggtcagctgtgcccacatcccagcaaagactgggtcagacccagcctaaggaaagttggggagagaagtgaagacagtggggaaggatgactggaaagaccaaaaaaagagggtgcatgtgcgtgtgtgtgtgtgtatgtgtgtgagagagagagagagagagagagagaaacctgggggagggaacagagcagggaaacagagggtacaagcaaagaatgcggaccctgattgtacatgtgtgtgtctggactaaggttagagaaagaggagtgagtattgaggtagagagccaagcaaaatggaccctgggctgaaaatggagattctgtaaggcacctgtccaggctgggcttctgcctggagcttccaccgagccacagcctcctccctccctccagaagatcccctggtcccctggcaggtgtagtagtaggaggtggggagggggtgtttgctctaaatccccatgcttcgcccataggagcaggacagtgtgtgtgtgtgtgtgtgtgtgtgtgtgtgtgtgtgcacgcgcgcgctgggggtggaagtgtgtctgtgcttgggagtctgagtggctttgtgagtcactgggcatcggtgagaacaccaggtggtgggctctggaatctggggcttagtcagtgagtccggagacagcaacctcgagtgcagagcgggggcgaagatgctgcccaggtccacgaacgtgtgtgcttgtgagatctgtccgcccacgtgcgtgtgaaccgtgggtctgcgtggattgtgtgcgcctgaggattgtgggtgggtgtgtacttgcgcgagtgtatgtgtgtggactgttttccagtggtctgtagatatgtgtgtgcgcatggatgggtgtgagtgtgcgcgtggactgtgggtgtgcgcgggcttctgagtttctagggcggccgcgaggcgctgtccgcggtgctgacccggggagtgggctgacggagacctgcgcgcagtctcgcagtgagtgggggacagcgggaagctggcgccggccgtggagcagaggccgagaagagaagcccccaaggaggcgccttcccagccctgctgccggcctccccagggagttgggaaaagttctcccggcggtggggttggctcccgggacttggcgccccttgcgctgggaatctttcccgaccctcagcgccgccactgcccggctgcccactccacctccaccctcgttcgcgttctcggcagagcctggggaccctcgcgcgcgcggatccatcgctggcccggcccgccccaagcccccacgcgccctccccggccggacctgcagccaggttaatcggggaaatgtccctccgagagcacgagtacgctaggtagggagtgggtggagggggtcattagccttactctgtcccctccctccgctctagcatgggcgagagcccgatccaagggcggcttcagactgacgctcaacttttatggacccagatatccctcagaggggacaagcaggggccagaggtcggaagccttgccgttcctggacatccaacatccaactccccttggccgaccaagaatgctgcagtcccgcggggagatggtgcggagctggggcccggtcgtagagggcaagcttgggttctgtccacccctgaccgtctttcccggggggctccgaggcccgcatcccgggctggctggagagcgagagaacttcgcgcgcggcgccaagcaggtcggggtgcggacggcgcggaggacttccccctcctcctagcaatgcatcccccagccccgagaccaagcccggatggcgccccgcggccgtgcactcacctcggccggccgaacggggctaggctgagccgccggcgcgggagagagtgcgcagagggtcggggggcggcggccaccacgctgcgcagactcgtctcctcgcggaagtcgcagggggaagcttctcggagccgcaggaggctggggctccccctccgctccagggcaagcagaccgcgggaagctgcgcgcgaatcccagtcctcagctcgcaacccgagcactccgctccgccgccgccttttattcgccgcccgcctttgtttgggtccgggctcctaccacgggtcgcgggggtgtccgagccaggctccggagccgcgctgccgcccaatccctggcgcctctcgggctccgcgccgccgcgccttgaatcagtggccggcgagaccctgcgccacgccgcgcgctgcggtctctgggacccgctgtctggcgctgtcttcgccgccgctccccctgccgatccgcgcggtggttcagcccggccctggcgcccgcgggcgggggaagcgcaaggcgcagcgacccctgggggtcggtccccgcccctgcagacggtccgggccaggcaccaccccccagccccgcctccgagtttcctgatacccaagtctctcccgggcccgcgctcccgctcctctccagccagcccgcccagccttggcaggtcaccagcctcctggacactcgcgggcatccccgggcgccctccggagggagctgccaagcccaggctcctggcgccgtcccttcctcgtttgttcttcatttacccctctggcaccagaacccggagccataccagcccctgggaccgggcatccctccagctctagcacatgacctgcctgacacccctagccaaagggccacaaggagaaagagcctgggggaggggggcaggccagtaccctggcccatttctctccatcagggctcagagagcattggcattggtgttgcccagggagagtgaagtgggacccctcaaaagggggccagctgccagcccccagctgcagggtggagggatgtcagtgacggaagccagaaaggagggaggccattgccatgctgtgtgagggtgagccatgagcttgtcatttgtcctgggtgtgtgccgaccaaggacctgggaagatagggcaatggtgagacacaatccttgccttcaggaggtttccggcttatgggagagagaagaatatgggagagttatgaatgaaatataacaaacccggccagccaacacactgatgctgaacccacagcagcccctccccatccccagcccttatttttaaaagaggaaaactgggtgagacgcacctctaaatgtcagggtgctgagtggatctcctgtgctgttcacctgctgctcctgctctgtctctctgctgtacagtccctggctggaagctgtacccactgactggctgtcaactagacgcattggtatttatgactctgggtgccctgagagcttatctatgcagaagcaaatggcctgagccagtgtccctgccctggcactcactccccatgtgctcaaggtctcaagagagccattgccaggttggccaagtctgtcagaagactcccaatggctccatctggccttaaagacattagagttgggggcagttcctggggtgaagggtgccactgtgagctgtaaggggagaaagagacaggagatctctcccgagaagtagagggtgtgaaaattgctgtcccaggaccagaggccaaatctgatatgagtacagaggaccagacttggcaccaccctgcaaacttctagtcccatttgccatatcctagagggagggcagagaatgaggagccatgtgagagggtgggaggagggagaacaaggaaaagatttgtttttaagggagcaatagagagacacaaagtgtgttcccaagcccagctgagagcaaagggttttcttggctgggagaatggcttgattattttccgtttgttttaaggctgcttctaggagcctcctcaaagttctccaaggctccagcactgttcctctcagtctgacaaatccaccggccatcccattggtgtgccccatggtgctgtgccaccctcagtccatgcctggggatacagct

SEQ ID NO: 1758 - DNA, 4001 bp, Homo sapiens
cctagagggtcaagcaccatggcgaaaggctgaggaggcaactcgtatctttcattctcctgcctcatcaagaatgaaccttgaaggcacccataggtcgcgcagtctttcagaagctgcaggagggctgtgactgtatggggttgcagactgaaaatcttattaacgtgaaagaggaatttgaaattaaaaaaaaaaaacccggccgggcgcggtggctcacgcttgtaatcccagcactttgggaggccgaggcgggtggatcacgaggtcaggagatcgagaccacggtgaaaccccgtctctactaaaaataaaaaaaaaaaattagccgggcgtggtggcgggcgcctgtagtcccagctactcggagaggctgaggcaggagaatggcgtgaacccgggaggcggagcttgcagtgagccgaggctgcgccactgtactccagcctgggtgacagagcgagactccgtctcaaaaaaaaaaaaaaaaaaaaaccccacaatatcaggctacagttatcatagcaattctgcttttaatgcactcaggacaaacttctagctctgcatatatgtcatttcaatgacacatcctgtctcctacccgactagaatgtgagcagccctgtgatctctatgtgctcataaacagtgcctaatgcgaatcctggctcttggaaggcgctcagctagtaagtgaggagctcagctctgaagctgtaaccaagaccgcgcgggcaggaggaaaggacacttcagcgctctgcggttgcaaacacacccctgcgggtgctgccacttagcaaagtcttaggttcccgcttactcgcacacgcatcctgacttcccccaaccctggaactacctaccaggagcggagaccagcagaccgacagcacgcacatgatccccataagctgaatggccgtctcggtcgtgatgcggccccactgggcactggactgagatgccgtggccttggcccggcagcgggacaccagggccttaatggtggccaggttgcaggaaaaggtgactgtcagcgccaagagccccaggaaggcaaaggcagaggcgaagaaaaggttgccccagttatgcgaagagctagtcccgttgccccctcgcccggtgctgatgaagcaccacgtcccgggccactggacggtgtactggcccacgcccagcaccggcagcagggcgaaggcgagcacggccagccacacgccgagcagcacagcgcgggtggcacgcgtcttcatgtggctcgcataccagtgcggcgccctgatggccagcgcccgctcgacggccatggcgctggcgatgaacaacgaggagagcccgaaaacagtcatggtcagcccgaaaaaggtgcagagccgccccgacgggtcgatgtgctcccaacgctgcttggacaggtacacgacgatgacgaccggggtggtgagaagctgcccgaccaggtcggtgagcgccagccagccgatgcacagcaggaaggacttcttgcgcttgctctcccggcgccggtagctgcgcgacacgagcagcatggccagtgcgttgcccacgaaaccagtgagcagcatggtgatcgggaaggccacggacaccgatccgcaatcctcgccagaccctggagggcgcgtgaggttgccccgcgcctcggcggaacgctcgggcgcccacatgcctgtgtaggagtggttgaggcgggtgcagaagggggcatcccctccgtagccccgggtctccttcatgttggcttcgaggtgaggaggggatggcgtccagagagccgcagcgggagggggcagacgcggcgcgggcggcggcggaggtcggcgtttaccgcggctggggctgggctgccccccatggtgcggggcgcagccgccgccctactccgctgctgggaccgcggccgcggcggcgccagggctcactggcccgggagggagccacgccttcctctctgggaaacctctggtggcgaggcgcgcggaggtgccgagtcccctttataaggccgagggggcggggcgcccgtgggtgtggacagaaccgaggtgggaggagggtgcaaagcaactgagcgcctctcttggctgttgcctatcctgatcgcctgggttgggaagccccagacggtctcctctgaaacgccctgctcctggccggaccgggagcccactggggtctcctccagttctccgctaaagtgtcggtggacggcaagcagctaataagtagcactggacttgcggaccccaggcaaactgccgaggcgcacctgagcgctcgtcctcctgcttcttcaaccacaaacgctcctacagggacgggatccttctcctgaagtcctttagtaactctggtaaagtgaaaatcgcctgtccttaagcaatccacacaagcctttgcatagctgatcgttaacttttttcctttctgctttgtgactctagagtgattataaaaaggccaaggtgtcctgtcccctggggtgccgctgaaaactataaaattactagacagtgcctgtagacttaagggaatagacacagggaaacaaatacatcggatggttgaattccaagaccaagaaatcccaactactacccctcgcctaatcctgcccgctcccctccccaccacccaacaaaaaggtcagctatggcaaaagtggctacaggaaggtggcatcaatttgcatatctgaggtagtgaaatcaactgctcccagcctatgggagtgagaggggagcagaagagaaaggtattccttacaaagcctccaaccatccttcttatcttcatacaataagaactagaaaaggtattcagatgttatgaaggccttaatctatatggaaactttgcctttgaaataataaacattgaatgaaaataggcatacttgcttgcctcgtaacatctttcagtaagccaatattttatgtacttctcacaagcattttctcattttatcacagaaatcctccaaggtactattgctattattatttcccttaaaggtggggtaactgaggccccatgaagttaaagaatgttcctgaagtctctcagcaattctcaagtcccatcttatttgaagcatgtattcctgacatgggtcccataactgctctcagcagatgaatattaacggtgagatcatcttcccctaatcttgggaaagtcttgtgttttttgctttttgcctttttacactgtctaagagatgaaaagatttttaaaaataattgcaaagttcatttttcctcatatttaagaaattagacttaatcatatagcactctaaagaccattattttgattgacacagatcaactttcagaacaagcccaatcagttttgcctttcctagcttagctgatgttctgtatgggtgttcttaacttttaaattactgttaagaggtaagaatgggatatgtccctctgcatactttatgtgctgttgtcttgattctgtatgagagtttgaaaaaatatcactataacattatatgttttttaaagaaggaaaagcaagaatgcaacttaaactccattttaataagatgcattaatcacaacatgaatttcattttgtgttttgctgtcatttaaaaatgttttgcacttttgcgttttactgactaaaatgtcacgtttacaatgggaacaacagctaggaagggtgaaatggtttgattctaaaatcttccgtaaacttttgtcttattattttgaattaatctcaaacctgtatttgggatagtatttttctagcctaatatcatttgaaaataaaataatatttgaggttattcttagacaaagctttatccaaagcatttggatgaaagtggctatcaagtttataccatctatagttagtaaaattctagtgtaattcaatatttaaaatttaagaccatatcaccattcacacagcaaaggaagcaaggcttatctttttccagt

SEQ ID NO: 1759 - DNA, 4001 bp, Homo sapiens
gcggatccattctttatcagaagcatatacaaatactgctatggctccattgatgagatggccaaagaaatcagtgattaccaggccactggccaaaagcagaaacgatgccttggacttctgtctaaatctctgatatgccttcatgagaatggcgatggcaaggctgtttgacaagattcccactgtcatgaagattactgaaaaaaatacggaaagccggttttccgtctggcaggttgtgtttgaaagaagcgcagctgcaggagacactagctgtttggaattgttcatggacattgttgtggagataaaagccaaccactcaagtcatctccctctcaaaactgtgcaggattgcagtccagacatctgtaggataaagggagaggaattatgaacaccgcattactgctcatctgacgtttatgactgacgtgccccagcacccggtggtgggatgggttttatctggcctatcataagcaaggttgcatcatactgaaagcagctcatatctgcctgcggttccacatttcattttcaaggtgaagaagctgttgaaattgagaccccttggttaacttctgtggcccctctgcaaatgagcacctcctcctcctcctgaatgtccccctgacacgtcactgacaccttaaaattttcaaattttacaaaatcgctaccaagattagatttaaacccaataagattttttaaatcctaagtctattaaaaaagagagagagaccttttaaagtgtcttctctttcctctggtgggctttgcccccaaactgcagattattcctcagttaaacgacctgcttgtcaggcagacataactatctccaaactttggaaggggaccagcaagttcattgatgttaaatgcagattttctgaatatgtttctaagcataaatcaaataacagcaaaccacacacacgttgaacccatgaaaagcagagtggtgagtctctgggaaggttttctggtctagctgcccctgtgtagaaattctgattcgcgatgaggaagggggcgggccacgctcactgtgcacctcggccaagatcctgtccagttacagcttcagagtagcaacattcaaggcgaagtatttgcttgtcactctttccctagggggttgaagcctgaggcacagacactggatacacaaggccacggccactcttctctgagctaattcgattggcgtttcccgagcagctagctttcccggaggctgggaattccggagccagcctttcctgcgcccagcccgagtggaactgcctaggctacccccaggacggtcgccttctccaggtcttactcacagttcgactttcgcccgttactatcccccccgcccttcggcctggcctcgcaacattccctccaaactaacgaactcgctgaaactttctgcaattgctcaaacgccaaagggctgttttctccctcatcccgggcacggggagtgaggacgtgcccgggtgaggaactcgcagtgccgcccgcagggaaccccgcaacggcgagaagcggaatctgtgccgatttccctcttctgagaccctttctacccaatcccccgcagagcagctcagaatggggatgggttagctcgagtacccttctttctctatgcgtctccctagcttggggaatctggtccaaactcagtgtcaggctcagccagcagaagctgtggctgggtgtctcagggggtgagttgattaaatctgggtctagataagcgaagccgatgcattgggatcagcctctggagggatggtaccttgtcatcccaggccgccagccgggctctctgaggagcagaagacggagccgctcggtgtgccatggcgccccgcgccgccgctgcctcaagttccaccgatcccagcgcggagatcctgatcgggcgccggctgtggtccagccgctcgtcccctccgcgcactcgttcccttagcgcggaaactgcggggcgcgcgcggctcctgggatccctctgcacctagctgcgctggcagcctgggagggatggggcgcgcgagtgacctccgcctcttcctcttctctctcgcctccgcccccttttccatgggcacagagcagtactgggagagaagagggcaccgtgctcggatgcatcagagctgcacttagccgctggaccagctaaagaaagtttggttttaaactcatttttatccccaagccatctctggggatgcaagacagcagtctggagagccgaggaaagcctaagatggtgtgttagactgtcggatggtagcttgcagacaattcattccaagtccagctcgaaacgcataaagaaaccaggtagaaagaggttgtgtgcttgagggagaattttgtggcaaatatctccagggaattaaaaacaggtattcaagcccagtattgtaaatgaaaacactcgcagcctcagggttcactgtcacacagaggactgggactgtttccagctttctaaggaatatgaaaaggaaaagggatgagatgacttcttgaagtacacctgcagataagggattagtaatatttcagtgattttagaagtccactggagagagaatttctagtgatatgtataccccaagagatatgcgtctaataaatttcgtggagataaatttatgatgaagtaatctatttttcattaggaattacgatttgagccattttattctgtaattgcttttatctaatattgcttcgacacacacccattagctgtgtctcatttttgtagctaaacacttatgtgaatctattattgacttttgctctttttattgtagtaaaatgttgccactacctatgtgaaaaatcagtaccacatggaaacgaaccctgtttctccgttctaaaaccagaagggacctctaaattcctggaaattggaagggatcaaaaaatgaaaaagcgggataaaataaattagccattaactgtagaaaggaatgattgcagttttcccttgtggtagatattgagatttttttaaatgatatgatcataactggtaaactaaactgttacttaattatggtgagggaattaaacattttggttagataacctggttactagagaaatattatacatgaatggccagtatccaaaaggcaattatgtgataagctatactgaaaatatgaatgacacagagtactattctttcctttattttttaaaatatgtgagtgcatatataatttttttcttttttaaaaaacatgaaatttttgcacctattgacctgtcctctaagttccctccccctgccccccaccccctaacaggccctggtgcatgttgttcctctccctgtgtccatgtgttctcattgctgaactcccatttataagtgaaaacatgcagtgtttggttttctgttcctgtgctagtttgctgaggatgatagcatccaggttcatccatgtccctgcaaaggacatgatctcattcctttttatggctgtgtagtattccgtggtgtatatgtaccacattttctttatccagtctgttattgatgggcatttgggttggttctatgactttgctattgtaaatagtgcttcagtaaacacatgtgtgcatgtgtcttcataatagaatgatttgtattcctttgggtatatacccagtaatgggattgctggatcaaatgatatttctggttctagatccttgaggaatcaccatgctgtcttccatattggttgaactaatttacattcctaccaacagtgtaaaagcattcctatttctccatagcctcgccagcatctattgtttcttgactttttttttctttgaaagtcattaatattttattttaactttttttaaattattatactttaagttctgagatacatgtgcataggtatacatgtgccatggtggtcaacccatcatctacattaggtatttctcccattctctaggtt

SEQ ID NO: 1760 - DNA, 4001 bp, Homo sapiens
cctgcttgacccagacacataaagtcaattaatgtgtgtggactataacagcagtgcgccactaacatacaacttacaagggtcccagagtgaaaagtaaagattaaaagcactaccaccgggtgtggtggagcatgcctgtaattccagcacttcaggagactgaggtgggagaatgacttgagcccaggagtttgaggcttcagtgagctgtggttgtgccattgcactccagactgggtgaaagactgaggctttgtttcaaaaataaaaataaagcactaggatcagggactatagaaaagatgccataaaactaagtggaagatctggaagctttctgcacatgggctgaagctgaagcaatgtggctggacgagctctctgagggagtcagttcagaaaatcccttcaaggtgaaggaagaaaacacagcagccagcaaggctggttcatcagcagcaggagtcatgggggttacagcagtgtgggccccggtgtccccagcaggggagtagctatagaaggcctcctctggaaccctctgaccataagtgcagagtaatcatttgccctgtgtgcagctgggacctgaatggcacggacaccgcacatcatgcgctctgtgaaagactcagagccgccttctctaggggcttggaagagaaccccaggccaggtcacaggaatcatcttgtcctggttgacactgacaacaaggatccaagaatatcaaaacatttaagagtcggccctggggtaccatggtgggcacttaataaacatatttccgtggctggctaggatcaccatgtggatctacgtgaagatggtgtctgtgtatggagtgaatggaaaatggagagggaaaaaacccacaaaagattccttgggtggggggagggcgctgggccaaaacctcacggggcacccagggtttccggagggtggaagacgaggggatagtaagggagggaaagtaacaggtagaaaaagttggagaagccaggcttttaggtctttgtgtataaatacgcagctaggcagcttcaagaaaagctaaaagaaaagactgaggcagaagatctagccacgacgaaaatgacggcaggactcgcccgccgatttccattgtaacgctccgggccaccctgtgaccttcgtggaaggaagttggaggattctctcgcttccctggaaaggcaactccgcgcgggttgggtgaagagcgacccggccggcggcggctatggcggggcatatcaaaggctcacatttccgctctcgagccgaggacccgggccgggaccgcagcaccttccgggccgggagttcaaggtgagccgggctcccggcggccaacaggtagggagacctgggggaaagacggccccgggccactccccccggcacatgttgggggcgaggctcggcctggcggagcggccacttgcaccccgcgcgcggggcccgagcggattcgcgccaggctccgggcggccccgcggccgctccccgccgggccgaacaacccgcgcaccccggccgggtttcccgggagcagcccgggcaccctcggcgccccaggccgcgcgctgcagccgcgccccgccgagccctccagggcctcgccagtccccgtgtgccccgctgagccccgcgcacactcacccaacgacaggagcgccagcagcagcggcctcgaggccaggcgccccatgctcgcccggcgggagcgactctccccctcctcctccttccccgccgcctctcctcctcctcctcttccagctccggctgctccagagtcggcgctcctccgcctgggccgcgcgcctgctccgctctcctcgcgagccgataaatcccagcgctggggcgtacgtgcgcccctggctccgctcgctccctcccgcctccttccctccctcctccagccggccgggcccgggagccggccccgccgatccgagtgtgcagccccgaccgcttcccgaaagcagaagggaagaaccgcagcgcccgcccgcgcctcccatccggcgctttgccagcaacaaacacaaactttcccaagcccctccccgctccaggtaacggaggaagagccggggccacccgcttaaaggcgaggaggcgtcggagcccaccctgccatcccctctgggcccccaccccacgagaaactttcctccgacctttaaaagttggcctgggaaagactcgtctggaaatcccatcgctttagccctatcccgggacaccccgcgttccatcacgctggagtcacccacgcgtgtctagtctatcctcagccaactccccgctcgttcggcctctcgtcctgagctaaacaccccaccaaccagccgcttggcctatgccaaaaattatgcagataggagcgaaggagctgaaaggacttttaaaggccacggattccaacctctaccatacagaggccttaagtgtttcggtgaggtgcccaaggattcacagggaaggggcaaaatcagaaccccgctctcctgactctgcccactccccggtggctagggtgggcctgtctccttccttacccagctccctccctctcctcggcgcctgtggcactgattagaacagcaccccacaaagacacccatttaaaaaacaaacaaaacccaagtgtattaatagctatagtacttcatatagaatgtactcttaagacttaatatttattgctctaagtggacaccactgattgccaataaagactcatttttccccctacaatagagttttgtgcttttgatttgaatacaaaaggcccgacttggttgggagaaatggagcattccttgcttgaaacttagcaagcatgattcaaacacgcaaggagcagcactggtgcccactgcccgtcactgggctttcattcacatgcaaaacggatcgcagatgcttatgcggaaactgcccacactggggaagaacactgcttttactctcatgcatccgtctttcaaccaacaaatgtttcttatttccccactatcaaatgtgtgattagccaggtatctttggaaagagacttaaaaattcattcctggtggtgcaacgttattgtacttaatgccactgaatggtacacttagaaatgtttaaaattgccaggcctggtaactggtacttgtaatgctagctactcagaaggctgaggttgggggggcagggggaggcggggggcagggatggtgttgcttgaggccaggagtttttatttgttttgtcttctttctttctttcatttttgagacagggtctcaaaatgaggatctgtcacccaggccggagtgcagtggtgcgatcagggatcactgctgccttgacctcccaggctcaagcaatcctcccacctccacctctcaagtagctggaaccacagatgtgtgccaccacactctcgctaattgtttttattttttgtagacactggagtctccctatgttggccaggcgggtctcgagctcctgggctcaagcgattctcccgcctcggcctccccaaagactgggattacaggtctgagccactgggctggcactttttcttctttttcttttttctttcttttttttttttatttgaggctagaagtttgagaccactcgggcaacattgtgagacaccgtctctaaaaaaaaatttttaaggttaaaatggtaaattttgtgctatgtacattttacacaataatttttttaaaatttatttctgccgccaagcctttcctggttctgttcatacacactgtaattcctttctcttccccatcccaattcttccctagaatctcgcagggaagtttcccaatttcattcaatcaaccttgaattcaagcctaatgttaggccttggaaggtagtggagcttcagagaaatgtgaggcctggcaccttcagaagctcagatttcagctcatcctccatctttccttttcttaaccacccagaac

SEQ ID NO: 1761 - DNA, 4001 bp, Homo sapiens
gttttatttattctcatttgttaagtaaatcaaccattatttttattgtaaaatgtggaaagtggcacctgaggttgaatgtaactccaaaataaaaaaaatctatttttaaacaactacactttatagtctaatggccacttgaaatacatctttaataaaatacatatactctgcacattataatctggcaatattgatttttcaggtagccatctgctcactatccaagaggcctatgaaaggaatggctgagtatggcacccactttagaatcatggaaagttattttcttgctgatccaaatccaaatttattttaatgggtgctacatgttcagaacaattctgtggcccatgggcattcaataaacagctggaccatgctacctccacaaactgaccaaacagtaaaggttagaagaggtatacagagttgtgagcagactgtataaactggatgggactaaatgtcaatatttttggcgattaagatggaaggcaaacttaaaagctatcttaaagtctttttgataagcttggaaatatgtttttagattaggcttacagtattataaagcatatttttctttgagaaggctaaaaaccttagaaagacacttgtacttacatgtcaacacataactcataattgcatttcgaaggaagggaatgttattcacaacgttccaaaatcccttgaagtgggtaagtatgtagtgcactgtgtttggagtgggtttcagaaataattttattcttgtcaaaaattccgctgcaagaagacgaagaaagggagggagaaattaatgggactcattataagacacaaatctatacaatgataactgtatccagccccactcctaatgaggcaaccaaaggacaaacttacgtgttgagcagttttctccatagaatcctgtccgggtacaatcgcacttatactggtcaaatcccacactcatacatacacctcggttttgacatgggtgggaacagcaaggatttgctgcaattaaaggacagcaaataaatcattctctagtgtcttaatcttaatttaaacatttaattgtttgactatgaatcaactttacaataataaattcaagaaatatataggtagtcatggaaatacaattttttaacctgccttagaatggataaaacgtagaaataccaattttctattctaaataaggataacagcatattcaacttggtacatcatgttactaagcttttcttagttaactctttagatgttaaaattagcatttttaagaagttcaaataagtagcacttcactttccaaattaaaatggatctagtacactaatcaacatttagggaaaaattcaaagtaaaacagcttacttttaagacattttgcttatcttaaaacataatccgggctttcctgggagcaggaaagaactgactagaatatttaaaacaacttcttccactcaataaaaaggttccaaatataaacaattcacatatattgatcagatcctgtcttatcataatgacaacctgcaaattagtatcatctatccctatttaggaggtgagagtgtctcagatcggttaagtaactggctcataatgatcagtgcttgtgggaaagctggaatatccacggagttctttcgaactctagcggtccaagctctttcccaagtcacgtagcttctctattcggagagaagtcggagtactgggatagacccaggaggtcagagcggaaactctgcccgggtgcgtggaaccggagtccccggtgcgcggcgccaggtactcacctgtatggctgagcgccaggaccgcgcacagcagcagggcgcgggcgagcatcgcagcggcgggcagggcgcggcgcgggggtaggctttgctgtctgagggcgtctggctgtggagctgaaggaggcgctgctgaggagttcctggacgtgctcctgacgctcactgcaagtcgtatgacaattggtcgctaaccgagagaaccttcctttttataagactgaaaaccaagcccatgtgacgaaatgactgtttctttccgccttttcgtaccccccacaaatttttccctcctctccccttaaaaaaattgcgtaagcccggtgggggcagggttttttacccacggaaatgagaaaatcggaaacccaggaagctgccccaatttgggagcagagggggtagtccccactctcctgtctgatccctccctctcctccccgagttccaccgccccaggcgcacaggtttccgccagatgtcttttcttcttcgcagtctttgcccgagcgcttccgagagccagttctggactgatcgccttggatgggataccgggggagggcagaaggacacttggcttcctctccaggaatctgagcggccctgaggtccgggggcgcagggaatcccctctcccgccgccgccgccgtgtctggtctgtacgtctttagagggtcgaggaagtcacgtcgggacagactggggcgagtaaggttaagaaaggctgacatgttttatgttttagtgacgacgcttaataggctgtatatctgctctatatgcagcacatacatacatagctttttaaaaaactcttattttgtggaatgaaatagctaccttcagtgtacatagctgtaatttatctttgtagctaagttgctttcaacagaagaaatactgttctccgtaccttcaccccctccttgtttcttggaaagagaggcgggaaaggtaaattctcctcataatactggtcctaagcagttaccctgtaaatagttaatgtgagctccacgggtcaccaatataaagtttcctgccttctgatggacaaaggaagcggcgatggccagaatttgcagggacgctaaatgtccaaaacgtatgccttaaggcatttctctccctgatgcgtggattattttggttactagcccttcataggagatactggtaaaataaattcgagttttaaagttcactcttttgtcttttctgtccacttttccaagattatgagttgtgaccatggatcaaagtacaacatagcatttacttttcagttgcctgggcttattggggctaattttctattctcgttttggaacatagttggatgaggaattaattagatggaagggagattttgacagttggaatttcatctttgcttttgtttaacatctatcatgggtagtgctcagggaggagcatgtgagggtgagatactaaaaaatatatatatgtatatgtgtgtgtgtatatatacatatatatatacacacacaccagaaaagaagtggaaaatagaaaattcagttatgtcctaagtccttagcattacaggaaaatgacagcataaaacctgaaataaaactacaccaggtacctcaatttgtagaagtcttataagaaaaaaataaataagagactcacttggaggttttttttttaactgttttgcttagtgtacacatctgattcttcatgagacacggatgactaaaattccatctcatctaggaagcctttctcctcctctagtcatatttcatcattccatttatggcactcctatttattgcatggaatcttacatgaaatttcaactaagagcgtggatcattttctttttgataatttaataatttcaatcttctgtttcattttaaaggagtaggttgcatctactgaaatttgaagtttatagttagagctactaatgttagtttgggttagaagccatgttagaatccatactgtgagagagtactaaaattttacattacaatcctgaattcattttgaagtgatcatcatcattgtcttccttatcagacattaattgttctgttgtctgaaaagagatttggatacaaaagtgagggaaaaacagggcataaggaataattatatttagattattttaaactcaaaggaattgaactccatctatcccatag

SEQ ID NO: 1762 - DNA, 4001 bp, Homo sapiens
caacaacccaagaatgattaaaaagcttatgttctggtcaggcacagtggctcacgcctgtaatcccagcattttgggaggccgaggaaggcggatcacgaggtcaagagatcaagaccatcctggccaacacggtgaaacttcgtctctactaaaaatacaaaaattagctgggtgtggtggcgcgcgcctgtagtcccagctacttgggagctgaggcaggagaatcgcttaaacctgggaggtgcaggttgcagtgagccaagatcgtgccactgcactccgtctcaaaaaaaaaaaaaaaaaaaagggctgggcacggtggctcatgcctgtaatcccagcactttgggaggccgaggtgacagatcacaaggtcaggagatcaagaccatcctggctaacatggtgaaatcccgtctctactagaaatacaaaaaattagccgggagtggtggcaggtgcctgtagtcccagctatcagggaggctgaggcaggagaatggcgtgaacccgggagggggaacttgcagtgagccgagatagtgccactgcactccagcctggcgaagagcgagactccatctcccaaaaaaaaaaaaaaacttatgttcaaatgcttgctcaaagaagtacaaagagttttttctcctaccaatagaaaaaatattaaggatctgacataaaaatactacctctaccacctttccttcacccaagtttctggacccttgtatacgattattacaacgaagtagtctgggggtgccttttcatcaaaggtggttagaatatctgaagtacatacagaatggtttttagtgtcagacacctaggcaagtacattagttccaccacatactatgtgccattaggcaaattactaaatggctctgaacctgtttcctcattggtaagagggaaataatggtagctacacctcatagggtttttgtatttgtgaccttaagcacaaacactgctcgttgcataatgtgtaacattgtttgttataatgctaagtgcatatcgtggtcaataaatgttaattatcattactgaatgtttgaccaaaaaaacctgtcaataaatgtagaaagaacacagagaaaacagtactagatatctctacagtccccaaatttcacaaaatgttcttgaaaaaatctgctgtaactaacccaacccaattcaaaccaggattggcaggatgactccaaatacagaataaatggctttgtgctaagagaattttttaatgggattttacctagaaatcaatccaaaaagtagaccatgccacaatcttacctctgtgaacttgttgagagtagcattggtagggttgtgagttatcagaaaacgcatgttctcataggagatctccacaggggctggacggttcattatggcaaataaaaagtgtgagcgtgcgtgtgagtgtgatggggaaagtgaaaaaaaaaaatcaataaatcttgaaatgtttcacagcagaaaacattaaaaagaccactaaaatgcctattatcaatcagtgttttctctattcaacttgtttattccttatgaagcttctctcttcaagataagcaaagtatttagaatccacttgaatccaaattcaatttgggcctcaatttctgcagatggataccttcggactccaaaaaatccaactacatacaaaacttaagcagcctttactacatttaggcactagtgagacaagttaaaagtgtaggtcactttccacttgtttacttgatgcttaattttactggagtcattaaaagaaatatgcttgcaattaaaaaaaaaaaaagccaactatttctgaggccagtctcggtgtccaggagtcttcaaggcaatgttaattatggcacatagaacctccaagctcacttgtcagcgaaaatgctgtgctgagcctggcagaagtctgccctcacactcagaatcgccataaatgtgcaacgtatattccaacgaaaaacctggagaagaaaagaataagtaaaatgaactagaggctgatggcacagtaaacacaaatgcctgaagtcaaaatacattctttataagcccaaagcgatgtgaaatgtcaccaattatacgttattaccatctatgaagaattggataaaggggtattatgaagagttttaaaaatcagagactcgagccgggtgtggtggctgatgcctgtaatcctagcactttgggaggctgaggcaggcagatcacctgaggtcgggagtttgagaccagcctgatcaacatggagaaaccccgtcgctactaaaaatacacaattagccaggtgtggtggtgcatgcctgtaatcccagctactcaggaagctgaggcaggagaatcgcttgaacccgggaggtagaggttgtgatgagccaagatggcaccattgcactccagcctgggcaacaagagcaaaactctgcctcaaaaaaaaaaaaaaaaaaaaaaaatcagagacttgagccaggtgtggtggctgatgcctgtaatcctagcactttgggaggctgaggcgggcagatcacctgaggtcgggagttcaagaccagcctggccaacatggagaaaccccgtctctactaaaaatacaaaattagccaggcatggtggcgcatgcctgtaatcccagctacttgggaggctgaggcaggagaattgcttgaacctgggaggtggaggttgcagtgagctgagattgtgccactgcactccagtctggacaatgagaacaaaactctgtctcaaaaaacaaaaaaacaaaaaaaatcagagactcgattacttttaactcaaataatttttaaatgattactagatacttaaaacttccatgaactttttttttttttttttttgagacggagccttgctctgtcacccaggctgaagtgcaatggcgagatctcagctcactgcaacctccgccccccaggttcaagctattttcctgcctcagcctcccaagtagctgggattacaggtgcccaccaccacacctggctaatttttgtatttttggtagagacggggcttcaccacgttgaccaggctcatctcgaactcctgacctcaggtgattcgcttgcctaggcctcccaaagtgctgggattacaggcgtgaactactgcgcctggcccatgaactcttcataaacttcacaaagatctccttatttttctgctttgatggttaggtccttcacatatactctttggttaaaataaggtgtacctataaatgggtagaggatattaatcaaaatttcactttgaggattttattctttctatccaaagtatatgtgttggccctcaatgatgagactaactcataaggcactctcaaaaaatcctgtgatccaacactgtactgacagtactttcctatatgatactgtaatgtttcacacaatgcagtggacataaccaacttgttacgtaaataaagaattgattttttaaaaatcatttccccttttcctcacaagtcttgagtagttgttacaacatataaggaatgaggaaagaagatcagaaaaatgaagtgacttgcctaacatcacacaatggaagtttttaactgagcccaaattcaaacccaagtcttctgttagtcccgttttttccaatgtaccacaaatgcctcctgactcaactaatgtataaacctcatcctctcctttctatttcagtttacctttttattatttgtcacataataattgcctcaagaatacaaaattatttgaaggtcactgattcacacacacttctccccaaacattaatccctaccaaaaaaacaaagcaagaagtgacagaatttttattattatttttaggcctgctgctttgaaacacagtaatctttacagctggctcagtcagagaacatcaacataatcataaattcctctggaaaaagggacaaagcttaagttctttcacttgccttttccc

SEQ ID NO: 1763 - DNA, 4001 bp, Homo sapiens
cgagactccatctcaaaaacaaacaaaaaaaaaacaaaaggaccatactactctttgcttatactgaaagactaccaacttctatcgcttctcggccttttggctaagatcaagtgaaagactaccaacttctaggagacattatttttaagataacatcatttttaagattatatcaatgtgtaaaatccctatcaaggtactactcttcaagaatccctacttttacaacacaagaatgggaaaagtccatgataataattagtccattcattatgaaacttaaaaatgccaagatcagaataccagcaaacaacttctcaccatcttcaccaatacaatggtgtgctggcaagtgattctgaagccctgataatgtgtcattctgtatccttaatctccttttgcacactcagcaaggcataacttcactcacttccctctgaaactactctctcttacagagcatgacagcaagtaccatattccaactcagcagtgtaatgtagtttggcgactccggacagacaaacatttgctgaatgcctacagtgacactagaattgctagtcactgctaatttcttgacaaattccaggaaataataaaccagactacagttcaatttacctaacaataaaatactcttcacctgaaaaactagcagtactttacaaaagtttatgctcctgaacactctacaggccagagtgtaggattttgggcaacagacaaacttcttttcgttagctctcaggggccccagactaggataggatggcatcattgacaaatttgaaaatttactttgaagtcatgaaacgtgggagaaaaaaatgtatagaacaacaacaaaaaaacacatcacatcctttctgggggaaaaaaattaaaatcccagagccagaagatcatagtgccgctggaggagacttataccccctttcctcatacttgaacctgaagacccacggacaagatgctcccggaaagaactccccaacccaacacaccagggttcactatcgccacacacaaagaccaaggggaagggcctctaggatgcctgctcacacactggacacacgccggcacaccctaccacactcctgcctctgccacgcaccttctcaccgacacacaccatgttctccccccacactcacccgctctttaccacactctcaactctctcctcccccatttactcactcattctaccaccacccctcatgcccacacgctccccacacacccataccctcccctgccctcacccacattcccccaacatcgacactgcctcccgacgcgctcccactccccccacctcctcgcacggacactcagccctgtcccccactcacacgccctcccttcaccaactcactctcccccacgctcgcacagctctctcccttccacacacacgagcccgcccctcgctcacccaccctcgctcccccgccccggcccggcccggccctccttccggggacgtgtctccggcctgcactaatggctgcggcgcctcccgccctccccttccccgaggcccccggcgccggcgcgggggccgcccgggaggggcgcactcacgctggcgagctggggactgggcattgaagtccggcggtggcgggagcgaggaggcgcctctctcctcagtcacctcggcggcggcggcggcggcggtagcggtggcggcggcggcgacgactcccccccagcctcggcgcgcgacacccggcccggcccggcggcggcggcggcggcgcgtctccacgagtccgtcttgctgctgctgctgcggccgccgctgcgtctcctgctgccgccgctgcctccgctgccgccgctgccctgtggcgtcacctcgcgccgtgcccggccgccgctgccgctccagccgctcccggacagacgacggttacagcccggccgatcgcgccgccaccaccaccgctgcgcgcgcagccggaaccagctcccgccgccgcccctcagggggcgctgcggggcgcggcgcgcagggccaccggcccgccctccgcgttcgctgactggctggctggccggctcgcgggcagttgggcccgcccacctgccccgcggggcgctgacccactgccctgggcgcctcccccgctcctcctcctcgtggttcgttccgctccgcactcccggctacggaaggcgagtccatgtgatcggggagggaaggcagaacgtggcctggggagtcgctcgcccacgctgcgccccgcccatccgcacctgggctgggtcgagggcctgcagccgaggtgtgacctgcaaggtcgaagggttctttctcgctacttggccctaaggcctcgggtcagatcctgatgggacggggtggccgccacgtcctgggcttggggatttccaactcagaagtgggaacctggccagctcagttctcggctgcccttcctgaggccccaaatgaatggcgtgtgcatcttcgtcgaagatattaatacgccacccccagctctgcccacaagacacacacccaccctaagaactgtccctgacaagccaaaattcagactttcaggatgtaggatcttgggcaagtgattccaagtattatcaactattaaatggaaataataatcagctacctcatgggctctttcacgtatcgataacaacgtatgaaaacgcttgagaagggccaggcgcggtggctcatacctgtaatcccagtactttgggaggccgaggagggcagatcacaaggtcaggagttcgagaccagcctggccaacatagtgaaaccctgtgtctgctaaaaatacaaaaattagctgggcatggtggcgcccgcccggaaggagggccgtaatcccagctactcgggaggttgaggcaggagactcacttgaacccgggaggcggagtttgcagtgagccgagatcgtgccactgcactccaacctgggcgacagagtgagactccgtctcaaaaaaaaaaaagaaagaaaaagaaaacgcttgagttgagaaagtgagaaagaagagaccctgaatttcaagctttccgacttaatgtcacctttaacgacgcagattatcgtagagattctcaggtggaaaggtttttgcctcttgcatttggaagctagccagaaattctttgccagatcatgcgtcctgagttttggtttggaaaatgtggtcactagcgagctaggaggctggtttgggccacgaccagatggcaaagtgcggcattggaggctggcttgggagggagatgtctccccctgggaattgcgggttggggagggtctgttctttctgtccacccctgggaagtcttgcctgcccagaactggcgcctatataggaagaaatgaagatgctcccgtgggtgcttctcccccacctcgccaccacatccatgctcatccagccctgcggggagaagcagtgatctgtcgtcattagaccttccccacaaggtagacttggggcattgcttctgaccagaaggcttccattagcgcttagcagtaaaaagaaaggtcttatgactcagccgcatcaagccacagcacagagtccaggatgttcaccaccaggtggcccaggagggggtattctagggcaaggctggctagcagggctgtgtgggagttgagagaggccttgaggagcaggaggggctgcagatcagtagcaaggcccttaggtgaggagcacagactgggctcacttgcattctgtctgcctccagcaagcagtattttctacttcctggaaacatagactgatttgaaagaaagagctaccacctctgcaaaacttttgctgcgtctgtgagttattgattcttccgataaagttgcaaaacaccttgtgcaatactctaccatagtacttaacatggaattgtaattgcctgttttcagattctcccctgcttaaatggatctatttggggcagtctagcagattgtttgctt

SEQ ID NO: 1764 - DNA, 4001 bp, Homo sapiens
gggggacaaaaaagaagaatcaataccattttaatgaaaccgagcatgggccaattaaaatgtagatgatcatacaacagctgcttgtggtaaaacagcagcaggcatggaggtgtatccaattagggaggccttggctcctcggtaagctacttgtggttcccataagtggctaacgtgcttctagatttatttctgatattgggggtggagagaatgctatcccagcaacactgcaccaacatggccataaatgcccctcaggcccccagatggctagggaaactttctgtccttcttgtgttcactctgcacgagctgtttcctctgcctggaatacaccctccagaggagcacaacctctatcctctaagtgtagtgcacccttcaccaggaccaagctcgcctcagactctcacagaacccctcttccatgtattatcattcttcaccggccttcaagtttcctccactaggctgcagactcctgccctgtgatctcatttagcatctttctatcctgttcctagcagagtagaagctgggtttgttggatgaatgagtaaactaatccatttcaagaagttaacacattggtggaaactctgtaactgcccgcacctgcagtctagagattcctcaccttcacaaagaacctgcgacagccagtccctagacttaagcggaaaccccacaatttctgaaattgtaggtggggatgagaaggttggagaacaagaacccaaggaagtgagagggaaagggagataggggcagcgttacctcactgctctctccaaacgaaaaggtgtaaaccccatttacaagtattcaaacctgagatctgggggtcacgtggggaaggagaggctgttaatacctacaactttggaagtttgaggtgaagacctgatctgaaattgtttggccacagctttttttctacgagccagctcgaccacccaagtaggagcctcgacgcccaggagttcggtggcaccactggggcctagtgagagggcaggaaaactccgctcccctcaagattccttcccggtggtggtggggtgtgattgggagcgtcgggcagctgcatccccctaccgctgcagcgaccgcgacgtcgttcgtctttcatcctctagcccccaaggtctaggtatctctagttgcccttccgaggccctctctcgttcccaaaacgcagaagggaatggagagaggggaccagggtgtgggtttaaccacaaactccccagactgcgctcaccttccagctcgctcccgggaccagctttgcgcctcaccgcgggcagctcccaccgcgagataacacccctgcggcccggccaccccgcgccccaggctgccctgccaggcgtcccggggcgccaatcgcaagttggcgttgccagcgtctgcccaagtcatctgcagggcgcccggagcgccaaggcggcctccaacctcgggcccaactcccggcttggacggggcttacctgcttacatggcccccgtggcgccccggagtcccgcgcggaaaggctgtccttcgcggcggcggagccgattccccacggaattgattccagtgactggcggaggaggggcgaagggaaggagccgcaggaggcgaaaggggagggaggtttccgccgcgatcccggcgcgagagtccgagcagaggcgcaccgggggagaaaaggagaaaaacctaagcacggggctgtcccgcccgaggaggccggggaggatggctcagctgggaggggaaggagcgccagtggccacttgatgtctgtctagggctccccgaggacctgagccaggagagcaggcggctgagcccggagaagcacagcaacctgcccccgagtctgcgcccgctgcgctcactccgccgagaaaaagttggaaagaactttgaggggccgggagagccagagcggcaggaaatgcgagcggccgggagaggagggaggaaggggccgtgcgagtgggaggggacggagcaggcgccggcggccacggctcccccaccccagagccgggctccgcggccctgggggccgggaggcggagggagcgctgggcgcgcggccgggggcggggaggaatgcggcccgggagggcgcgcgccgggggcgccgcgggcgcgcgctgaaacgtggagccccagctcccgagctcccgagctggaggcgcgccgtccttggggacgtcacagcgctggaatccgaggaatgccgggctgcaggagctccttctgcaggcccggagaagtcgcacacttttaatggggtagttttggaaaatgttttaaaaggtgggggccgaggacggaggaccggatgaaactccctggagtaagagacgtggaagtggagagagcaaggcgaccgcagccaccccaaccctgggctgctcccgccgttggggagaaagaggcaaggcaaggaagagcccacctagacttccgaggaccgcagagacggggcggcggcaggaacttgctcaccccgacctacattcagaatagtccaccttatattggggaaccctccaagcaggacgtttcatgcagccaccccacaggggaaaacagaccaggagaaagtaaggtggcctcaccaagtaggcaatctcagagatctctccctagaatctctgggtactggacccggtgtcttagccttctctccctgccccctcccgccccgtaggaatgataaaaagcagcctgtgtgctgagagttggaaaatgtcgttttcccggtttgttccatgccacagaatcgccccaccctgcctgggtaggcactgggagggaacttccttagcactttcggaggtggagttaatgagacgcagctggtatgatggaaaaagctcggagccaggcgactgaacctgggttttaggccctgcccgattggataactgaggagtatcccagcccctgagatcctaggtttctgtagctgcaaaattaaataatttgtctagatttctgtggtcctttgcattgctacaaacatgtcttgggatttatctcggtaagattccagtcctttgttgaaaagggaccttgaagtcgttggcacacaatgtattgtcccaaatcacttcagtgtccggcaactcatgcaaaaattcctggcctcttggggaagagaattggaaaccaaaaagcgcggtggctcacacctgtaatcccagcactttgggaagccaaagctgggggattggctgagctcagaagttcgacaccagcccgggcaacacggtgaaaccccgtctctactaaaattcaaaaaatgtttcgggggtggcggcgtgcgcctgtagtcccagctactctggggctgaggcaggttaattgcttgaacttgggaggcggaggttgcagtgagccgagatcgcgccactgcactccagcctgggctacacggccagactcctctcaaaaaaataaaataaaataaaataaaataaaataaataaatccgtagtgactctgattttcttcgagcatctgccaatctctagaactgtaaattagagaaaacgccgagtgcaatgcaaaagtgatggaaagaaaaggttgaagggaaatcaactttctcacattttaaaggaaatagctgtacagacgtgctgggtttccaaagaaaacattaggcagtgcctgactgtgttccagaaagtgtggaaagcactcccccattcctagatgaggaaagtgaggcatgaagaaattacctgtctcactgagggtcatacaactaggaagatatgatcagggccctagtctgtcaggcctaaagtgcatgctcttcatctctttgaaattggacccaaacaggattaggattaaagataagaaaatgccttcaggatctcaatgtaaaactctggcctttgctctttcctgggagatgggagacctcttgcttggtgtcttttctagtgaaaagacactaggaaatatattgtgtt

SEQ ID NO: 1765 - DNA, 4001 bp, Homo sapiens
gctcactttttacatctatgccttgggttaccttggcttaggaattatagtccaggggcagggacatgtatacacatgtgctagaacttcctacttatctcctttcaggtaactctaccagaggggctcagactgatcagccagtggcagtgagagcacatttttcatagtaccacaagattatccatgttgagctgacatcggagttcctatcataatatctaatcactcaataatatctaattactcaagactttcagagtgttttcacatctgctatccggtaccagagtgttagctccaggaggcaaaggttttggttctttttgttcaccgctgtatttttagtgcttagaactgaacttggtacatactaagtgctcaataaatggtactcaataaatgaccacatttaatgattgttattgatatttaatcatcacaacaatcctgtgaggataggtaggacatgtattattatccccattttataagttagaaaacagagagatttaagaacatgtcaaatacttcataatttggtgaaaaaaaatcatgatttaatttcaggtttgtacttcagttcccctctttccacccatttcttcacaactgaagagctaaggtttaaaattcttatatctctgaaacgccagctgtaagcattctaaaatacatgataggtactattagacaccctatgttatctgatatctcagcttgtagggtgaatgaggcctacccagctgccattgcatcaataatcacagttctctcaaaggagattcactgttcttctgggtaatctaatccacccaacctgaagctaccttgtactcatgtttctctccttgacctacacttgtctctactctccatcctagccattccacttctccaagcaaaagaagttaaggaagccctgttattgaaaaaacacatgttataatatatttttcatatgaaaaagaaaagaaaaatgatggccagacatagtggttcatgcctgtaatcccagcactttgggaggcaagatgggaggattgcttgaagccaggagttcgagacaagcctgggcaaaaaagcaaggctcgtatctacaaaaaagaaaaaaacaatttttttttaaattagccaggcatggcgatacacacctgtggccccagctactcaggaggctgaggcaagagaatcacttgaggccaggagttcaaggctacagtgagctgtggttgcactgctgcactccagcctgggtgacagagtaagattctgaatcttaaaaaaacaaacaacaacaacaaaaaaaactgtggcagtgggtagttttggtgctcttcaaaaacctttgtcaaccaaatagaatcccagaggggaggctaaaaatgtaatattgcatgaaaagttaacattggtctctttcttcttaatattaattaaaattagtaatataaagcataaaccacaacttagatacctggggaaatctggatgttcaattaatattagtgtttttacatctggagttgtatatgtcttctgtaggattcctaaccaaactccaaagaactagcaaacaaaatattaaaaccagtaattttgagagaatacctgaaatacatgcaaaccactcagagaagtcaaacttttttttttctgtcttccccgccaaggtctcatatttactttatcccaagagcaatttggtctcggaaaattggacccccatagtcagttaaatagtgtatgtaactaccctgagagggtcacatacaggactcaccagaaattcattggcaaactcctctttagtaattttcttgctttgggcctcatccaggaacttctgcagaatttctctttggtccatgctgcagagcaagaaaaatagtctataagtaggttgagggagggcatgtcaaatgtgtgtcatggccgagacacctccaaaaagccactgctgccgcctgagcagagcatgctgaaggctgtggtttactgacttcatcacaagccctagaggaaattagtacgtaaccaccttctgtggtcacataacacagccatcatctcactccagggccctagtgccttccttctcagcaaaggaacctggttacaattcaaatttttaacaaacaagaggctaactagaacgtaaagtgtggtctgcttaactgagattattccattccatcacccatatgcaaaactcacctttcttcttgcctcccagagaaagaacagaattacaggtctcctgaatgagttctgtctctccccattttcccagtgagcacaagggccaagttgacaccttctgtttccttatgtcccaaatgaactctgcaaagttcagttaggcccaggaaagaagacagacactgtttagagtgagtgacatgtcttctacccggactgttcatcgaaaggtttcttgtcagtgtgatcaatgagaaacttctgttcatcacagaaggtatttttattcataacttttaagtctgctatatatacctcaaactcccttttgaatgaagcaaagtcagatgcttctgacagtctgtgtctctcccaggactggggaagtgctgacctccattaagggaagtgttgatttcagcacctcttcaaccctcccagtaacctttgaagcttcacttgggttctggatataaagactaagagtgttggtctatataggatctagagcaagtggcccccacaaggagcacctgaccagacagttagctcaataccctgcatatgtaatgctggtaaactgtgatggaacaaaaagaaagtaaaatcaaccaccttgctgacaacattgtaacttttagggcagaaagcctgaagaactgtttctaaagaacacatttctactctgcaaccaatgtcttaggaaataaatttgtttcaggaagttatgctgtgcctgtggcattttggccctgaaaggcaggctcttctagaaaaactttccacatttgagcttgcataacctctcaatgggtacaagtctacccaagtgcctaattcagtgtgagaacatccaaaaatcagtatatcatctttattgaaggcagaagttcaacaaatgttaacaaaattagtcttgatcctgaagaaaactgggaaatgtgttgttaggacttcctctatttaagatattagcaatcctttctgttttgcaacattattcaaacttccttcaggatatcatgattctgaacactgcttaatctgaacattaaagatactgcatgctctttactaagtactgcaaaaaaaaaagaaagatcatcgagatatcttggttatagacaacttaaagacaatatttcaaattaagaaactcaatcccagtatacataaattaaaataaaccctcattcttcagcaatatttgttaggaatagtatatttcttaaattatccccatctagaattaagagagaatttcttgctgctctaagtaacgtgatgtttactttggctattttaaaacataaaatatgggaaatctttgatttataaaaatacaaaatttcaagtttgtaataactaaaaccatgtaaaagtgtgtacatagttaaagactaaaagaagcaaaaaagaatcaattgtgtaagtttgctttctaaaattatcataattttagaattatgataaagtttgctttctaaaattatcataccgtttttaaaattagaaataaacatttaaaaatccattaagttgttcaacaaatttattgagtacccactaaattctaaacattgtcttaggagattggcatacaacactgagaaagccagaatatggtaaaaacaaaacaaaacaaaacaaaaacatccttagccagttaataaagcaactcagaactaaagatacagacatgattactgataaaaattaaaacactccttaggtaactttgggaaagaaaataaaaataaaaacattccaaactaacttgcttaattgcagagtagcaa

SEQ ID NO: 1766 - DNA, 4001 bp, Homo sapiens
ctaagggaaggacaggatctatttggtgggacccagggcagaaggcagtctcggggtagagtaacggcaagataaagggtagagattgtggatgaagataggaaagaatccagaaggaggaaaagagagaggggagagaggccacacaccagagtacacagggctctgagcaggtccaagtgggagaaggcaagggaggaaacagaaaatatgtgttctctaggacggaagggagaaagcacgcagaagccatctctgagctaaccagtgggccttcccctgaacagagaatggaggcctccagcagtgttggagctggttgggcagccaggcaggcgggctcctggaccccagcagggtcctctcctaactgctgctgttccactcccaggtctgtttctggcttctggggtctctgtccagggaggtaggctggaggtgtttccttcctcctcctgcccatccccccgtctcccgcctctgtaaccgtcacaggaaatggcctcaccaagcccttgaacgacagcgcatggtgaggcgacagctgggggcaagacaggaggcatggaggtggtgggaccatctcctcttgggggcagtccctatctcccagagccagggtcacagtgggcgaggtggcgggggtgttgaatcaccaaggcagcagggacggaggtgaggggacagaatgggcctggcacaggtgtgagtggtagagcgagggtctctggtagcagaaaaggtcccttcagcctctgctctccttgtagctccctgtggcttccctgctcacccccgtcttggggacatcaggtctgtgagcacccataccccagccaggcactgtggcgccccactcgccctcccgcactccctcctagagatgccctcttatatccccggagttcgcaccccccggggccacaggactcccagtccccccttcagatacttactgaagcagctgtggcccccaggctgcctcttgccagctgtctgtctgtctgtcggtctgtctttgagggctgagaaggctccaggaagccagcttcctccctccgcccctccttgctgccacccacgcacaccccagctgcattctgccctcctgtgcctgctgccgctgccaccaggggtcggctgcctcccgcctgtgcccttctggggcccaaggccccgttccctgggaatgggtgaggggccaggccttcccgaccatcctgctttccccagcttccagaccctctcccctcttctgtgtttctcctctgggtctttgtcacatccagccgctgcctacttgctgggcacagctcgcctgacccccagctctgtgctgtcccacaaagaacccaaggctctcctgctcaacctgaccttggccggaggcttatttctccttctctgcttctgccccacagccctctccctcaaggccctctccctcaaggccctctccctcaaagcccttgctgcttcaagccttgggaattcatggccaagcacagaccacatcttcccagagcagatgtggcacagactcggggtggggaaaaagaagaagcaagaatccatgcctcacaatgtgaaggaaagggccggggccaggccaaaaaggtcgtctccacgcctgtgccacggcccagctctccacagcccacggcctgagtgtaggccagcccagcaggaagcagatagcagagtccacttgtgggagggagtccgaggggcttcccctgggccctcagccccctgcaggcctcctcccagaaccctgacatctacttagaagacttacagacagtggacagtctctggccctcacaccaggggactcccatgtcctcttcgctgctggggtgcctggatgcctgggacctgaagggtggcccccaagtccaagactcctctgcccactgcccctgcctgaccttggcaggctccttgcgggccagcagcccagccggttcatgctcgctgcacgcctccttttaccttgtaacatttcaaacgcccttcccttcccggcccccaacatgcacaatccacgtcctctttcttcctcccacttccctgattcagctgtcaaatggtgacagcaaaaaagaaatgaggtaccctaggcacagggggtaggcatgccggagggggtggtcgggagggggctggccttctgctggccccttgaggaggagggttgagacgaagaacaagaacagcccccagaggctcagaaggcctcccagcacccgcccttgctcttggcagtggggacaggggctggctcttttttgagcccctccatggccagctgatcctggcacctccttccctgcagcctgcgttcctctccggagtgggtgggtttccctgaggaggaggccgattagggctgggaaaggggttggttcccgtgctcaggacagactggagggaagcaggaacctgggaatccctaacatgcttgcgagcagtgacctggagactggcctctgcctcaccccccacaccagtcagtgtttccactggtgggtagtgggggccctggggacacaggagggggcaggtgggggttggaaagagggcccggctctgagcctatgctgattgttatcaagaacaggaagctaggacaccacaggggtgggaggaggaagcggcaaagccctccccacacaggtctgcctggtccccccaagtttccagggtctgagccctgttggctgtgagcccacccctttcccccacagactgaggcctagcagtggctggacagttggaagctgagcttcacagcaaggaagctgggagccaggcgatggggaagatagttggggttgggggtgggggtagtggctgagcattaggcaagacctctcaaagatcccctgttccctctgggtggatgtggggtagaggggacagtcactccttggctcctgcccactccttcttcccctgtgcttagggatacctggacatccatggaggtgtgtggccagagctcatgagggctgaggatgccaactgcaacctcagatggcacaagacatgcgtcatcgccctgcacctccccctccccagcctggcctggtgacttgggacgcccctctctgccctctctggagtggactctgtcccatccgggctgttggaaggctcctgggcgtgactccctctcccctccagaaccttcccacccctggggccaaaaggtcacagcagctctcaaacttccatcactcgaatcgatttgtgttcctgggttgagatttaggttctagccaccctcgactccagagaaagtatagtaatagttggaaatcagaaagatctatgcataatgagtctaaacgtagcttattaactgtgtgaccttgggcaaattgctgagtctcaggctcctcctcagcttcctccctccactgggggatgatcatagcacctcccttgtcagcccatggtgtgctttgctcacggaggagaggttgggagtcagcagccagaggaccgaggagctgggaggagctggctggggaagtgggtctgggagcagcacagggtgaggaggtcatggctgccgggtctcacctctcaccagcctccctcttcctcctcactgctgactttctccctgaacccgggctgccggggcacttccagccgagcactgaggaagtgcaggaaggagtcactcccaggggtctcccagcatcccgggtgggacagagtccactccagggaggacaaagaggggtgtcccaagccaccaggccaggctggggagggactggtgcagggcatgatgcatcttgagagtcagccttgtcccatctgaggctgtggtgggtgccctcagccctcccaagctctggccacacacgtcttgactctcttgttttcccctctagtgattcccagttccagggctgtgagccgcagctccctgccccaagtgtcagaagcgcccccctccctagcccaggcccggggaaaggcgg

SEQ ID NO: 1767 - DNA, 4001 bp, Homo sapiens
ctgaagttctctttcctaaggggcccaaaggggagacttgcccagggtgcccgtgagagaatggttccagctggctgcctctgatacagagggcagagcgattcagaggggaccccaatttcttaccaagaattcttcttccagttgcttggggctgggtggctggcgctgaagggcccagcgggtaagggggtgtccagcagtgcgcagaaagtgtagggtgacctcccggggtgtgttcacagagcagatgggttctacggcccccagggaccgaacgtccagcatcagagccacattggagccccgcctgcaggcatagcccaccactgcctagtgagcacccaatcatatttgcttttcttttctttttatcttttcttttagagatagggtctctctctgttgcccaggtctggagtgtgatggcactattatggctcacagcagcctcaaactcctgggctgaagcaatcctcccacctcagcctccagagtaactgggaccacaggtacatgctaccacacctggctaatttaagttttttttttttttggagagacagtgtcttgttctgttgctcaggctggttttgaactcctgggctcaagtgatccttctgccttggcttcccaaagtgctgggattataggcatgagccactgtgcctgaccatatttgcttttcttacaagtattactgttataaggcacctctgagggggccgctctttatctttcctttaacctggtagcccagtaaatttagggtttgggcccctgctgtgtgccctctttttttttttttttttgagagagaggaggtctcactatattgcctaggccggtctctaattcctggactcaggagatcctctcacctcagcctcccaaagtgctgggattttgggcatgagctaccatgcctggctcagccctctccctttgtcagccagaacagggcagccttgaactcaactgctccttccagctgcctgcctcttcccactcccagccaggccctgtggctccgacatgcatccagcaccaagaaggctgtgggccttgcctggaatttagggagcaggctcatggttgatatgaaactctgtgctccagacatgcaaaagacatgcaaatgagcactactggtttcctttccaaattggagtcaacaactgagggccctctggaccctgctgtcagagctggaggggcagatggaaggaagggaggagcggaatgggggctcagggctcggaagacccctcccccagggaagatctcacctctcctgcagtcgcacatgcttcttggctggcgttttttcaggcggaggctgggtcatggctgcccccaaagacaaggtcaacggctgtgctctggagcgccccccatgggcttggaccatgctgaggtggggtgctgggcccaggggaggctcactcagccatgaggtctgcctgaaagacagggccctccgctgctgttctctggcctgcctgattggccagaaggaggctcccatgccaggccaggtttgcactctgttttcactggggcgtcttctgttccccaagaggtggcctcattttcactaagggaaggacaggatctatttggtgggacccagggcagaaggcagtctcggggtagagtaacggcaagataaagggtagagattgtggatgaagataggaaagaatccagaaggaggaaaagagagaggggagagaggccacacaccagagtacacagggctctgagcaggtccaagtgggagaaggcaagggaggaaacagaaaatatgtgttctctaggacggaagggagaaagcacgcagaagccatctctgagctaaccagtgggccttcccctgaacagagaatggaggcctccagcagtgttggagctggttgggcagccaggcaggcgggctcctggaccccagcagggtcctctcctaactgctgctgttccactcccaggtctgtttctggcttctggggtctctgtccagggaggtaggctggaggtgtttccttcctcctcctgcccatccccccgtctcccgcctctgtaaccgtcacaggaaatggcctcaccaagcccttgaacgacagcgcatggtgaggcgacagctgggggcaagacaggaggcatggaggtggtgggaccatctcctcttgggggcagtccctatctcccagagccagggtcacagtgggcgaggtggcgggggtgttgaatcaccaaggcagcagggacggaggtgaggggacagaatgggcctggcacaggtgtgagtggtagagcgagggtctctggtagcagaaaaggtcccttcagcctctgctctccttgtagctccctgtggcttccctgctcacccccgtcttggggacatcaggtctgtgagcacccataccccagccaggcactgtggcgccccactcgccctcccgcactccctcctagagatgccctcttatatccccggagttcgcaccccccggggccacaggactcccagtccccccttcagatacttactgaagcagctgtggcccccaggctgcctcttgccagctgtctgtctgtctgtcggtctgtctttgagggctgagaaggctccaggaagccagcttcctccctccgcccctccttgctgccacccacgcacaccccagctgcattctgccctcctgtgcctgctgccgctgccaccaggggtcggctgcctcccgcctgtgcccttctggggcccaaggccccgttccctgggaatgggtgaggggccaggccttcccgaccatcctgctttccccagcttccagaccctctcccctcttctgtgtttctcctctgggtctttgtcacatccagccgctgcctacttgctgggcacagctcgcctgacccccagctctgtgctgtcccacaaagaacccaaggctctcctgctcaacctgaccttggccggaggcttatttctccttctctgcttctgccccacagccctctccctcaaggccctctccctcaaggccctctccctcaaagcccttgctgcttcaagccttgggaattcatggccaagcacagaccacatcttcccagagcagatgtggcacagactcggggtggggaaaaagaagaagcaagaatccatgcctcacaatgtgaaggaaagggccggggccaggccaaaaaggtcgtctccacgcctgtgccacggcccagctctccacagcccacggcctgagtgtaggccagcccagcaggaagcagatagcagagtccacttgtgggagggagtccgaggggcttcccctgggccctcagccccctgcaggcctcctcccagaaccctgacatctacttagaagacttacagacagtggacagtctctggccctcacaccaggggactcccatgtcctcttcgctgctggggtgcctggatgcctgggacctgaagggtggcccccaagtccaagactcctctgcccactgcccctgcctgaccttggcaggctccttgcgggccagcagcccagccggttcatgctcgctgcacgcctccttttaccttgtaacatttcaaacgcccttcccttcccggcccccaacatgcacaatccacgtcctctttcttcctcccacttccctgattcagctgtcaaatggtgacagcaaaaaagaaatgaggtaccctaggcacagggggtaggcatgccggagggggtggtcgggagggggctggccttctgctggccccttgaggaggagggttgagacgaagaacaagaacagcccccagaggctcagaaggcctcccagcacccgcccttgctcttggcagtggggacaggggctggctcttttttgagcccctccatggccagctgatcctggcacctccttccctgcagcctgcgttcctctccggagtgggtgggtttccctgaggaggaggccgattagggctgggaaagggg

SEQ ID NO: 1768 - DNA, 4001 bp, Homo sapiens
ttatggttaaaaaaacatcctgtaatagaatgagttgaatttttattcacaaaggaaatatttcacactctgatttaagcatataataggatatttggtctattcaggaggttgggaagtttgcctggaataaaaagcaatggagctagacctgaagaaaataatagaagttaaatgaatatgaagagaagaaaaatattctggcttacaaaatgtctcagtatttctttatgctcatttaaaaatgcttttcgacatttcctgagtgggaattttaaatgaaaatctgttctgatttgtgataatatacatatatcacttcattgagattattattctttataatttactttttattatcataagctttaaagggatggtaacttgataaacattttctgtactaagacaaatgctgcaaatatatagatttttaaaaaattcacctttgcaataaaaagcaaaacagccacaacaacaacaacaaaaatcttatgttgtttttctttcctctttctttcctctccaaatagaaattgtcaatgtaacatgctcaagaggtagctacttccctgactttcagaggaaagaagaacggtaaaagtcaaaaaaagacttcaaagtgaattgtaataagcaagttgttttaaaatactttttatactttttggaatttctacaaaaattttattttcaatgtccttttagatactacatcataaagagaaatattaaatattaattattagttacattctataatctattgaaatgtactcatgattcatattgacgccgctcaagaactatccattgaatagaccataaatgtgcaaagatttcaaactttaataggcactggaagtccaactagttgcattttcctactgaatacagcatttgcatgatttttaagagtttaaatatttctatctcatcaaggctgtaatatttacccaccacccaggaagggcggtggctccacaagaatttctaaagcaaaaatgtattaaaactattaacaagaaactaaaaacttgatttaaaatacattctgtgataaaaattgcagaaagttaatattttactaaatatctcaatatatttttgaactattatatacccaagtattcaataaaatatgtcaattaaattcaaaatttgaggaagcaaacttcaggtctgaaaagagggagtggcttacatacaaccaaagctgttttatgactttttaaaagatcaaatttgttaaaagaataaaaactcacttattttatcattaaaaaattctcaggcttttataaatgtgtgttattgtcactttggaagttaagtaataatgttgcttttgtaatatctttgaacagttgtaaataaagatacagatagacattgctttccttttaaaattgtattttttgtcccgaaacatttatgtctttgtaaacagaaacaatgtattctgtcacacaactagctatgtctccctgagacaacaatcttgatggtttacagcaggcttctcacttccagttaccaacacatttaaattatttttatgtctatttcaaacattcctccaaaagagaaaaaataatttaaaaaatattaatatccttgtacttacctgtcacaaatacttctgtgtccagaaaggcaaagccaaatgccaagagtttaagccacaaatacatggtcatatctggaagtcagccgtgtccctaagaaacagcatgcgtccttctgaaaagcaaaataattgttatctctgtagaagtttttctctgtaaaaacgaatcaaaaatgtaaaagtaaataaataaatgcatactctccactgttgtcttatcagacgaggaacaatttcctcctctgttaccctaagaacaaaccacttgctagctgcatgaactgctaggtgatgatgtcagattcggttttactaacttctccaaaaatactgtaagggtcctctttgcaggaagtcaaaaaagttgttctaagtcagtagaatggcattgcacttccttaattcaagtaattacaccaagttagaaagccttttaaaagattttcccatcaaggaagatgtttttaaaccatccaaataatgctcctttacagtatccattaccattttttttaaattaaatccccacaaaataatcaataattttcttacttaagagatgacaaacagattcagcataagtataacaaaatgggtgttggcaagatgacttagtagaaagtatcaatatttgacttactgagacggccaaatgaatgaaaaaactactaatctggttatttttggcaacccagtatcatttaccattagggcattcaaaactcagcaatatgacagttttagcagtaaaacccatttcttatgcaaaagcactttcagacagcttaacagttttgccccaaatctttcacagatatccttgtgaagctaggagtggaatcagaatgtcatttctactatagttacagcaaaccctgcttccaaaaactaatgtttctgtgacttaagatgttcttggcgctactgatgagggaaaggacagtgaaaaccaagagatacctttaacaaaagttaacttgtttcctttttctcagcaatactttttcaacttttttaacaaataagacaatgaattgtattaacacaatgctcttcaccattctgatgttcttagttaagtccatctattaggaaaatgcttactggcaaaaagtataaattcaacaatacaattagatgaattggttttattaatacaatatctatatgcctttaaaaataaaagtacacacatgtgcaactcatttatttgaacaatagataatgcttgggggacttttagacagacagagcccttgtggtaattctgcaaaccctagtttggaagcattattgtagggttcttatatttaagtaaataaatcttttgatacttacaaacttttttgttttactcttacattggctgctaggaactacagagccaaatttctatcacactttgtgcaaatggaaataaccccacagcttaaactctaggtaataaccttttaataagattgtagttaagaatattattttactatgattattattatatttaacttatggagcacttactatgtgcaggaactatgctttgcactttacatatattgtataatttgtacgatacccttgagctagataatgttattattccccattttatctgtgatgttcagagaggttagttgagttgcctaagatcttgcagctaggatgtagacaagctatatttagaacccaagtctccaagtttaattttgctttccttactcaccttactattgccctttatttttctcatcccttttaccaatctttttgtactatgtaagtttataatactcgaaaagatagacctttgaatcagtgaaaatgaaattattctctttttgcaaatgtatttttaaataagataactgtgcaagtaagcactaattttcatgtgggtaggcctaataaaacatcagtgtcagaactcatggatttgaatactcagctcctcagcctatgtcttaaaatacatttgcaacagaaaactctttggggatttgctttaaatatctttaagcaaatacttgtgttctgtgagcttgctgttatggcagaatatttggcaaaattagaggccaggagaaaagtgtatatgatcttttaaaaggaagaaaagtatataaaatatactctataacaatgtgagtttagcagccttaaacggacattttaaaagggatttgtggctttaaaaaaatagtaagaagttaggagattcaattccatttcagacaggtgagaagacagattctacccaaggaatccaagatagattagcaacaaatgagttgcattatatgtgttaatccaacacatatataatgttttaacatattcattgtgttaaaattgagtttagtgtctataggaa

SEQ ID NO: 1769 - DNA, 4001 bp, Homo sapiens
gagggggtgagctgagtgtggaaatgaaggcaagagggtacgagaaagtgtggcctgtgcctggggctgagaatgtagggggttgtacttggggagttacacctgctccttcttgaagccctaggctcattcatataatcagtaaaaaaacagggattttcatgctccctgaagcaagagttaataaggagctaagcacagaaatttccttagatagcctgtcagaactctcttctggatccctcagatccccgaagcctcccaaaggattccccaccagatcttcccttctcagcagattcctccccatgagcacccgcctggaaccaccaccccacatccttttctacgcctctcaccccagtgcacttccctgcttctcaggccagatccgacaccagatcgctctggatccctgcccctgttccttcaaaagtggagccttcctcaacctaatccagcctcccggccctgccctgtggcccctcagggagatccagacaacccccaggctggggcagcctccctctcccatttcacagctcaggcaggtagcgctccccacccccaacctgctccaactcaggggccgtgcactggggggcaggggggcttgaaatggggagaaagtctagcccctccccctccggggtggaagaaccagaggggcagcattccagggaaatgggggggcgcctagcacagagagtgcagagacaccaagagatgggtgagagacaagaggcagagacttaaggagggagacagagacccagggagaggaaatagagagacccaagcggagagaacagactcagggacagggaacaagacgacccagggagacagaatcgagagacctggggagaaagaacagagtgacctggggaaaaagaatggagacagctggagagaccctgggattgcaggggcgtgagattgggaggcactgacacggggaggcagagacgccgaggaaaacagaaagcagccgagacagagacgccggcacggcgatggggagccgggacgggacgggacgggacgcggggcggccactgagtgaactttcggagagggtccgagtggccacgtcctcacgggacaggtcgctccagggcctccagggcgttgcacccggttgggggcgggtacagcccgttcggcccctccccatcccgtgctcgcgaacgaagggggtgggggggcttcaaactcgcgcccggcgcagcccgggaccgcacgtgcgccggggccgcgagcgagacccgggcgcgccggctgcggatcccccgccggctgggagggggcgcctgtgcggcgggggcgggggcgcggcctggacccgcccggagcccggggctggggggtctgagggccgcccccggagcgcgtccgcgctagaaggggggacgaggcgggaccgatgagggggagcaagaacgcaaacgggaaactttgcgctgggtggggggggcgggctgcggctaaggtgcggtggagagggagggaggcggcgaggggcggcggggagcgagccagccagcagcgctgggggcgcgtctgccgcggggtgagcggggaggagccgccaggctggggcgtggagggggggcttcgccgaggctgcgggcgcggcaggtgggggcgcggcccggcctcagcggcgccctcgtcccccccgggaccgcccccagctccgccgggtggactagcggggagggcaaggagagcggggaagggacgggagcggagggggctggtggggggccggggggtcactcaccgcctatccaggggccgtcggtccgcatgtccccccgcaagccgctagggccgctgctcccactcctctgccgccgccgcctccacctggtcccgctcccgccaccgccacccgagctggagccggagccggagccggagccggagcccgagcccgagccggagccgaagctggagccgccgcctctgccgccgccaccgctcccgccgctcccgcgccagctccagccgcgcgctcccctcgcgctcgcgcccgcgcccctgcccctgccgtgcgcgcccccggcggcgcccctcccctcgtgcactctcgctcgtagagccgcggagccgctgaggcccagacaggccacaacccaacgccaagtcgaaaccgaccggaacctcaatattgaacccgaaccccaataatgaacatagacagaccaaactctgatactacatccagatccttctagtggctcccagccctagcatgaacctaataccactctaggaccccatttcctccccatacagatctgaacctgatactgagcccacaccttgccctaaacccaatattgagtccaaagcccttaatctgcccccaaattagcacaagtagtaattttgttgtgaacctctatactgatcccaaataccaattctgactctaaatctctttattacttctacttgccctaaccttgatagtgacgctagcaccaacgctggaccttaaatggaaccctgtactaatgctcagcccccagtccctaaatgaaccctaaagtccaaaagctaccttgctatggaccccagttatctctcttctgaaccccaagccttacataaaactccagtactgctctcccattcccagatcaacaccaatgcactctgaattcgattctcaattccagagttgggattgggtcaccataaaaggacccccaaacacagatactgacctgaaaccccacccaaacttgagaccatttaggaccctaaaccaacccagctttaataataatcttggaacccaagataagactggctttgcagaaactccacacaaagccccttcatcctcatgttcaccctccacttctctgacctagtgtcaaccccaagcagagactgactaataccccaatattataccaattccagctgtgaaccttacattggcctcggaattaaagacatgataatgccctctaaatgtaatttaaatgtcagtactgagtttctgacttctcataccaaactcaaataatgaccctagaaatttctgggtgaaaccaataacctacctgaagatttattccaagacctactgatcagagggatttgatgagcttcaatccaagcgcccctgcctccagaccccgcccccacgcaatccgtgttaaaaccacttaagagtcagccaaagccacaccagctctttcctatctaccccacccctcctccccccgccgcttgctaggcttcaccatgaaggatgggggacctacccccactgccctgggtcaggtaactgagcagaaaaagagatgaggtttctcctctgtggggtttcttctgtggggtctttctgataaccctgtaagtttggagtcaggtgagaaataaaatttggagatcgttgaggtgcctggattcagggatcacgtggtaatgtgcagggcatggttgctgtggtgttcagggatctgggctgaggaatcaggttctggtaaccacctgattcactgcctgtttttgtcctgaacttgaattcacaaacagtgcgtgtgcgccccctggcgtatgaggaggggatgggactggctccagtgattctggacaatttggtttggatgacaaacggatcaaaaatgaatatttccagtgagtggtttttcaccattggtaattttggtgcaccacgggggaggtattgcaaattttatgcatctttaagcatttttgcctttttttccagaactttgaggatttagagattccctctcggcccccaaattttaaaagtatacttttcagccaattattcctgcccattgctgagttattaaaacagttcttttccttggcttcattggcccaccctctcctcactggctactgtctctgattcctttaccacctcgtcttctgctcttccgggactctgtcctaggcctcctcttttctcctgctctgccccttttctctggatcatcttgacc

SEQ ID NO: 1770 - DNA, 4001 bp, Homo sapiens
gccgcgaacgcgatgccggggaggtcagttgtctgcggctggcgaccgtgaggaagcggctccgctccagcacgtgtctcggctcggatcccgccccgggcgtctcccggctacccggagcccgcggagcagccccgccggtggcgagggcgggggaggtcacccggagcagggccccgaaactccgcgggaaggggccgcggtctaggatcccaggcctcagggtgggatgtggaacacgcgcacgcacacacatccgacacaccgtccacactccgacgagcacacggacacacaaacacaggctccgtatacatacattcagctgcgcgcacacacacacgcgcacgcacaccaaagacaccagactccgaaacacacccggagaacgcgaccacacagcagacaagcgcggagccacacgctcacactcacgctcacactcaagcacacacctggcggtcccggccggccgggaggccgcacaaagttgcaggctccaccaagggagtgtcccgggaggcccgggcgtcccccgcgcgtcctgcgcgccaagggagggggcgccgtcccccggcggcgagccaggccctgcccgcgcccggacgtcgcagcccagcccggggacagcccccgcccggccgcccggggcgcagccgcggcccggccaccgcaggagcgcccgccggtccggccctcccctgcccgcccgccggcccctcgctggggcccgctggcccgggcgccccgcagccccggcgccgcctcggatcagccgcccgccagcgccgcgcggaacttgcgaaacaacaaacagtccgacatgcccgaggcggcggccgcggggcccggtcctcccctgagcctcgggccctgcccgacccgggcagcccagggggcgccgccgcgacaacttgttccggcccagcgcgccacacacgcgcacacgcacacgcgcgcacacacgtcctgccaccgccccctcgggcggccccgggaccagggcacactcgcagccgcggcccaggcgcgctccacactcgcaacattcctggacgcgcagccagcacacacggacacattcgcacacactcacatccgttccagactcgctcccacacacgcattcccggcacacttggcattcactcggacccacgcggcccccggcagcacacaccacataccctagacactccccacacgtacacagcgcacggacacacacgttccggacccgttcccacgccttcacacatgtacacggatctcaaaagcacacacgccacacacgcgttcccggatccacactcaggcgggatccagagagcacccttggccacaggcataacacaaacacacaacccactcgcagacacaaaacaaacagcactcccggccaggcatacaaaatgcaaacaaatgcaacacattagcagatacaactcccgcaacacaaccaaactcagatgcacacacaacccacttggccacacaaacactacacactggcagacccacaagacactcagcgcacacccaatgcctcgatgcacacaacattcacccccaacatactcgccgacacacatcaccttttcttgcgcacagaactcacggacacacaacattcgcagtcacgcaacaccccgggcacacaatcgcccatcctacgctcagacacacacagggagcacgctcgtaacgcccggtcactcaacactcacactttcttccgagctacgccacgggccccgaggctcggcggggcaggctcggtccggccgccgcgcgcttacctgccggagtctcggtctccggcgcgcagagctggaaggtgagtgccagcacgagcgcctgggcacgggccatggttggagcgtcgccgcccgtcccggggcccggcgcgggggacgccgcccccggagcccgagcccagcccgaggcgagccggagcccgagccggagcggagcggcgcggcgcggagcgggactggcgccgagtccagagcgcgagccggagcaagcggggcgctgacgtcaggcccggccgcgggttcggcggtctcgcggcgctccctgctggccacggcgggtgctgcagcgggtccggccgcccgctagccctggcgcgcccctcccccgctcccgcatcctccccgccatgaggccccgcggctgggtctggacgcccacggacgtctccacggaccgggcaccaacactgccaggcgagcacgctcatggcccacgcctagctcccgtacagcgctctcagggacggtgacccagggacacccggcctctgtcccatccgatgcctgaatcccttgtaccttggcgccttcaaatgcgtgttctacatacctccaggaacagggcgctcatcacctggccaagagcggttgttggggctttggaaacgccggcttttagaaagtttttcatttcatgacgtgcaagtctacctccctcactagccctcactggtcctactctaccttctggctacacaggttaaatgtatttgggcctctacccagaacgagccctcgcactatgatctgcaaactcgttgctcattactatgtaagaccaggtaccttctatgtgtttaacccacatggactcatttaatcatcatatattaggtatgcaataattatactgcataaatactgttatgcaacagtatttgacagcaccgagatttgaatcaaagttgtttggtttgaattgaataggggctgagaccttcctcccatctggacacctattcattcaacaaatatttattggggtctattcatttattcaacaattactataggccagggtagagatataaaacagacaaaaattccctactctcatggaccttacattccagtgggaagacaagaacagtaaacaaccaaaaaaacaaaaacaaaaaagcaaaccctctggtgtacgtcctttatcactgtctcatacaccaggaaatttgggggtggtggggggacagggaagggaaggggaattgttgcaatttcaaatagagtgcgggctatatgatgagttcattatctgtctccacctctagaaatgagctcccttgggaaaagactcatcttgtatttccgtgcccagtatatggcatgtttttattattttattttattttattttatttcaagatggagtttcactcttgttgcccaggctggagtgcaatggcgcagtcttggctcattgcaacctctgcctcccaggctccaacaattctcctggctcagcctcccaagtaactgggattacaggtgcccaccaccacgcccggctaattttcgtatttttagtagagacagggtttcaccatgttggccaggctggtctggaactcctgacctcaggtgatccacctgcctcagtctcccaatgtgcagggattacaggcgtgagccaccgcgcccggcctctggcacgtaattgatgctcaataaatactgactggatggaatgaatgaaagggaaatggtcctagccttcatgaatcttacattctattaggagagcccaacagcaaacatgtacataaatatatcattaccatctaagatatgcaagctaaaggaaacgagggagtataatgataaagaacatagggaaggggcatctcctttagataagtggtccaagagggctttgctatagaagtgacatggtgacatttgaactgagacctgaagtatgagaaggagccaacctcatgcaaatcagtggagaggaacattgcagtcagaggggacagcctgtgcaaaggcaggagctggtgggtacaagcagctgcaaggaagccgggcagctggcatggagtgagtcaggggcagaagggagccaggtgcagctagacaagtcagcagggtctgtaggtcaggcaagaaactatgagcaaggaaggggcttgaggttcaaccctaagagtaattaatgggaggccactgaagtggagtaattaa

SEQ ID NO: 1771 - DNA, 4001 bp, Homo sapiens
gggggaaagaaaagactcctataaaaatgttcaaacgaaacaattggcttttgtaaagctatctgtatgccctaagacttcctgctttacctaaagaggcaaggcagtttctcaaaccagagaaaacctggcagaacagtttcaaagtgagcaaatacctaagcaattaacatgttatcttgggtagttttgtggtattttggcaaatacggcacaaaaattaaaaactcagtatcctaaatatcagaaaagctcactaatacgtgtagcatttaaaatgtgatttttttacaaatgacaccttataagtactttaagcaactagaagtgctcagtccagctactctttcacagctttcaaatgtttacaaagttttttaaaatatcactaattgagttgaattcaaaggaacacggtttactttatttccatggctcaccttttactaaaatgcttagtggtttaaaaggtgtttatttttaccacacttaacaaacattctgtggtcataaatttatcttaaaacagttcattttaaacctaaactaaacaaattccaacttcaaaaagctgtggccttgaacaaaatgaattcaattgtcgctaaagcaaaacactaactcaaagttcagaatccggagagcgtttcccaagagcccagataaagaatcaacagccccccagtgttttataaagttaaaattagcaaagggtcaaaatgtttattttgcttacgaaaactgcatcggaagccacatttcttggggttgggcctgtcttagtaagtttttaggtgctttcaagaaacaaaatgctaagcctattgtttcagaagttaactgactttaaaacagaacccaggaaaagcttcataaaatcttattcttaattaatcccagtaataacaggaattgagcaaaatggtatcgagggctgagaacagtgttttcttaattgaacaataaaaggtaacaatctaagttacgggagaataaagccttctctggtaatgctgtgtgtgggtttctggctttgttttttcagcgggggggggggggggggctataggagggaaaagttacaggagtgtattcctcacttgacgtgggaatggtactgacaagtaaaacaaatgatctatgtttaccaagcatgtttgtgaggactaaaactagtattgtgtatctagattttcctactagcaaggggtgaacccctctttgagtgaagagagacaccaacaccgggaggctcaaaaaggaagaacccaccaaaaacacaagctcacacggaaacaaaaggccacagcaacccaggagcctaaaaagcattctgaaacttcctgatcgccacttctccacatttaaggctcgcaaagttcccccacggtgaatctcgcctgtggacaagggccacggctgcttctaaagcgatttattgttcctcctcctccggcgctgccacggaagctcaagaagtcgaagaaatcggggtggcacagaattacacttcatggccacacagaagactcggggcttcgcaaacccatcaaaaaaagcaacccgaatggcaacatcaatcttcggtggttcccaacagggccaggcaaaaatgtagaggcacgtctacgccctgggctcgggcctaaacccccagcattttcctagcttcgaccccgctccccaccccctccctcctttgataacaataggggccttgctgctgactccaaaacatgtacgaggaacagcgagtgagaagcctcagccagggccccggcggcttttccaaagcccttctcacccccacaaccactctcaaacaccaatatgaagggacaatctgctcgttaggggtccggagcagcgtttggggccggtggggtgcggatactcacgggcggagcggtaggatgaagatggatttcagccccccgatcttctctctctggcgctctcgctcccccttacctttcactccgacaacatggcggcccactggggactgggttggcgcggtgcatcctgggataggctccggccccggccccggcggtggcagcggcatgtgcggagaaggctggcggctctggaacaggttgcctggttgccatgccaacccagggcctgtgtgaactcgggaaactcgcaggcaacacaaacgctgcgcgcgagtgcccgcccgctaggcgagcgcgcgccgccagggccgaaggcggggtcccgccggcccgcacctgggagaacacggcctggagctgggcacgcggggttgcgccggtgacgctccaccgagtctcggacgcgctcctcgcgcccgccgcgccctcggaagcttgcccccgagcaccacagctagcagggttcgcggacggccacccgcactgccctggccccagaggtgcagggttcaaaccccttctctgcagctttctagctctgcggccttatttaaatcgacctgcctccatttccacatttgtacaatgaagaagaaaataacccccacttaacagaatggcctggaggattaagtggaataatgtatgttaagtgcttttagtcttactgtctcaaactaaactcaaaatagattgaaggccgggcgcggtggctcacgcctgtaatccctggactttgggaggctgaggcgggcggatcatgaggtcaggagatcgagaccatcctggctaacatggtgaaaccctgtctctactaaaaatacaaaaaaattagccgggcgtggtggcgggcacctgtagtcccagctactcgggaggctgaggcaggagaatggcctgaacctgggaggcggagcttgcagtgagcagagatcgcgccactgcacttgagcctgggcgacacggagaggctccgtctcaaaaaaaaaaaaaaaatagattgaaaacagacaaatcgcaatactgtaaaagaccagaagaagatatggggagaagctctataattggaggagggaaaatgtttatactcatgaatcaaagtcaaaagatcataaaagaaaatattgaaagaaatataaacatctgtacgagaagagatgccatcaacaaagtagaacaaatggataaaaaatatttgcagtacacggccaggcgcgatggctcatgcctgtaatcccagcactttgggaggccgaggcgggtggatcatgaggtcaagagatcaagaccatcctggccaacatggtgaaaccccgtctctactaaaaatacaaaaaaattagccgggagtggtggcgggcgcctgtggtcccagctactggggaggctgaggcaggagaatcacttgaacccaggaggcagaggttgcagtgagccaatattgtgccactgcactccagcctgatgacagagcaagactccgtctcaagaaaaaaaatatatatatatacacatatatgtatatatacatatatacatatatatacacatatatacatatatacacatatatacatatatacatatatacacatatatacatatataaacatatatatacgtatatatacatatatatatatttgcaatacacatgataaggaaatggttgatcatcatgataaatgcaaaatttctcccatcagggtcctggtggggtggctcacacctgtaatcccagcactttgggaggcagaggtggtagaattggttgaggccagcagtttgagaccaggctgggcaacatagtgaggcctcgtctctacaaaaagttaaaaattatctgggcatggtggcacacatctgtagtcctagctacttgggagctaaagcaggagaattcccttgagcccaggaattgagctgcaatgagctatgattgggccactacattccagcctaggagacagaaagaggccctgtatcaaataaataaataaataaaatctgtaatcaatttctaaaaatccgaaatgggctgggcgcagcggctcatgcctgcaatctgaacactttgggaggccgaggcaggcagatcac

SEQ ID NO: 1772 - DNA, 4001 bp, Homo sapiens
taggtgtctgtggggcagtgtttgccatcctcagcctactatgtggccttggacgggagagtgacagggtgggcctaaagacgagcctggttcccactagcttggccaccaggggccctggctgatctcctgcccccagtgaggcccattggaggggcttaaaaccagagaaacaatgcttgggcaaggaggcagcaggaccctggaggctgggcaggtagcctggccatcccagaggggcttgccctgggccctcacctagggtcctggtgcagggtctgggaacgtggctggtgcgggtgccagagacccccagtcctgtacctgctgctctgccacagaagtctggggctggcagaagttcttccccccttcagggctcaccccaataggggaggttctggtcagaagctgccacctggtgggtggccctcgggacagtgctgggggcagcagaaaccaccccaccagaaccactggcaccagtgagacctttccagtagctgccaacattcttccatcaggcatggcaggggtttttcagagacaagcagccttccctgttctccgctccccagcctggggggagggcacagctggaggctggggggcgtccgggcgaatcccctccagctgtccaggtcctgaggactcccggctgcctgcctcccgcctcaccttgccttaaaactgggggaggtgctggagctaaaatcagcacgtgacttgagggcagggccacagcccaggggcccttcctcacctgctctcctcgggggtgaccaaggggctggcttggcctggggaaacggagacccggcgcagcgttcgcacggggctcggcaccgggctgccagcggactggaaggcgctgaagtcgtgtgtgccgaggaggtgctgggcggcttcctgcatggcgaccatatccaggcagcttcagggaccagggtgaccgtcaggagggtggggccggcctgcccgccccctccccgctgtcagggccacactcactctgccgggagagtccagcataggttgcgttcaaacaccggcagctcatcacgccggtgacagccagtggccaggcggtacaggtaggtccgggacgtggctgcgtgacgagcgtggaagtcgctgggcactcggaaggcccgcaggaccctatggcggcaggtaaagctcaccggaggaacgaccccgcccgcccgcggtgtcacattggctctccttccccctcgagctccgaccagacaaggaagtctgtccagatctccagcctccgcccgcgacagatggagtcgggaaggcacagccccagggctgcttaggtcgcgggctcacctgatggccgggtgccgcaggtgtgtgttgagggcctcggccaggacctcgggcgggaagggcggccggcctgagcggcgctggacgtccaggtgcgccgcgttgctcagggcgtggaccccggcgtccgtgcggctggagatggtgaacctgaccggctccacggaattcagccgctcggcggcctcctgcaggaccgagccgcggggcgggcgggtgagcgaggccggaccccggggacgcgcgggcgggagcctcccccttacccctcaccgggcgtcccgtgaccggctgagcgcacctccaggtagttctggaccccgacggcgcgctgagtgcccctgacggccgcgaccccgctgcgggcagaagcgggcggaggttaccgggggcgccctgccctggggtctccgccgccgtctgaggccagggccgcttccttccccgaacgtttggaacccgcgtccagagacatccgcctgcccgcccgcgccctccttcccgcctccgcccgggcccacgtggcgcccgccgctgcgcctgggaaacctacttaaagtcggtgcccacgtactggaagtacacaagatagcgcgcgcgcacggagcctgaggccggcgccgaactcatggcggagcccagccggtggcgtcagaggcggcctccagcgcaggaatcctgcgcgcgcgcggacgcggcctggtcacgccccccccccctcccccccggccccggccgctcttgcgcctgcgcggtggcaccgcgccacggcggccagagtcggggagcggaggcggggccgggcttagggagcggctgcaaagtgccggcccgccgccgagcgcaggcgctctacctctatcgcggcgccccgggaggcgcgcaccaaccacgcggtcaccccgcgctctcgcgggcgtgcattcgttcactcgctcattcattcgccgccgcccacactccccgagcgcgcccgttcgccgcgttgcggccaagtcctcccagacgtggtttttgcaaacgccctgagttgcgcaacggccgggatggttggagcgggcgggcccgcgccctccccgcgccctccccgcgccccacatttccaccgactgtccccggagacggccgtggcaggccccgcctcacttccggaccggggtggtccctggacgctgcgagaggcgtttggcgacgctccccggcggtgacagcgggcggcgcgcgcgggcggcggaccttggcgacgctccccggcagtgacagcgggcggtgcgcgcgggcggctgactttggcgacgctccccggcggtgacaggcggggcggggcgcggcgcggcggcctcattccggggcgggcgggcgccgaggcggcgcgggcgggacgagcggtccgggccggcgcggctgccgctcggcgccgcggtcctcgtgccagtgagcgccgcggccgccgcagccatgaccgtggagttcgaggagtgcgtcaaggactccccgcgcttcaggtgcgccgcccggggccgccggggtgggcgcaggccgggggcgtcgctgtcgcctttgtgcccggcggcggggtggggaggtcagcgccgggccgggccgcggccgccggggaggggctggaggaccggcctcggacaaagcggcggccccgccccgccatgccccgggggttggaacaaaagacgctcctgccctgtgcggccgccccgggtggagggcgtgcgcgtgggcagccgtgggcacctcgggaccgtccgcccccgctctgtgtctgcacctccactgggctgagcccctcccgggccctgcagtccagctctggccagggtcgtctgggtccgtgggggcgtcggcccctggtctctgacttgatcctgtgtccagagcagcgcgtggggaacaggcagctggagccgcgtttaaggcctggggtagggtgcttggaaacgtgaagtggtttgaatgacccaggggcttggaggggtggcggccgagaagagcggcggggaaggtcaggtagggggtaggggttgtgtgcacaccgagtctgcatgttttccatcattcgtggcgtgcaggcgtgtacacctgcgtgaactacatgttcacagacgtgtgcacaagtgtgcatcggctttgcttggtggacatttggcaaacgacaatggaggcaaagaaacctctctgcatccccaagtgcgcacctgcgtgaggccccctcctctgcacgagctcgtgcggggtgcgctcttgtgaactttgcccctctgcgtgcctccctccggacaccaggccttgcacaggacgtgtggatgagctgtgccacggggctgtgcttgcttctgcatgtagcctgccgatgagtgcacgcaagcgtgtgcacacaccacctgtctgtgtgggttcacgtactgtgttagccatgtcagcaatagacacatcaccttgtacacgcgtgttccatcactaggtacacatgttgatgcgtgtctgtgcagtgtctccttgaacacacatgtatgtgtggtaccagtgtgtgcaggcatgtttgtgcatgaacatgtttgcacatgtgtgcttgattgtgtatgtgtgggtgtgcacgcgcgcgctgggtctcttgggatctgctggcaagtcagcatgtgtgtgga

SEQ ID NO: 1773 - DNA, 4001 bp, Homo sapiens
aacactgagcagaggtaatcagggattccagccatagtgaccgggcctgggggctgggagggaacatgaaagggaagggctacactggctcttctgggggtactgctggaagctgggggtgggagagagagattggctcctcagttcagagtcataggaaagagatgtttgtgtgtgtgcgtgtgtgtctactcctaacgttgagtaatcttgcagatctcacttgcctatctctctcagttttttcatctgtaaaatgagagagttggagtggtgatctctttgatctcttccaagtcctgagatggcatgactccactctttaagtgtgggtagatcccacaggaaagtgactgctggttccccaactccagcaactaggctccacctttttggcctaaacaagtgagaaggattatctggaagatgggaattaaaacacaggtggtaggggactgtgaggggatggcaggggtaggagctcagtatcctacgactggaggctgggcccatgacctataataaaatcagagttggagcagcccatacctccaccaatccacacatctaggccttatttccctcctcaaagctttggctggagatggaggtaggggaatcactgccagatcttgctgggcaacagaggctcccttgctactgctcctgggcctgagaatcaaactgtcctgtccagatcaggccctatcttttgaaggagaaatatttctgttactcattaccctaggaacaccctatggaatcccactgaggtctcactgtgcacacacacgcacacacactctcctctactctgaagattatacattcctataattcatatttgctctatatgcattagacagacaggaggtgagaagtaatacaaggcatctagttaagaaaatgggggaacaggagatgaacaaatggggaccacaccctatctagaaggttcccttccttagacccccatccatctaaacccccttattaccaccctggcacctaatattgtgcccagggaaaggaaggggtcagagtgacgggcattctcagctctcctatagtccccaacaggtgccccagtcctggtgctctagaacatcatggagagaaaagaaggaaatagaaatcccccatccactctctgggcatcaggcttcctgcaccctgatgactgcagaaaccagctgagctctgagtcagccccagttccaggcagccgttccagagcccagggggtaggccaaggcacctctaggaaaccctggggtgaacaggatcctcacaagtcccacctgcctgcccatctacactgggtcaccacgtctattccccaagacagctcaggcctaggcaaggctttggcagaggtgtcagggatcccagacatagtgacctggcctgggggctgggaggaaacaagaagggggagggctatactggcttttctgggggcactgctggaagctgggggcaggagagactggatcctcagttcagagtcaaagaaaggaggatatgtgtgtgcgtgcgtgtgtgtctatgtgtttgtgcatgtgtgtcagtgccaggttgggctcagaagcaagtgtcctgatggttcaggcaagtcctacctgtaaatgatgccagcagtagcagcagcagcagccaggcctcaggcccccacatctcggctcccagggacaggggcatggttgaaaggcagactgcccagcgtttctgaagttccaccgagatctccctgggagccggctgcagacttgaataaggaactgacccagaaggcaggaagctgcagagttcttgcctctcgcacttgggtctccactaggggacccagccccagccccggccccgttctacacacccagccgtagctacccccaagaagccgtgatcgggagctccgagctcccccagagctgcttcccacgctgtggccaacaacgacggcagaaacctgggaacctgctcagcaggtcagaacaggtgcgtctctgggggctgggcctggcacggagactcagcagccaccgcccccatggcctgggctagctaataggcgccagggagggagggaaggagggaaggacctgggtgggggcggtggggtcccatcctcagctccaggctttacctgcgagtatgtggaaggggctatgaagggagaggcaagggtggggactaagggaggcccagggcaccaggccaggccaggatgaaaggggcaaggcccttgtgggtagaaaggaacccaagcgtcccacaccccagctagccttggtacctcctgggggccttgacaagttcccggatctcctggagggtctcagctttggagccacagaatcggagaaggccagaactgaggaggaaggagtctgtcagtgctgcgctgtatacttcattcttcagaagagaaaaccaaggcccagagaaggggagggacttgccagaggacacacaacttagtctcatggtttgctcagacacctctatccctgaagtagggaagtagttcaaagacccctgagaaagaacttacgtaactcctctaactccacctccatatataagaggccaaggaagtggccaaggaattagccgtaggggttcctggtttccctatcagggccctctctcagcttcaacaccttgttacctggccaggagtcccaaaagcgcagcagcacaacttgaatggagagaggttcctctctaccctctccatggccattttacccagtttactccaaggtcattggacaagaccacatgtctggactttgcaaggagaatcttaatttcaagtactctagccctgtattcctataagtacatccttgtcagaccatgtgtttccattctgaatgcataaaaagtgaccgccaaattacacaaaaccttcctggcctccctgggatagccagaggaagagggcatattctgagcccactgaaaatttagtgaacgggagggacaacatcacttgcagtctagggctaatacaaaaaccaggtaaatacagagatagacgtgggagaagaaaaaaatataggttaaagttttgccataggacccttccatctggagaaggcagaaaggaggaataaagaagccataaggaagagttgttctgtgtagattttctaccaccaccatccccaccaactctacctgtcaaactcttattcatctttcaaagctgacctcaaatgccacatcttcgtgaagccttctctgctcctcccaccccaaattaatctttcttctattcttcctcagcctttgctagtccttttattatagcttatgtgctcataatttgtgcacatcttatctccttaactaaattgtaagcttcaagtcaaaaaaacatcgattgaggcctgctgtgtgccaggaattcagtaaatgtattaaattgcgggacaggacaagagttgtagcctgtgaactccttgaaagttgggcttgttttataatcttgtctcagtcttccatgctaggacaggccacagcatttcatgggaactgactacattttggtgaagccatgaatttctgaataaatgagttgtccggatgaaaaggatggtgaagtcggatcagtaaagcagagatcccgactggctgtgagttactatcctgaactagggttgtgacctggactttactcctgtcactggactatgaccccaactctggctctagatgccaaatgaccacggcagtgacctcttcttcaggggctatttcctgcaggtcagaggcccttaaaggccaggccggttgccagaattccccagtttctctccacctccaaccccttctctttttcaggtccccacctgtgccaggggaacagccccacccagatgctgctttgagatcctctgtggcaggggtggagtagggccagcgggaatgggagggggagcatcctgtgttataattataattatcacaccttggatcctatcgcatgcttt

SEQ ID NO: 1774 - DNA, 4001 bp, Homo sapiens
tcaccgtctccttgttgctgcgtgtcaggttcacacccatcttctgcaagaggagactcccagctcacagtgctggagcagcctggctatgccaaggcctcccagggagcagctgaacccctgccaaaccgattctgccagatgcagcctggaattcttagctttatgccctcagggttctacccctaccccaaataatacagtttcccattgttgctactggacaagtaagcacaggcttggagcatgacaagcttctccatggtaaccaggaagtggctgcccttcttccctgccaatcttctggtatctaaggcactcctctgccaggtaagaaggccctatggtgaaagtggcagggcaaagggaaatgctaatacctggtcgttaaaagcacagctgagtcaggccctatcctaaccctggccgcttgttcgtggggaccgcacagtctccatgtggtccagggctaggctggaagccatccatccctctatgactccaaactgagaagcaggaccctccagtgctagggacatcagcccaccctaggcacagacactgcctgtcacctgcctcatcagccatcctctcccacagagcacaggttttgggtgaagacttggaatatgtttttggagaacagaacaactaactcaccagattcttcccaatatgctcattcacgactcagaataacagcaaagtggccactgttgtaaatgaggaaatagcctcaaagtggctgagtactttaaggtcatacaactcgtctattaagaaaaatggctgagcgcagtggctcacccctgtaatcccagcactttgggaggccaaggcgggcagatcacttgaggccaggagttcgagaccagcctggccaacagtattctctaccaaaaatacaaaaattagctgcgcgtggtggatgcctgtaattccagctactcgggaggctgaggtgggaggctgaggtgggaggcggaggttacagtgagctgagatcgcgccactgcactccagcttgggcgacagagtaagaccctgtctgaaaaaaaatttaaaaaatgagtatttattaggtacctactatgtgccaggtgctttcatcacataatcacctcagttaatcctctaccactccagtgtctggatctgacccccagttatgtctccctgggtgttcccaccacattgagctgcccaagagaaggtggaaagattgtcacgttcctggagtaaaggtcaccgccggccaaagaccagcacttgggcgcaggggccggccagactcacttcatctcaggtcatccttttcctgggcctccacccgcttcccactccgcccggctccacctaccctgagcgcggacaccgtgggcaggttcatttctggggagctggctattatcttgtgagccgacaggatgcctgcagaagacagagcttttcaactaggggtcgcggcccagcccgttaccacgctttccctggctctaaaacccagagccgtcctaacagtgccagtctccctctccccctcaaccctctacgaggacagaagacgcacttgctgctcaaccagagtctcatctaccccaccggacgcaaactcccctttcattcgctcatgctggtgggacggaggccccctcgggcctcgggaccgcccgcgaagccgcctcccgcctccacgcgcttgcctgcggccgtgaagccccgcgccagagcataggccagctggccggccccgatgaagcccacgctcatggtccgcggttcacgcctcctgggagccgcacgaaccccctcagcgagggaccggaagtaacgctaggggaagggcggacagcgcaggggcgaacgggcggcgtgccgaggaccggcgagctaacagcagcttctgggatggtgcaaccctattctcccccggcggatatctcccgggcggctgatggcgccttaggccacgtggccccgccccgtccgggcgaccaatcagtggccaggatctcggggcaggccaatccgcggcccgagccaggccgcgtgcccgcctcctccgctcgcgactggagggcggaactccgggctggagtcccggaagcccctgtggcagcttggcgtgagctccaggcgcccgccggcccaggacgcccggccgcccccaccccccccccccaccccaaggctgaggtcgccgtccctaagccacctcgggctcagggctgaggcctggcccaggcctggctaatattatttctggcgctggccatcagatgcccctcaaggcccacaggaattctccaggttgccgatttgcggggatgaacgaggccctcctggcgtaggttcagaccaggtggcggcgaggttcagaccaggtggcggcgaggcggcaccagggtggtcagccgcggcttattcacttgaacttgagtgtttctcgcgaatttgtccaaactagatacaagaaggacaagttcgagtctccgactcttccgcgatcccgcaccccccagccccttgctgtcacttgcctttttttttttgagacggagtttcactcttgttgcccaggatggagtgcagtggcacgatctcggctcactgcaatctccgcctcccgggttcaagcgattctcctgcctcagcctccccagtagctgggattacaggcgcccgctaccacgaccggataatttttgtatttttagtagagacggggtttcaccatgttgttcaggctggtcttcaactcctgacatcaggttatccgcccgcctcggcctcccaaagtgctgggattataagcgtgagccaccgcgcccgacctgtctcttgcttttaaaagctccaccaatgtgatgtttccttttctatcagtagtaaatataaggggccgcagggaacaaatgacagaagtagagaggaagaaggtggcgttcctagaggactcagaagagctgaggacccttagttcccatggtctctctgctagcttttctagtcctttccgtgtaatgcacacccccactcccaggcaaggggctgctttctgtgaacttccctgagcaagtccccaggccctcagtttgtgcaccctttaaagtgaggaccaaatataatatttactattaagcaaaataatgctatgttttatttatttatttatttatttatttattgagacagagtttcgctcttgttgcccaggctggagtgcaatggcacgatctcggctcactgcaacctccacctcccgggttcaagcgattctcctgcttcagcctcctgagtagctgggattacaggcatgcgccaccacgcccggctaattttttgtatttttagtagagacagggtttctccatgttggtcaggctgatcttgaactcccgacctgaggtgatctgcctgtctcagcctcccaaagtgctgggattacaggcgtgagccacagcacctggcctctgtattttttaaattcgaaaagtaatacagacatattgaagaaagtttggagataaaagtaaaaataaaatcatccacatcatacttcccaaagatagtttcttacaaacatttttggtgtatttccttacactatcatgtcctatgcatatctactttctccatcattggaaataaatgatgtacatgtagttttgaaatttctctagtagacatgagcattttccaatgtcactgaaaagttatttaagacagttttaatgactacttattatatgtatgtaccttactgatttaaccattcaaaggtcaatgttaggtttattgatttatataatagataacttactgagccaggttctgggagtatagctatgaacaaaacagacaagttcctgtcctcataaaacatcaatttattattatttcttatttttatttatttatttatttttgagacggagtctttgttacccaggctggagtgaagtggcatgatctcggctcactgcaacctccatctcccg

SEQ ID NO: 1775 - DNA, 4001 bp, Homo sapiens
ccaggtgatccaccatgggagttgggggtggtgcaaactccgtcagatgtgagtatgcagggccctagtgagaaacagttgagggaaagagggtcatggagggaaacacagagctaaaccaagagagcactaccaacacaatacacattttggaggctgatactgtgggcagctcaggtctaaaatcaatatggaccacaggccaggtgcggtggctcacgcctgtaatcccagcactttgggaggccaaggcgggcagatcacgaggtcaggagatcgagatcatcctggctaacacggtgaaaccccgtctctactaaaaatacaaaaaaattagccgggcgtggtggtgggcgcctgtagtcccagctactcgggaggctgaagcaggagaatggcgtgaacccaggaggcggagcttgcagtgagccaagaccataccactgcactccagcctgggcaacagagcaagactccgtctcaaaaaaaaaaaaaaaaaaatggaccacaggccaggcacagtgggtcacacctgtaatgctaacattttgggaagccgaggcaggaggatcccttgagcccatgagtttgagtagtaacacagcaagtctctgttactacaaaaaaaaaaaaagaaaagaaaagaaaagaaaaaagaaaaaaaaaaagacaagaaaaagagggtggagagtggaaccaacatagtgcagtaactatgttttaaaaacaggcagaactaggatggaatcccagctctgaccctgaaaaacaacctcaagactgtggagcatgtatttaacatttttaacccccagatttctcatctgtaaaatagggataatgcctatctccccaaactgttaaagcatgttagcgcaatccctggcactaaaaaaaggatcagtaagtggtaggtgttacgttatcatcaggaggaaaccaggacaggaaacatggaggagactggaaccctgcgtggtaagaactttggtcgaatcatctcttaggagaggatactttcccctaaacttgttataaggttcagcgaaagaacaagaagcaaagcaagaaagacagttttctctctcctccctgcagctgatacaagatacaaacagatactggaatggcagagtagacagtgtgccgccaaggggctgctgggaaccaaacccaccaccaaccaccattcacctgagtatttgacttccttcgcttcttttctggactcttcatttgcagacctggaagagcggcaaaaggaagacgcagacaagtttccctgaggtttccccaacctcttttctctcagccatgctctgaggaactcctttaacgtcaatacatacttgcttatttattcaacaaatgctaacaaggggtgcaatatgaaaaatagattgtgaagatgatcatactctcagctacgtcttcctttaaatgaaagatatcccatctttcgatatcctcaagctccaagtgagtactgaattccatgtggctccaaaccctagagtcctcaatgtgtgacacctgcccccaacccctggaggattacacccacccatccttttcacctgagcctcccttcaagccttcagactgtgaaacaccccccgcccaccatccctcccctctgaggttcccaagtcctgggcctcttcagcccccgcccctcgcagcgcgctcaccggccttgccctgcttcctcccggtgctgggcggcgcagggggcggtgcggggccgccacctccctccagcttgtccggtgggggcggcgccgaggcggccatggagtgggggacccgggttagcggcagcggcgggggatggaggcgcccttgggctgcaccatcgcccagaaggggtgtcaggggcagcccaggcccccgagctgcagcaaccacaaagtgcgacgacagggaagcgccgagccgccgcgcaaactgcgcgctctctccagactcgccgcccgccagcggcggcagcaaccggaaccggaactcgtcgcggccaccaccactgagcgctgcggggagggggagcaaggaccggacgagacgctacgcctgaaaacaggcggcgggcgagggacgaggcttaccacggcaccacgcgagtggaaagggtcgtctccgctagcggcggcccacaccagctcaccgaggggcggcagcgcgcggcccggctgccggaccgtaccatcccgggcggtggagccgccgcggaggggcgcgcgcgagccgaaggcgcacccgggaggcccaggtagcccgggggccggtgctggggcgccgggcaggcccggctcccgcctcgacccacccggagccagccccctctgcggacacgacatccccatggggacggtggcgcgaaacgccccactctgccgcacccaaactctgcagacccccagcttccctgggcggccgcgacctcccgcctccccgtctgccgctgagggcccgcggcgtacacaataggcttcccagaagggttaagaggcagaggtagaagaaatacggactttaatgaagagttttccctttggtataagtgagacccgtggaaacatccaaacagcaaaaggaggccaggatgaaaacggtcaactctcccttatccacaaggccaaaagagggggggccggcttgctgtggtgtggccaccccgggcctaggctgggccgggcctgtagaaggtactcaggaactgcaggttttgcgtttcccctccatgaaactgacaggcattcgggctgacttctgcctctcagtctcgcggtaagagacccaagtttttctagtcctagatggaaataaatttcatctgcctcaggtctctggtataaaaggtgcgatcccagttacctcacaggcctaggcgaggaaaatgccaagagctgtaaaagggcttggaaaagtcaaaaaggtgatgtataaatgtaataattgattatcattttgtgctcaagaataagcaatggaaaagaaaataggaaagtaagtctacagccctaaaatatatgcatataaaactttaaaagaatgcagttccaactctacagatggtatgtggggattgtctactgctttatagtctcaatgccccttttctcacctccacaaaatccacctgggagagttaactgtacaagaggcccaaattcagtcacccccaccccgccctcccagaaagggaggcagggcagaggcttcaggaggaagggctgcactttggcgtagagtacataggcatgcaacatgggagggcaggccttatgaaatgtatatacagaccccttggggtgaggggccccggccaggaggcactgagcaagggaggggtccatctcccgcctggccgggagtggggctctggggcaatctctaagggttgcatatccccagggagaggggacagctgccactcctgcctctgttatcccaacccaaaccggagagggtgctcagcaagaacacaggtcccagaagccaagaaggtgttggcatccctgtcattgaattcaggggtccaagaactgtttgcataaaatatcattagacctaagagatggtcaaaggcacaaagtttaaacatggggggggcgggtgttgagaggggtctgggataccctgaagcccagaggtgtgatttgttcccccttgcccagaagggtgactgttccactgggcctgtcaccacaggacattttccatgacaagcactcaccttcttggggaaggggcatcaggttggcacaggaaaggcccaggtgaggggccactctgtacattaatactttggtgattaatgtttggggagaggcaggattctcacccaggcttttgactcaaaccctctcactcagctggatatgaaacccagagtccatgctactcccagctctgacacaaggccaagcccacagaacactcccaaacgaggtcccgagagttagggaatagggtggaaaggattggagggcatcttctgg

SEQ ID NO: 1776 - DNA, 4001 bp, Homo sapiens
gttgtcagtaaaagatcactgaaagatgaaaaaaaatttaaattatcatgcaaggagaaactagaagaaagccagcttatctatgctagaatcatttttaaaagatcttaagacaaagagtattatcagataccacatggtaaaaggttgaattcctgggaagatacaataatttaaattatagatttatctaataataataaatgtatattatttttcattattgtatagtccttcatgataatataatgttatataatatatttatcttcatatacacacatatgtacacggtgccacaaatatatatatttatatgtgtatgtttatgtttggaaacatgtatgcatgatcacatacacacataatatacattatacaactatgcatgtgagcatatctatatattatatatatgaatttgagaggagtacaagaaaataccgtcttataataggaggttctatattatatcttccaatactaaatgaacaaggtaaaaaaacatttttacaaatttgagcaacataattgatagcaatatttatctaacatatataaatcctgaaatcaacatttaaaatctcatattctagtcaagtacactgagatattgcaccaggctatacagaaagtcttctaaaaattctgaactttgacaatataaatctatttcaaattgacttccatgcctctcccctatacattgccactagaaaaataaaacatcattaactttcaggagggcaggaagtaatcttaaaatgaataaaaaactgcctttcacatctggtatagaatgatgctaatgtaaaagttaaacatacttatgaaaatattgacacatttgaattatttgaattatttgaataattgtgtttgcaaaatggatacattttctactatgtgtttgcacttgtagaataatattatttacaaaatgttctcacatatgtttttgtgtgagaacatgttttgtaaaattgagataccgtaaaatacagctgtatgtctagatgtgttttttacttaatattatttcctgatactttgtgcacatcattatcttgtcttattttatcttctactttcattttaggttcagagggtacatgtgcaggcttgttaaatgagtaaactgtgtgtcgctgaggcttgttgtctggtgatcccatcaccaaggtagcgacatagtaccagatagatagccttccaacccacatactgctcccacctttcctctcaagcagtccccagcgtctaccgttcccatcttgtgcccatatggattcaatgtttaacttccacttataagtgagaacatgcagtatttggtattcctgtgttagttcacttagggtaatgttctctagccgtatccatgttatgcatatacagcgtggaatactatgcatccataaaaaagaatgaaatcattatcttgtcttttgcccagaccccaatggccaccaagctttctaacctcagagaatatatactcagagaatttgttttaaaatctgcaatggtcaaaatgcatattccttcattcatgccccagttgtagaataaaggatatctactatctttgaagtaagtaaagaattggaagtattaactgcagttttcacttttctgaatatagttgataccagccctactgccctcaccccactgccctgaagaaccaatatcgatttttcccttgtgattttgtggctttcaaggaagcatctagatcttttctataaaaaatacccacagtactcaccttactgggaatttcttcaacagtagtccagatcttgagatcttcagaaatgtaggaaatgaggattgttttgaatagggaaatcagtcagtaaagctctcagaaactgaaatacaggatgttataatctcctgaaatgctaagaaaatgaagtattttcaaagacaacaagggaaaatggcccttcttagagtcacttgactagtgctggcttcctcatactctgctttgccctggggagagagaagttgtgaaacaacgtgcagactcctcccacccatattttttgctttccatcctgttagagaaaatgaacagtttctttcctgtaggtatcttaatcaaagtaaaatttgtatcaaagttatatttaaaattttttttcttacaaatgttgatatctgaatggagttccaatcttagaactttcttaaccagcagacttacatgtgggacattagggacctctattccgatgaatgattgtcaaatatgagagaagcaaggtggtttcttctccctcctttcctgtgcggttgcagggggagatcttggtaggagcatctattgctaccagtactttactgcatctcctgcatgggagaatgtctgctatgaaatagcagttggtttaaatactacctgaagcattcacccagttattaatagttgacaaacctagggctttccagatcagaaagttattatgaatatataaatcctttctcaaatatatataaaggagtttaacactagctgtcctcttgactatgactaggttattttacctcaatgattacattcatgattcctcaggtttccttcattattcatggaaaaacacaagtggatagtgggctcacaacatgacagcatcgaagccttgaaaatcctggaaaatgcactgaacttctggtagaccgagagtcctgttaaaccctttgctcagcagtattttttctgttaagggcagtgggtgtccttcagagtactaaaaccccaagatgtcaaataaacgacaccaactggcagatgatgttgtgttaacccagcagcagatctgcaagcaggatgtggccatgagtggaaaatggggcccgaaatacagctgtaggggagaaaacaagttttttttaaatttccctttttaggttattagttgacactctcctgaaaacaaacgtcaaattaacaaaagaaaaacaagcagtttattaatgtgtgctctactcatcacaagggataggcctcagttcaaaagtatttctctctccaggctgtggcttagaaaccttgtttaaatagtatttcaataaagagccatacgttctatatagtgaaaagcaaaggagaaagcagttccagtcatttaaaaggtgggaaaacgtgggaaggtagtaaaatctgttcccagattcctcaggttcctggtggcgccttctccgggctgaaaagcaagtgctttctccagtaaatacggatttatgtcctgccatcaggcaaatagtgcctgaggcagcatgttcccctccattttctgtctttaacttaacagtcctaagtattttgagaagtatttttggtttccttcacaaataatacaaatgatctgaggccatctacagaacagaagaaagctgatcgccttagtacaaactagggtcatggagaggatagttgatgtctggatttggagccatatgataattttatcaaagcaaaagtaagttaagaaaaagcaaggaggatctggaaggatggccacaaaaataccttcgagtgttcatggttttcttttataggtttacgttgctgttaatgtagagacactaagttggtcttaagatagtaggtagagagggatattaggaaggtcaggttaccccaattcaaaggtcagagagtagaggaaacttggtagaaattaccatgtttcaggacatttttgtttcccctttttggtaatcatttcatgtagagtaatgcctttggttaggactccagcatacaacatacaaattactgtcaccaatgaagacaattcagaacattgctccataatccatactgtgcagataaaattgtaatagatgaagcaaagaaatgctttaaaaatgtgcatttgtgctgattctgaagcagtgggcaataatttgcaatttgtgccatcacacagaaagctcactaatagaacatacgagagctcctgataagggggtaaaagtcttgg

SEQ ID NO: 1777 - DNA, 4001 bp, Homo sapiens
cccctgagattaccttatcttaggtgttccagttccatgatccatgttcttcctccctcctcccctgaccagatgtgttgacatcactcctcccctgaccaaatgtgttgaaatggtgtgaagcactgctcagaaaggcacgttcagctaatgggaccagtgaggcatgtaggcaagtgtaaactggaggtcaaaacagcttataagtttcatttaaaaataattttccaggaccatatggctaaaagatgtacacatggttccatctcgcctcttcagaaaccaatctgcaagctgctcaggaaaagaggagggtgagtctgaaaactaacatctacaaaggcactgttctaccacaaagagttgaatttatcaagaaataccaacagtggaacaatggttccagttcccctttctctagaaaaaggcctatttccaaagatgcccacagttctcattcaatgaccatttcagggtaggaggccgtgctagcgacctagcaccagagtcaggaagtaactccattcagaggcagcaagtcaggaacaaatcactatcactataccactcctgcccgccaaatacccactacctggattaggtggatgtgtgacaccacaggaatctttaaattgtggaaaggaaactatgagacaatgtatgccgagtacttagtaaggtgcctgaaatgataggtgctccgtaaatattaattactattattaccatatttcctcgactctaagtcttaagtgtttcaaaattttagcatttctgtaatagagttcaccttcaaatctttatacatgtagtggttttttcctatccttctaccccttgggctgtcataaaatgaacagtgtgtctcacagttgatggtgtcttggaattcaggaaatatagttttggtgccccaaccagggattgggaacatggagcaagagccaaacacgcaccaaaggcctctgggtgcatgggtttaaaatataagggtctgagcgggggaagagagagaaggatgtggcccagaagctaaggagctggaggcggcaggtcaggagaggcccggaacagagataggaaaactgccaggtggacatacccacatcaaagacaaaaatgagaaaggaagtctatgtaccacctggtcaaccagtcgagggagtggagaaaggtggcagggaggcaaaatggatgtccgttcccttttctccccagcactgacccacagcagctagggaacctggcaggaagatgacatgggtccctggacgagaggaagaggactgccacaaggctggcccaggaaacggtaaggtgtcagcggaccatgcggaggaaggaacaaaggagacctctcgcagggaaggaggcagtaacctggcgggggacgaaccgggcgagcagggcaggtctgggggcccaggccgcggagagggaaagaagctcgggatgagggccaagaggaaaaggcaagggagcgggaggcaaaaatggagctgagaaacatgaaggtggtgggcgtgggatgcgcggagaggaagaggtgggcggaggtgactggaagagggacgcgctcccggagtaggaggctgcccaccgggcaggtggaggggtccgggcggcggggcacgggggagcgggccgcccccgcttctcacctttgacgtcttcggccagcgccttccacgtcggggcgaaggcgatgcagtggccgcaccaggaggcgaagaactccacggcccaggcgctgcgggagcccagcaccgcgccgcgcaccgtgtccgcctgcagcagcgtcagcgggtcggaaggcgaatagagcgccgaccgcggggccgcgttagcgccgggaaccgcgagcagccacagcagcagcagcagcagcgacggcggcggcccggagccgctgttgcacctcctcatcctcggcgctgcgctcaccaccacacgcaagcaccggatgagtcgggtcccggcgccgcggcaccgcctgcctccgcccgcaaggaggagccacgtggccccgcccctgagcccccgcccccgagcccccgcccccgaggccggcccagccaccccgccccgccggccgctcctgggcgcgggagcgggcggggctgagcttgttgcaggggctggccctggccgggtggtgagccatcctttcgcggtccgccgaggcctcggagcagcgcgacccgggttcccgcctcaggccccaggaggcgaggtgtacagtccggtaaaggaatggagcgcccgccgagcggtcgctgcgggggtagcctcgcggaggttgtttggcctctcacggcccccgtatccaacggaagaggagtccgttggaatagacgacccggatttcggctgttgtagggcagttcctgggctcccgcggagcgatgagacgttgtgaattagatgtgagaagagggacgcttggtctgcgaccaccaagaccccacaggatcgatgcacccacccctgctgatgaccatgaccatctaaaggggaacatcatttgaggggccctactcatggatcagaagcccctcttcactgtggggtgtgctgggttggcgggcagttgccgtggaatcagtttcctcaggacccatatctgaccaccctcataaggttgtcagggcgattccaacattcggggttcccagcagcccagatcccccacatccagctcttcagcctactcagagctctccacgctcactcacatgtccctctcgcaagtagcccgatcaactcacctggtgtcatgggcactaaggtgttaatggattttctctggtcacctttgcagctccactgttttgagtgagttattttaaggggagaaggtgctcctcagacggttgtcacagtgatatttttcctttgtgactgccaggttagcccctttcacctgtaagagctttgagcctagatttgttattcatttattcaagttttactgagtggtgtcatgccaggcacttgtttaggtataaggataaggcagtaaacaaaatatagactctagggacgtggaacttacattccagtgggggtaaagagatgatacataagtaaatgtagatcagatggtgaccgatgttatgaagaaatgtagactggggtaagaatagagtggcagaggaggtgctattttacacacgaagatcagggacaggtctacccttaatatttgcaagaactgagtcagtagtacaaatggaggcccacatatcatgtctacatattttaaaactacaaattaaacggtgatgtaaaattcctatccttttatcttgacatgtataccttcatcataatctggaaggccacatttaagtttaggattcttggacccttctgagatacgccctcgaatgtagtgctttggagggggaacatgtccttggccctcagccttccttcttctcttggcaccccagctctgtcccatacttcaaatggccttttgcccacacctataacaacgacatctgcacatcagagttttgtccacacctgcaaatagcctccccttgaccaccccttgctcctcaggaggatagaccttgggaaaaggctgaggcagcctgtagctggtgacctgttgctattgcggcactattttctagggtcccaggaactcacagtatgctctaaaaaggagaggggcaagagctctgagtgagtacatcccgttggcccgtgggatttcttgccctatggaaaggaacatggacggaagagaatcaggtgctcagagccctagactggggctcctcttgccccagtcttgaggcagttctaaagaggtaacatttgagccaaagacctaaatgaagtatgggaggaagccctgtgggagtctgggttaggagcactccaggaagtggtccagaggttggagtttttactcccttcatgtgttcatatctgtctgcctgaagtcttaagctgcatagagaaattatgtgttagccaattggagt

SEQ ID NO: 1778 - DNA, 4001 bp, Homo sapiens
gcatccatgggtctaaacactaggccatgttgggccctctgcaacccacactgcacccctcccatttttacctgccccaacccctgaccctttgtattcataatatattctgtagcctcatccttcatcctttgttcagacccacacttcataccatggctccacggtagtaggcagtagttattgtcttgaaccgctcttggccagccgtgtccctaaagaaggagaagttttcatgggatggaatagagggaagaattctccaacggaataattcttcctctctcacaagaatttagcttttgtaacatggtggggcaacagaataaggaaacagtaaaggggaacgggattaaagacagttgagctgatttccagagatggtagtggcccaagaaacaagatgtctttgcttattcattgaatgtttgctatgtgtcaagcactgtgtatgtatcattttatctaatccttactctttccttgtaagacatgtattattgtctctattttaaaaatgaggaaacacgccaggtgccgtggcttgcgtctataatcccaacactttgggaggctgaggcgggtggatcacctgaggtcaggagttcaagaccagcctggccaacatggtgaaacctcgtctctactaaaaatacaaaaattagcccggcctagtggcgggcgcctgtaatcccagctacttgggaggctgaggtcggagaatcacttgaacccaggaggcggaggttaaagtgagcctagattgtgccattgcactccagcctgggtgacaagagcaaaactctgtctcaaaaaaaaaaaaaaaaaaaaaagaggaaacagatttggataggctgaataattaatgaaggtcaggcaggagataactaaaagaaccagatttgcgcaccagtctgctcttatatgtcatagcataatgcctccactaagcttcataccacttaaacaccttcagggtctatatttggctctctgggctcaccatattttggagaaaacactagacttagagtcaagtcttaattctgcctttgccatttaactgctcacagcctgtttccatgttatgactgaacagttgtttgttgtcaaattaagaggatgctctgcagccagaggaggcaagagttacaaaagagttggaactagttgggagagcaggaagagagatggaaggacagctgagtgcatccggagaaatgccagaagtgctccttctagcacttctagaaggagcaatggggaaaggaagagaaatgaaacaaaatagaaggaaaaacgtgtaggaggtaaatggggaagtctggcgaggcatcccagaggactgacttaccagacttgtagtttgatcttcttcccctctatatccacagtgcggatcttgaaatcaattcctaggggtggaaggtatgcactgaagttgagacatgcatgcacacatgtaaaactgtgtgatggaagggacaggaacggagcagtgctggcaccagaaattctgcaggggaggcacttggggaacaatcttgttggaaatgccaagctaggagaattttcccaaagctgtatttgtatagcaagaatactatttttacgtacattttatggattttgggagggaaaaggtgacgaaaattctgcatggaggcttaaaatccttaggctgcctcttgggtccattcagttataccagctgacaactctctgaattcagtctctgtctccccccagatattactttcacattcctcttctctgttttcttagagccctctactcttggtatcccacctaccctcctagtagagagtaaggaaaaaagtagctgaagccagtctatgtgaattaactagtgggccaaacttggcactaggaaagtctgaggctaaacaggattacttttgagacaattaggaaagaggggcatttttccttttcctttgtaaccagaattgtcgtgagactcttcctgtctatttcccaagccagaggagatgaagaaagaagagaagggaggaggggagacaatgttcttcttagtagaaacttgggcacctcccccaagcctgctgggggcccctgggaggaggatgagtcaccaggctgactcagagaccccaaaagtcccctcatttccacgttcctcaccaagctggctgcatattcatgatcacagtccttgggccaccctccagcacacccagccaccttgttccacccttcccaaacccttgttcagctgaggtgcagggagactggggcagggaacctgggaagtagatggtgaggtggggacacagtgggagagtttgaagctcagcaagacagaaagaggctagcatcggatcgggagaaaaagatgtggcggacagggatacaggaaacatggagataggatcgagagagttctaggtggtgggggtaggggaagaggggaacagagaaaaatagagaagagttcttgtggatttggggagactaaggcgatggtaccaagaaaatgaggagctggcagcagttgaagagttacctgaaggcctcagagaggtgagaggtttggttactatacagagacatgcacgggggaagggtcagagccaggggttgagggactagaatttaggagccttactctaaggggactgaaaagtggggtcactagtaatccgggagccggagaaggaggtcacaggagagtcggggtctgggacatggccagcgggctcaccgatggtggagatgtaagtgttgttgaagttgtcctctgcaaagcgaatgatcagacaagtcttgcccacccccgagtccccgatcagcagcaacttgaagaggtggtcgtaggctttggccatggcggacaccgggggagccgggggaggggtggggagcgcccggcactggtaggcgggactggacggttggcaaacagagcggcacggagcccaggccaggaagaagttttcctccctctccgcccaggctccgggaaagaggagaggcggcacccctccgggctccaccccctgcccgcccacccttttgagcaggccaaggctgccagcccggcctctgttctctcggttttcccttcctagcttaggccggcctgtctctctcgctattttccacagcctttcggtaattgtagctcccctcttaggaccttactcttccattctgaggccagagaggctggggtgaagggaagtagaggtttaaccacgacgaccagaaattttagaagagaaattttagagggattaggggaagagaaccaagagttttgggaataagggtgaaggtagggagagcactagaaattgaaaaaaaaaaatggggctgagttttggagatgctattcaacgaagctagaagatgagttatcatcggtttctggggctgagtaaaaggcagtcctagaattttactgttagttgtccaagcccttagttctatgggtcccaattcactttgaaaaaagcgggatgcgcagaagtaggttatttgttgagtcagtctgccccctggtggaacagggtgaaaacgtaaattagttatacagaatcggccccaccaccccaacacacacagcctacctagacacatcctggggcttcagttggaacgatctctcttatggggacccatgtgtgatttctctgaccaaatagcttaggaaaacagagatttgaactaaaaatgtcattctttacgtgaatcttttaatatggcccacttaaggtgcagtactcctgaaatctcactcaataggccatgaatgtgtagccttggtaaccaggaagctgaaatatgaacagcacgggtataaagaaacaagtttgccgggcgcggtggctcacgcctgtaatcccagcactttgggaggccgaggcgggcggatcacgaggtcaggagatcgagaccatcctggctaacatggtgaaaccccatctctactaaaaatacacacacacacacaaaat

SEQ ID NO: 1779 - DNA, 4001 bp, Homo sapiens
ggagaaaacactagacttagagtcaagtcttaattctgcctttgccatttaactgctcacagcctgtttccatgttatgactgaacagttgtttgttgtcaaattaagaggatgctctgcagccagaggaggcaagagttacaaaagagttggaactagttgggagagcaggaagagagatggaaggacagctgagtgcatccggagaaatgccagaagtgctccttctagcacttctagaaggagcaatggggaaaggaagagaaatgaaacaaaatagaaggaaaaacgtgtaggaggtaaatggggaagtctggcgaggcatcccagaggactgacttaccagacttgtagtttgatcttcttcccctctatatccacagtgcggatcttgaaatcaattcctaggggtggaaggtatgcactgaagttgagacatgcatgcacacatgtaaaactgtgtgatggaagggacaggaacggagcagtgctggcaccagaaattctgcaggggaggcacttggggaacaatcttgttggaaatgccaagctaggagaattttcccaaagctgtatttgtatagcaagaatactatttttacgtacattttatggattttgggagggaaaaggtgacgaaaattctgcatggaggcttaaaatccttaggctgcctcttgggtccattcagttataccagctgacaactctctgaattcagtctctgtctccccccagatattactttcacattcctcttctctgttttcttagagccctctactcttggtatcccacctaccctcctagtagagagtaaggaaaaaagtagctgaagccagtctatgtgaattaactagtgggccaaacttggcactaggaaagtctgaggctaaacaggattacttttgagacaattaggaaagaggggcatttttccttttcctttgtaaccagaattgtcgtgagactcttcctgtctatttcccaagccagaggagatgaagaaagaagagaagggaggaggggagacaatgttcttcttagtagaaacttgggcacctcccccaagcctgctgggggcccctgggaggaggatgagtcaccaggctgactcagagaccccaaaagtcccctcatttccacgttcctcaccaagctggctgcatattcatgatcacagtccttgggccaccctccagcacacccagccaccttgttccacccttcccaaacccttgttcagctgaggtgcagggagactggggcagggaacctgggaagtagatggtgaggtggggacacagtgggagagtttgaagctcagcaagacagaaagaggctagcatcggatcgggagaaaaagatgtggcggacagggatacaggaaacatggagataggatcgagagagttctaggtggtgggggtaggggaagaggggaacagagaaaaatagagaagagttcttgtggatttggggagactaaggcgatggtaccaagaaaatgaggagctggcagcagttgaagagttacctgaaggcctcagagaggtgagaggtttggttactatacagagacatgcacgggggaagggtcagagccaggggttgagggactagaatttaggagccttactctaaggggactgaaaagtggggtcactagtaatccgggagccggagaaggaggtcacaggagagtcggggtctgggacatggccagcgggctcaccgatggtggagatgtaagtgttgttgaagttgtcctctgcaaagcgaatgatcagacaagtcttgcccacccccgagtccccgatcagcagcaacttgaagaggtggtcgtaggctttggccatggcggacaccgggggagccgggggaggggtggggagcgcccggcactggtaggcgggactggacggttggcaaacagagcggcacggagcccaggccaggaagaagttttcctccctctccgcccaggctccgggaaagaggagaggcggcacccctccgggctccaccccctgcccgcccacccttttgagcaggccaaggctgccagcccggcctctgttctctcggttttcccttcctagcttaggccggcctgtctctctcgctattttccacagcctttcggtaattgtagctcccctcttaggaccttactcttccattctgaggccagagaggctggggtgaagggaagtagaggtttaaccacgacgaccagaaattttagaagagaaattttagagggattaggggaagagaaccaagagttttgggaataagggtgaaggtagggagagcactagaaattgaaaaaaaaaaatggggctgagttttggagatgctattcaacgaagctagaagatgagttatcatcggtttctggggctgagtaaaaggcagtcctagaattttactgttagttgtccaagcccttagttctatgggtcccaattcactttgaaaaaagcgggatgcgcagaagtaggttatttgttgagtcagtctgccccctggtggaacagggtgaaaacgtaaattagttatacagaatcggccccaccaccccaacacacacagcctacctagacacatcctggggcttcagttggaacgatctctcttatggggacccatgtgtgatttctctgaccaaatagcttaggaaaacagagatttgaactaaaaatgtcattctttacgtgaatcttttaatatggcccacttaaggtgcagtactcctgaaatctcactcaataggccatgaatgtgtagccttggtaaccaggaagctgaaatatgaacagcacgggtataaagaaacaagtttgccgggcgcggtggctcacgcctgtaatcccagcactttgggaggccgaggcgggcggatcacgaggtcaggagatcgagaccatcctggctaacatggtgaaaccccatctctactaaaaatacacacacacacacaaaattagccgggcgtggtggcaggcgactgtagtcctagccacttgggaggctgaggcaggagaatggcgtgaacccgggaggcagagcttgcagtgagccgagattgcgccactgcactccagcttgggcgacagagccagactccgtctcaaaaaaaaaaaaaaaagaaagaaagaaagagagtaaaagagaaacaagtttatctctgcctttagaaaaaaattattcttgctatatgtgtgctgggggtggaaaaaaatacgaaacacgaaagaaagaaaatattatctaagacctgttgcggtggctcacacttgtaatcccagcactttgggaggccaacgtgagaggatcccttaagcccaggagttcaagaccagcttgggcaacatagtgagactgcttcgacaaaaaaaaaaaaaaaaaaaaaaaaaaattagccatacatggtggtgtggcctgtagtcccagccgcagctacttgggggacagaagtgggcagaacacttgagcccaagagtccaaggctgtagtgagccacgattatgatgccactgctctccagcctcggtgatagagtaagatcctgtttcaaaaaaattttttatttattttttaattaattaattaatttttttgagacagagtcttgctctgtcgccaggctggagtgcagtggcgcaatctcggctcactgcaacctccgcctcccgaattcaagcgattcttgtgcctcagcctctggagtacctgtaatcctctgggattacaggtgcccgacaccacgcccagctaatttttgtatttttagtagagatggggtttcaccatgttggccagatggtctcgatctcttgaccttctgatccgcccgcctcggcctcccaaagtgctgggattacagtcgtgagccaccacgcctggccctattttttttttttttttgagacggagtcttgctctgtcgacctaggctggggtgcagtggcgcgatctcggttcactgcaagctc

SEQ ID NO: 1780 - DNA, 4001 bp, Homo sapiens
caacagagcgagactccgtctcaaaaaacaaacaaacattgaacaccccaacttcttctcagcgtctgcttctagggaccccaacccaaccctcaatacttttttttttttttttttttttttagacagagtcttgctctgttgcccaggctggagtgcagtggcacagtctcggcttactgcaacctctgcttcctgggttcaagtgattctcctgtctcagcctcccgagtagctgggattacaggcacgtgccaccacacccagataatttttgaatttttagtagagacagggtttccccatgttggccaggctggtctggaactccagaccttaagtgatcccgccgcctcggcctcccaaagtgctaggattacaggcgtgagccactgcacccggctgaccaacccgcaatacttgtaagtggcagggctgagatctgaacccagtctggctcctgaccacaatgttacactgcccctcaaaataaaatatgactttcggggattgttatggtattaatgaggtagtggcaggtacatagtaagtgctcaataaatggtagttcctcatattattgccccagactattgctaaccctttccttcctggaaaagatgccagtagtacaggttccccagctcaagggcgggttctggagtgagagtcccagctcaagggaggggccgggctgaggttgggagaggcattggggtagggtggctggagagtccaccctgccctaaaggaagtatgaaggtggggttggaaaacagcaaaggcaccaaacacaggggctagaaagatacatgcatgcttccagggacagcaaagttgagcccagtgcctggtatgcaggtccagtgagtcagccaagggccaggcagacgaggctacaaccctaggagtcctctggattctatcagactctgcagcaaattcatgatattttctgtcttccctatgtatttattgccccaccctataatgggatgtgtctctcctttctctcgttccctgtacacctgcccagaaaagatgactttcttcctcttgtttgctggtttccctttcttctcaagagagaagtcctggccgggtgtggtggctcatgcctgtaatcccagcactttgggaggccgaggtaggcggatcatgaggtcagttccagaccatcctggccaatatggtgaaaccccgtctctattaaaaatacaaaaataagccgggcgtggtggcaggtgcttgtagtcccagctacttgggaggccgaggcagaagaatcgcttgaacccaggaggtggaggttgcagtgagctgagattgtaccactgcactccagcctgggcgacagagcaagactccgtctcagaaaaaaaaataaaagagggaagtcctttctgaagtctgacctccatctcttgtgctgcactggctgacaccagggatttgggtttctattaggaacggggcagaggagcctaactcagcactcttaaggaggaatcaacatcattatttaccacagtagagcatactcagaagctccctgacttttgcccctgcaaccagaccctcccccactccctgcagctttctttctgaaggaatgaggagccccaggaggtcttggtaagagataaaaaaacaggagggggccctctctggctctattcaatctctttctgggtctctcaggcttcctcttgcttcagggaacccaactcacccttgaagacaaagttataatcttcctcagttccattccccatcttggctccgcatggagggtgcaggtgtcttcggggacagaggcgacaaatctgtgtgttggctcaatgccctcaaccctcagctctcaaaagatctggtcctgcccctcctctcattgggggtaaggggacttctgcagccagagggattgggggccaactcaaggttaggcagggcctagggaggatcagctctggcaggtgggggtgctgtaaggaagcagagaggacggaagctgagaacaggaagagcggggtggctggagacctggggcccaggtgggtggagagatgatgacgtcagacaggttcgacaggttgggtgtctgctctcagcctgggctcccgcaagcgggagaagcagctccagcgggggggaagcgaaaaagggacaggaccttcagagacagcccactgagggctgagtgtgcattgctgggcttctggaatctgtggtgagggccggtcccccaactaatgagcaagaaatagcccctcagaaacccacttgaggccaggcgcggtggctcacgcctgtaatcccagcactttgggaggctgaggtgggcggatcacctgaggtcgggagtttgagaccagcctgaccaacatggagaaaccccgtttctactaaaaaaatacaaaattagctgggcgtggtggcacatggctgtaaacccagctacttgggaggctgagacaggagaatcgcttgaacccaggaggcggaggttgtggtgagtcgagatcgcgcccttgcactccagcctgggtaacaagagcgaaactccgtctaaaaaaaaaaaaaaaaaaaattagctgggcatggtggtgggcgcctgcaatcccagctacttgggcggccaaggtaggagaattgcttgaagccgggaggcagaggttccagtgggctgagatcgtgccactgcactccagtctgggcaacagagactgcttctcaaaaaaaaaaaaaaaaggccgggtgcggtggctcatacctgtaattccagcactttgggaggccgaggcgggcggatcacaaggtcaggagatcgagaccatcctgaaggaatgaggagccccaggaggtcttggtaagagataaaaaaacaggagggggccctctctggctctatggtagaaacggtgaaactgtgtctctactaaaaatacaaaaaattagccaggcgtagtggcaggtgcctgtagtcccagctactcgggagactgaggcaggagaatggcgtgaacccaggaggcagagcttgcagtgagccgagatcgcgccactgcactccagcctgggcgacagagcaagactccgtctcaaaaaaaaaaagaggcctggtgcggtggctcccacctgtaatcccagcactttaggaggccgaggccagcggatcacgaggtcaggagttcaagaccagccttaccaacatggtgaaaccctgtctctactaaaaatatacaaaaattagctaggcatggtgtcacgcgcctgtaatcccagctactcaggaggctgaggcaggagaattgcttgaactcgggaggcggagattgcagtgagccaagattgtgccattgcactccagcccgggtgacagagcaagagattctatctcaaaaaaaaaaaaaaaggaagaaacccacttggcctgcttttccttcagagctggtaggggggtacactgggggaaccagagtaagggatattagaccaggggctgatagaacaccagtcaccctgctgcaatgcagagctgtgggagtatcatggccacagtaacttctgcccttccttgacagcccagggcctgggatgggcagtgtttctcatcttgggtggagctgggactcgaaacctacccacttctctgggatgggttcctttatatggcactggggaagggggctggtagctccctatacagacctgctttaaggatattgggtaggcagagacctggggcagaaacagacagctggggtgagtggtctgagtgtaggagcagggtctggagatgaaggcctttgggaggtctgggttacttctactccctgtacaggacctgaggcctcacagcaaaggcctcttgtctacaaagggcttcaagatctggggagggtctgtgtaagcacataaacacctggaagaagaagaaagggatagcttgttctaggctgttaggggcaccctcccaaccccaagaatagaaaaggcac

SEQ ID NO: 1781 - DNA, 4001 bp, Homo sapiens
aactttgaacctttaattttgccagacttaaattttttgttcctttgtttttgagacagggtctcactctgttgcccaggctacagtgcagtgagtggtgcgaacggggctcactgaagcctcgacctccccagttcaagcaatcctctcgtctcagtttcccgagtagctgggaccacggctactttcttctttaatttttgtagaggtgggggtcttgccatgtttcccatggctggtctcgaactcctgggctcaagcaatcctcccgcctcagcctcctaaagtgctgggattgcaagtatgaaccacggtactgggccctactgggggttcttaaggagaatgttttaattgcaatgtaaatgtttgttaatttctttttaaacttccatatgaacaggagcacacattttcaatttttccattggtacgagttttccccccttgaaacaagttcttttaacagagagaaataaaattttaagttactctcccccatcaccagctcttcctagctaaataccttctaattaacaataaggcatttctgcctctgaaaaaatagttgagtccaaaggccacacccgggaaagaaatgaatgaactcggtgtccccttcctccctaccttctccagtttgaggaaaaaagtggtgggaagataggtcagagaagtggtatatttcacattcttggaagaattccttggttacctttatttaagcaatcaacggacaaaaacacagctcatcagccctcatgggcatctgactgcgtagccaaggggctcgttcggggattttgtgtcttccatcccacccacagccccacaacaaagctacagtccttcagaccagttccgcttcctgcgttctcccactgaagccaggttaaacaccttgcggttcctccctcaacagaggggcaggactacagccccagccggcacctaaccaggaggccccacagaggatctcagctgcttctgctgattggagagatttgccggacagctgaaaggctggagacttaagttcacagtacgcctgcaataaacagcaattgctcatcctcatcctcccttccctatttctcatcttcacgcctttgctcttacctttctcctggcagtgggctcagtttgggaaaatctaacgggaaactcaagagaggcgtgtaaaccaaacacccggcaattacaccatctaggttcccagacagtacttcctgacccgaagaaggacccaacaaccgacagcaaatccccaccccacttgggtccccagctcgagtccgcggtcggggcctcctcctccccctccccctccccacccccgagacgtctcacctcccaccgtggacttgtagtgtttgctgaagctgtcctgggaatatcgctgcaccagcgacgtcttgcccactgcggcgtcccccaccaccagcactttgaacaggtggtcgcggctgcccatggctagcggggtgtgcgttttagggaggcgggaagtgtggtcggggatcgggggtcgctcgttttaacccctttggatccggaccctcttcaaactgaagtgaggcattcccacccaccgcctgtctgggctgctctgacgagaaagcaaaaaaggaaactttgcactcaacctatacgcgcttcctccccgggcggccgcaacctgggtggggcgcagggcgcgagctccgagcccccggctgttcgcaccttccccaccccctcctggcctgactgccgagaaactggaccaggcgccgcggaacctcacccaccgggacttcccccgagcggctccaagtcagtgactgaatcccagtcagctccttacaccactggggccagatgatggggaccctccccttgcagcacaaaccaaattgtgaggaaggagcagccggcacctcgattccctagacgccctcccgcgcgcctctctctccccttcctccgcaagcgtcacgtgcagggttgcctgtggcactacatttcccagctttcctcgcggtaaagagaaccagccgagtgcggaggctcaccgcgaagcctcctgggaaatgtagtatattcgttattttgttttaagcaaacctacaccaagtttcaaggcttcaaactccctcgacagtttggaatcttattttgaaacaattctaggtcagtaaagatcccttaaggggagatttgtgcaacgtgatctcactggcctgaatccatccccagatagttttctcctgtctttaaaggtttaactgagttaagattgaaacttatttcattagtaaaagcccaagcctcatccatcatgctccaagtgaagtccatttcctattccttcaagtagatagacaagcccaggactttgtgaaatgactcatattttctgtgtgaacttgcccaataccaggcaagttcaggaaaacttgacccaagagaccagtctttggaaaaaaacctatgccaaaaattacagcatttaatatccagcaataacaataaagatggacagaaaacaagagacagttctccattcatacttctacaatgcctattctagccatactactcatgtatcacttgagctagaagctaattgaaatacactgggactccttcttgatttgttgtggctgttgttaatagataatcataaaactagtgtttggcaaataattttaatttctcagcctgtaactttactgacctacctgtcacttgggtagaagttggcaggacatgagctcaatggcaagcaaagagagctccattttctatacttttctaggaatagaggaagagaaccagcggggccatgggaaaacagcccaggaccagacactaggaaatctaggtctcttgatagagaggctatcacttatgttttgtggcgaaagaacatcagcatggttcacaatatattttgcccagaatgttcgttacccaggtacaggaggttagttcaagctactcatctttaaggatccagttttctctgttcttattcgttttgacatagttgaccactccttgacatttgtttcccttatgccttctatgacgctgttctttctttgtcatccccgtacttctctgatgattatctttttctttcaggtttctctccatcccatttcccgctaagtatttcctaaggcctgattcttggtctctgagtcaatcattcgataaactctttagtgaattgtccttggtgtcaaagatctatcttcactttatttgttctttatctctgatcagtgatattctgtcaagaccagctctgttggggagaccctaacccagtggcgctagaggaattaaagacacacacacagaaatatagaggtgtgaagtgggaaatcaggggtctgatttcctttagagcttttagagctgagagccccgaacagagatttacccacgtatttattaacagcaaaccagtcattagcattgtttctatagatattaaattaactaaaagtatcccttatgggaaacgaagggatgggccgaattaaaggaataggttgggctagttaactgcagcaggagcatgtccttaaggcacagatcactcatgctattgtttgtggcttaagaatgcctttaagcggttttccaccctgggcgggccaggtgttccttgccctcgttcctgtaaacttacaaccttccagcgtggacgttagggccattatgaacatgttacagtgctgcagagattttgtttatggccagttttggggccagtttatggccagattttggggggcctgctctcaacatgtccctcttctctgatttgcaaattgataaatgcaaaggcagctttgtcacggtgagctacttctcgcaggagtcaggatacacatctgcagactatacaaagacaaacaacacagattaaaagcacaatcatcattgaaatcacagagcttccaagtgtttttatccattttcggctcctttaagcactccagttc

SEQ ID NO: 1782 - DNA, 4001 bp, Homo sapiens
ggaaatctatttaaatattttgtataggttactgatgcctcccttcatgtcataatctttaagaaactgaagatctatttcttggactggagatgcttttagatttttgccttttcccatacggtttcctctgataggaacacactttcctccactgctagctaaatccttcatgaccaggaaggcttccccaacccacccacctcccccaaaatgcttcttctctggctcccacagggcaccagggctttccacttctatagatagggcctttcacggcttccattgtcttcctctgtttataggcacagaacaggtggacacccacctgtgcgcgcgcacacacacacacacacacacacacacacatcctctccttttactgtctcccacccctttccatctggattccaggaagccgggggaagagggcccatcttgttttgtgtgtgtgtgtgtgtgtgtgtgtgtgtgtgtgtgtgtgtgtgtgtgttttgagggcccatctttctcccacctcctccacatctctcttagcttccaaaggctgctgccctgccctccccaaagttgcttccatgcttggactacagaacagagttggatgactttttctgtccacgattctcttattttctgtgatccccggtgcccgtgtaacaaggtccagtgcctgggtcccctccttggactcctgagtggccgagacaccgctagtgcgtggacaccactccagcccccattacctttccacccttacaccacgacccacacctggcctcctccccaggctgacccagcgccccaccaccctatctatacactccaagttctcccacgattcctccacttgcagccgccagaccctactctattccagagcctcctctccactcctgaccagaatgtaggcccctgtgtccatttccaaggccacttccctgtgtctccaccggctccctgcccccttcctctgcagcagggtagacccaacctggcctctcacccttccattctcccaagcttcccgcccccaagccccacccctcgtcttccatctacagttacccccacgccggtccccagccgggctcaacctccgaccccagctatccatacccacatcccccataaatgaccctctttcgaccagacactgccctgctgcctttctccttcccagctatccatacccacatccccacccccgaccctctcccaaccagacactccccagctgcccagcgccccttgccctcggcacctcagtcccctccagctccaaacgacccccgcccagccagtcccctcccctcagctcctcacctccatgcctccccccgcacccccgctctagctcccctcagtccgctcccttcaccgcccccttcgctgcccctcggctgcccggtaccacctttccgcacagccccactccgccctcctcgcagctcccccgccccccacgcccccgtttcccccagcgatccctcactgccctccagttgccccccatctctcctcccagccccagcgccgtctttcttgctcccctcccgcccttggagctcccccggctgcccccaacgtctgggagaccccctcggcgccccctccctaggtgagccccacctctgccgccgcggagccccctccctcgctcctcccccggcttccttccgctgccccgcgctccttctcggcgcccgctctcggtgcccagcgccccgcgccggggatcggtccctgatcctccgcgggcgggctgccggggccgcgccccttaccgcggactccgagtgcgggacgacgggttcgctcccggacggtcggcgggacggcaggacctggcgtcgggagggcgcggagggggccggggcggggcgctgcgggatggtctggtccggtcaggtcctcacagtggcgcctgagggctgaggctcccgctccagcactgctccgctccggccgcatccaggccccgcccaagggcggagtctgtgttcgccccgccccggccctcaactcctagcaggtgtaatccgaggtgactcaggacctccaggtcccccatgtctgggtgactctcgtgatttatcttaattgtcatgcctcgttccattgactgaacttactagggtaattagagagctttgatgataatgtagctgatgatgggtagcagttttgccatttccaaactgctttctggtccggtccgttctatggctccgtcttcacaaaagcccagagagggaggctgactacaagcggaaaccaagccagaaacctggacgctgtcctctaccctatctgtgtttccttcacaccccacatcccaccgccttaacatatccctgcccttcctctgtgtctccattgcccttgttctgactccagcatcatcacttcttgcttggactaatgcaacagcttcctaattcctgccttcactctccaattcaccctataaaaccaggacgtggtgtcagcatggccatttccacccttgtacaaaaattctttctcctgtggtctccagtcataccaccctccacccctcctcatcactgacacccaattgttccttatgcattaaagattgcagcccctggcccatggtcatcctaactagcccctgttctgccatactcctggtgacttcggtagctgtgagacttcctggtcccattcattctgagtcagataccaaaatcattttgacacaagcccgagcaaccctttaaaaaatgtcaccatgttaccatcaaccttgtttaagaaaactctcggccaggcacagtggctgacgcctgtaatcccagcactttggaaggccaaagtgggcagatcacttgaggtcaggagttcgagaccaacctggccaacatggtgaaaccctgtctctactaaaaatacaaaaattagccgggcatggtggtgcatgcctgtagtcccagctacttgggaggctgaggcagaattgcttgcacccaggaggcagaggttgcagtgagccgagatcactgcactccagcagtgcactccagcctgggcaacaaagccagactccatcaaaaaccaaacaaacaaacaaacaaaaacctctcaatggtttcccattaccaggaggctgtcaacaggagtagaaaaatgttcttgcctggcctggccctaggaagtcccacttccactagaggaggcagatagaggaggcaataaataccccaccctcaaatcctgatatggacttccagtcttcctgaggtcacaggagccagctgaaggcttgctctagaatcattgtctttccccacacttctcccccatctcagatcttagaggtctgagtcaaataccaaaaccattttccccccaagttccattatgaccctgtctacagtgtacatctccagcctaggaaccacccaagctgacagctcctctgcttgtctggcctctgcctcagacgcttactcttctgagcttcttgcccagccctttcactcacactgcccatcacactggcagctctttcctctgtgccttctagaatcctgttcttttgtcaacaaactctgctataccctctgcttcttcagagtactcaggtgacttctttgcctgagcctcctccaggtactgcctcctttgctgccctctgctagaaggcttctcatttttccactccccatatactataaaactaggatgtggggatggcatggccatttccacccttgtgcaaaaattctttcttctgtgctctccagccatacccccctcaacccctcctcatcactgaccccccaattgctccttatgcattacagattgcagcccctggctcatggtcatcctcactagcccctgtcctgccatcctcctggtgacttcagtagctatgagatttcctggtccctcagtccttgtcctccacatcaccttggccaccagctcccatggtcactcttgagctcttaatcacccactgctggtac

SEQ ID NO: 1783 - DNA, 4001 bp, Homo sapiens
cttattacatatagttgcccaaaccacaagccaaagacttcctaaactccccctcacttactagttacaatgcccatcaccagaccttcacaaggtcctgcagattctaactccttaacgtctttctaatctagtccttcatcttcatcctactaaggttcttaattcaagctcacataatttcttgcttggattactggaagagcttcccaatccatttcccttcttccaatctctcctccactttgctaccagagcacattacaggtcttcaacaaatgttgttgattacattaagtacaaatctgacaatgtcatttctctacttaaactttcagagaaacgccacaattttcacaaggcctctcatggtctagctccttattactactactgcctcattgccccaactcttcctctcccatcctcctctccagccattcagcttttcttagttctctaaataccatgccatttcaggcctcccttcctctgcacatgctattactgctcctttactcctctaactagtacttcaaaggtaggcttaagtatcaccacttcaagaaaatgcctcatgtatatctcagtcacactgaatggaagttaatgatttgtctgtaaaccagaagttcctacagcagggtccaccaaccttatttggtttgtagcaccaatgactggcacaaagtatgcaatcattcacagatgggttcgatttgatatcttctaaattttctaaaaaagggagaggagcttagtgggctttatatcaccattccggtatagcacaaagtgagagcgctgtactacaaagccaaatgtgcttcaggttggaaatgcaaaaataaaataaaataaaataaaataaaataaaacacaaggcacaccctttcaaaatgaaatgtacgaaattctgaaagcctatatagtatctaataaaccagccttggaactttatactacttggggaaaggcttattaaacactttgatgataaaaataggtggaaggcttcaataaagcaaattaacctttcttggctatgtcactgtaattttagttcctaatgtagattctcgttcacttcctgacaggttattttccttctttgagagagtcttacctcaagagtcactcatttgtcagccatttgttctcaaaatctgaatgggggaaatgcagatgaaagaagggagagtgtggggggatgatcaacactttcggaatgggaggtagcagaaggccacagtctccgggatggaagagagtgggagctggggcaataccagagtggagcgctgacatgtggcaaggaacggggaggatgcgatcacggagcaggcaacatgaaacagggaacgaccccaggctgaagatgggagacggagaagatactcagagagaaagctaggaatgtgtgggggtggggggagggagggagaaagcggtgataggcagaggcgagaggaaacaagacgcagtttttagccaggggtcagagggcctaaggagaaaagctgggtcgagaggaagacaacacaaatggggcttcaggacgaggtgggcagggtgtcatcccggagcggaggggaggcacggggagaactgggggtccagagggcagaggcaggaggcgcagagcgagtaggagactcgaacccgtgagcagaggccgcgggtgacgagggaaggaagggcgaggccagagaggcacttactggggtccctccgcaaggcgccgctgaggatctcctcccgcaggtgaggaaagaggaagtcccgggcggcctggaggtcctggaagtagcagaactggacaatggagcaggccatggctccagggaaccccactacggcactcaccttacctcaccacgccctgccccctccaccccactgcggccgccaccgagccccaatagctctagccaagcagaaggcggagaaaccaaaccggaagctgtcactgacacgggtccgctgtctccgagtactgcgcaggcgcaggctggcccaggcgcctagggcgcgggggcccgggtcacgtgactacggcgccgccgctgcaggtggagccaaagtcgacgtggaggcttggggcagatttttcagtcccagttgtgtgtctacgccgaggcatgaaccctttcattcattctggcttttagccagaggtgttctaattggacttgtccgcgcagccctttgacttattcagtcttattggtcccctactattggcacgatcctgatgtttcacagaaactaattcgttttaaactagtggcaggccagtgggggaccgtatcctgcaagagtcggattttgaaaagattaattgctcttccggagattagccccgtcaaggctggctttaaatgctcctactatagattcccatagtactacgcaagcccaatatagtacgtgttatagtgtattatacacttttgttttcattattcatttggtttttcattcatgcattcatccatccattcaacaaatatttgttagtcttttaaatgccagccacgcagggtgctgagcattagagaacaaaagagaagaagtaccttttcccagaaagctggaattctagtgactgatacaggcagtaagcaattaattacagtatttccctttaatccaaggggatatgttttaagatccccagtggatgactcaaaccatggatagtactgaaacctatgtatgtgtattatgtttttacctatacatatatatgataaagttaaatttataaattaggcacagtgaaagattaacaataactaataattaaattgaataattatgtggaaaatgaacccatggataaaggggggactactgtacttaactatttaactgaaattgtgatcatgctagtaagtgcttcataaatatttgctgaagaaataaatggaatgcatacataaagtaaatagaataacttgtttctttgacaaagcactatttttgaaagtactttacattgttcatttggatagtcacaaatgccatctaaaaatagtgtgtcttatcccatttttaaaataaagaaattgagctgtctctgagcagactttaagttatttttccaaaaaataaaaacaaaaaaaattattttaatgtgagcacaaaggcctgtaggcacttacacatttcctaaaggaaacctaaagaggccatccactttgtatgaaaaaagggcacaggaacaaatgaaaggcaagtggatggggtccagagcattcatttctgtcaggcccgtggacatacacacttagtcctaataatataacaactataatttagtgcccaggttcctactccattatttcctacttctagagtaggatgattttcacaaaataggataggcaatttctatgttatcaggttaacaggaatcagttcttcacctataaaaggcagttgaatcagatgtgctgtaaggtccctttaagcatcagggacctatacttctgtaatcaaagctttcagaaaaagcaagctgccagtgctcccttcttccatctgaagaaatgcagtgtttcctcagatcatcactaactagaataatccagccctgataagattattccctaaaatccagcaccaatcccaaactaaaccaaaatttaaatttagattcttagtgttactggacgaataacaaacacatgacactttctggaaggagactgtcattccttgaaaaccattcaagttcctattcaggtaaatgcattttgtggaagtaactgctgttggctgattttgctggcctttgttcttccctgaggcattcatatgtctcctgtggtggtcattgaatttcattactgtgttggctcagttttaatggtgaagtccctgacttccttccaagtactgttgaaaaggatcattcatggatgtttttaaggactttagatacccttcacagaaattacaacacattcatgaactgaactcttcccccaggaagt

SEQ ID NO: 1784 - DNA, 4001 bp, Homo sapiens
tcaagcaattctcctgccttagcctctggagtaactgggattacaggcatgcaccaccacgcctggctaatttttgtatttttagtagagacagggtttcaccatgttggccaggctggtctcgaacccctgacctcaggtgatccactgtccttggcctccaaaaatgctaggattacaggcgtgagccaccatgcctggccatcagaactttcttttctgtagaaagcctcgactccaaaatccaggaagcatgactgtgtcaggatactgtttatatgaacccttctgtcatttgtcctccagagagatattaacactccccatcccaccaggtgggctaaggctgggactgctttaaccctttctctcctagagtcaacactggcatgggcctgagtgctgcttcctgctgggggacctggggatttgggtcttgtggatgagccggacacccccccagccctcttctagcttgatgtccccctgctgcagggcctgctggatagcatcagcgagggtgtcaaaggccaggtccacattgcagttgtttttaaccgaggtctccacgaaggccatgcccagggaggcagctagctcctcggcctcctgggctgagacacagcgggtgctctgcaggtcactcttgtggccaaccagcaggaagatgaccttgtccgggccctgagtggccatgacctcctggtgccagtcttggatgtgttcaaaggacttcctgtttgtcacatcaaagaccagcaggacacccaccacattccggtaaaaggacctggtgatgcacctggggaggcagggaggtggaaaggtaagctgggagaggctgatgcctccatgacacccccagaggcaggacctcctccccctgggatccacagaatgcctcacaccccaacagggctcacttcacacggccccgtggttctctgcctcggtgtctgtgtctctcctaacagtctgggtgctggccgggtgcggtggctcacgcctgtaatcccagcactttgggaggccgaggcgggtggatgtggatcacgagatcaggagatccagaccatcctgactaacacggtgaaaccccgtgtctctactgaaaatacaaaaaaattagccgggcgtggtggcgggcgcctgtagtcccagctacttgggaggctgaggcaggagaatggcgtgaacccaggaggcggagcttgcagtgagccaagatcgcaccactgcaccccagcctgggcgacagagagagactccgtctcaaaaaaaaaaaagaaaagaaaaaagtctgggtgctccagttagggagcaagcgtgacttgaatccctcattcttggagaaggcctggtgctgccctgacctaggtcttcgttcctctgttctcttcctggcaaactcctgctgatcctctctcccttccacatctcctcgacacttcccgctctgttcccctgagctctcagcacccggggccagtatcactcagcatctctccagagtccagagctcaaagccagggatgttcctggtctctgggactcgacccaccccgcagtgttcgtgggaaaaatgactccgagcaggggaggttctggccccagtggaccgggcgggacccagggcagggacctcgccctccgcctgacctctgagttggcctctcgggagttgccgtggcctaaagcacgctcaccgagccccccaccagaagtccctcccgcgccccggctacccgcacctgaagcgctcgtggcccgcggtgtcccagagttgcagcttgacccgcggcccggcccgcagctgcagcgcgcggcggtagcactcggcgcccaccgtgggctcgggctcgggctccggctccggggcgccaggcgcgcctgccacgtagctccgcagcagcgacgtcttgcccaccgccgcgtcccccagcagcgcgacccgaaattggtagcggcagccctcggcctccatggccgcgtccgccaccccgccgccccgcggcggttttgtccgcgccccgaccccgcccctgcccggggccccgccggcgccgccccccgctccccgcgcccagccaccgtacccggcggggcaccgagggcgtcggaccgagtggaaactcctggccaagtttctctctctcgaagcctcaattctctcctctgtaaaagggggctaatgatgacccctacttcacaggataaagggactaaactagatgaagtgaggaggggcatggggaggagactaacagcgctgaagcatccacctcactcatttcttaatctccagccccacccccttacccgctccacaccgctcccccgccccaccccccgcctcctctgtgggttccctagttggcgcccaaccctctgctggacccgggaaggccactctggaagtgagtggttagtagatgctccctctccacccagaagccctttcctggagccctcattagccccggcctggggcctctagttcagtgttcaggttcaacgttcaacagcccccacggcttcctctaatgcctgtctgagttggacaccagggccccagaaggaacttgggcacagtctggttgaggaggcaggacagacacagacaactgcagttctaaagggagtgcagttggcctgtggattcgacaactaacatgtatgaggccaacggtcagttcatgttttgtggacagcaaccctttgacagggccatgggagtgcccctcttagagctgaggagactgaggctcagaggcacggcttgtctcaggtcacacagcagagttgggactcacatccaggtttgtctcatccttcatcaccccttcgatgccacaaaaggggacaaagcaggtcccacaagcactaagacactggttgagttttgcttgggtgaggggctagggtgaggcagcacatgagcctccaaggtttactccaccctttccaggctggccttctggaaacccagggcactgaggctggagttccagttgctccagccaactctagtctctctagtctcgtttttatttatttacttatttttgagatggagtctcactctgtcgcccaggctagagtgcagtggcacaatctcggctcactgcaacctccacctcctgggtccaagccatcctcccaactcagcctcccaagtagctgggattataggcacctaccaccacgcccagctaatttttgtatttttagtagagacggggtttcaccatgttagccaaggtggtctcaaactcctgacctcaagtgatccgcccgcctccatctcccaaagtgctgggatgctgggattacaggtgtgaacctgtaccacgtctggcccacatgcacttctgaccatctctgatgtcagtctctctcccaggctgcaggctccttgagggcaggggctgatgattgtatcctcagggcctaactcagcgcttggcataaagtagaaactcaaggcgcagtggctcacacctgtgatcccagcacatttggaggctgagggtggatcacttcaggtcaggagttcgagaccagctggccaacatggtgaaaccccgtttttactaaaaatacaaaaattagtcgggcatggtggcacgtgcttataatcccagctacttgggaggctgaggcaggagaatcgcttgaacccgggaggtggaggatgcagtgagccaagattgcgccaccgcactccagcctgggtgacagaacgagactccgtctcaaaaaaaaataataataaacaaagtagaagctcagtaaatatttatagctagatgaattaatgaaagtgggtaagtgctgttcattcacccatccattcattccgtcaaacaccatgatagagctggacttgggaagccaaagggtcagagaagcccatcccagctgatgttgaagctgagtctccaaggataagtgggatctgggaaggtcaaggagaaaggagaatccagagaggcatgaag

SEQ ID NO: 1785 - DNA, 4001 bp, Homo sapiens
ttgtcctccagagagatattaacactccccatcccaccaggtgggctaaggctgggactgctttaaccctttctctcctagagtcaacactggcatgggcctgagtgctgcttcctgctgggggacctggggatttgggtcttgtggatgagccggacacccccccagccctcttctagcttgatgtccccctgctgcagggcctgctggatagcatcagcgagggtgtcaaaggccaggtccacattgcagttgtttttaaccgaggtctccacgaaggccatgcccagggaggcagctagctcctcggcctcctgggctgagacacagcgggtgctctgcaggtcactcttgtggccaaccagcaggaagatgaccttgtccgggccctgagtggccatgacctcctggtgccagtcttggatgtgttcaaaggacttcctgtttgtcacatcaaagaccagcaggacacccaccacattccggtaaaaggacctggtgatgcacctggggaggcagggaggtggaaaggtaagctgggagaggctgatgcctccatgacacccccagaggcaggacctcctccccctgggatccacagaatgcctcacaccccaacagggctcacttcacacggccccgtggttctctgcctcggtgtctgtgtctctcctaacagtctgggtgctggccgggtgcggtggctcacgcctgtaatcccagcactttgggaggccgaggcgggtggatgtggatcacgagatcaggagatccagaccatcctgactaacacggtgaaaccccgtgtctctactgaaaatacaaaaaaattagccgggcgtggtggcgggcgcctgtagtcccagctacttgggaggctgaggcaggagaatggcgtgaacccaggaggcggagcttgcagtgagccaagatcgcaccactgcaccccagcctgggcgacagagagagactccgtctcaaaaaaaaaaaagaaaagaaaaaagtctgggtgctccagttagggagcaagcgtgacttgaatccctcattcttggagaaggcctggtgctgccctgacctaggtcttcgttcctctgttctcttcctggcaaactcctgctgatcctctctcccttccacatctcctcgacacttcccgctctgttcccctgagctctcagcacccggggccagtatcactcagcatctctccagagtccagagctcaaagccagggatgttcctggtctctgggactcgacccaccccgcagtgttcgtgggaaaaatgactccgagcaggggaggttctggccccagtggaccgggcgggacccagggcagggacctcgccctccgcctgacctctgagttggcctctcgggagttgccgtggcctaaagcacgctcaccgagccccccaccagaagtccctcccgcgccccggctacccgcacctgaagcgctcgtggcccgcggtgtcccagagttgcagcttgacccgcggcccggcccgcagctgcagcgcgcggcggtagcactcggcgcccaccgtgggctcgggctcgggctccggctccggggcgccaggcgcgcctgccacgtagctccgcagcagcgacgtcttgcccaccgccgcgtcccccagcagcgcgacccgaaattggtagcggcagccctcggcctccatggccgcgtccgccaccccgccgccccgcggcggttttgtccgcgccccgaccccgcccctgcccggggccccgccggcgccgccccccgctccccgcgcccagccaccgtacccggcggggcaccgagggcgtcggaccgagtggaaactcctggccaagtttctctctctcgaagcctcaattctctcctctgtaaaagggggctaatgatgacccctacttcacaggataaagggactaaactagatgaagtgaggaggggcatggggaggagactaacagcgctgaagcatccacctcactcatttcttaatctccagccccacccccttacccgctccacaccgctcccccgccccaccccccgcctcctctgtgggttccctagttggcgcccaaccctctgctggacccgggaaggccactctggaagtgagtggttagtagatgctccctctccacccagaagccctttcctggagccctcattagccccggcctggggcctctagttcagtgttcaggttcaacgttcaacagcccccacggcttcctctaatgcctgtctgagttggacaccagggccccagaaggaacttgggcacagtctggttgaggaggcaggacagacacagacaactgcagttctaaagggagtgcagttggcctgtggattcgacaactaacatgtatgaggccaacggtcagttcatgttttgtggacagcaaccctttgacagggccatgggagtgcccctcttagagctgaggagactgaggctcagaggcacggcttgtctcaggtcacacagcagagttgggactcacatccaggtttgtctcatccttcatcaccccttcgatgccacaaaaggggacaaagcaggtcccacaagcactaagacactggttgagttttgcttgggtgaggggctagggtgaggcagcacatgagcctccaaggtttactccaccctttccaggctggccttctggaaacccagggcactgaggctggagttccagttgctccagccaactctagtctctctagtctcgtttttatttatttacttatttttgagatggagtctcactctgtcgcccaggctagagtgcagtggcacaatctcggctcactgcaacctccacctcctgggtccaagccatcctcccaactcagcctcccaagtagctgggattataggcacctaccaccacgcccagctaatttttgtatttttagtagagacggggtttcaccatgttagccaaggtggtctcaaactcctgacctcaagtgatccgcccgcctccatctcccaaagtgctgggatgctgggattacaggtgtgaacctgtaccacgtctggcccacatgcacttctgaccatctctgatgtcagtctctctcccaggctgcaggctccttgagggcaggggctgatgattgtatcctcagggcctaactcagcgcttggcataaagtagaaactcaaggcgcagtggctcacacctgtgatcccagcacatttggaggctgagggtggatcacttcaggtcaggagttcgagaccagctggccaacatggtgaaaccccgtttttactaaaaatacaaaaattagtcgggcatggtggcacgtgcttataatcccagctacttgggaggctgaggcaggagaatcgcttgaacccgggaggtggaggatgcagtgagccaagattgcgccaccgcactccagcctgggtgacagaacgagactccgtctcaaaaaaaaataataataaacaaagtagaagctcagtaaatatttatagctagatgaattaatgaaagtgggtaagtgctgttcattcacccatccattcattccgtcaaacaccatgatagagctggacttgggaagccaaagggtcagagaagcccatcccagctgatgttgaagctgagtctccaaggataagtgggatctgggaaggtcaaggagaaaggagaatccagagaggcatgaagcagctggaaatgcagtctgaccccagccctccctgaggcctttccagtcagcccacgtgggcaatgcactgtcagcatctggcttcttgaacttcctccctttcccagatgctcctgctgtgggctgggatcatgtgtctgcctctgactgcagttaaatccagatgtcagctgacttctgccatgacttctgccacagattcactgtgtaacctggggtaagttatttcccttccctgatccctgcttcctcttctgctaagtcaggcaaatcacggtacctaatctcacaggg

SEQ ID NO: 1786 - DNA, 4001 bp, Homo sapiens
aagagcacttgaaaataaagaagtgcaaagatgtaaccaaaaattgctaaagaccatgttttccttacaacatttctgactgtggttctctacaggaagaaccagaccactgccatttgcagaaacatttgcaaacacttgtcctgatgaaggcatcgacttactggaggatttcctacgccttctaggaacagatgtcatgcccctttgtcaccaagaacagggcagtaccagtcacaggagtcactcactgaaggtggaccaaatgcactgtgaccccagcatggaagcccttccaaaagttcccattttttcttacaagacaaactgacgccttcctcaagaccctctcctctctgcctcctcatccacctctccagcgtggtactcaaaacacacccttcttgagttacccttcccacaggcctgagatgttctgcgtgctgcctggttaatgcctccctgacacccctgtctgggtcatctttctttctaacacactttcacggaccacactccttcagaactcttgcctggtttttaattattcactcattagtatcacaattggattaatactgcattccctcaatagactacgctccatgagaccagagccgtgtctgctgtgtttctgcaggatgtacagccctcccagcacggtgctcgcttccctaatgccattccacagtatttgttgcagagaaggaagcagcatgccaggacagatggagacaggactaatttggcttgaggtatgtaattttgaacttgagcctctctctgggactgtaaaactccaaatcaaagtcttaatctgagaatacatacatctgaaagagtgattagggactggtaaacatctattaatattcaactctgatacaaagtacaagttgtttattcttaccacgcaaggccaaaaaaggggagaaaaaaaaaaaagcacacagcatatgcactgggaaagctttcgcttattcaaaacagtatttgtcaagcacctccaggtctgggtgctgcaggggaaacaaagattaaacagccagggctttgcttccaaggtgcttacggtcttaagaaggagacaagacatgtttataaatagccaaaatgcaacccagaaaaggctaaaaaacactgagagggagggagaaataaacgaagcaagaggtctccggaggaagagatgaatgaattagcctattaataactcctcactgtaatcccaatgtaaagcaaggaattccaaaccaggaaaggtcaaactgaagtatttgaggaacacaggcgtcgccctaagcccttcacaggctcgctggggataatatcgcagctgaaaccgaacatcaagctggcttttcaaaccttcagttatttacattagactgagaggggaaaagcgctaagagtgcaagagcagagaaagagcaagaggaaacttgaaaaggcggatcacgccaatgcgctgtgcacagcgcccccgcgccccgcgcacccgctaccccacccgagcccccagcggcccgcgtcccccatcccggtcccaagcccagacacctccgagatccgtcccccggctccggccggcgccaccgccaccctcaagacccccgcagcccaggcccggccccgcgccaccgacgccccccgcggcccgacccgcgcgccccgccagcccgggcctcgtaccgtaggtttcggacatggccgtctgcgacatcttgggagcggcgccgcctctcgccgggtcaccggctgcactcgcccgcggtccgccggcgcgtctcggtggggaaggacctggggcgggggaccggaggagggaggggcccgaccggtccccacggcaaccgccggtctcccagcggctgcggcccagccggactccagctccgcgcaggcgcagggccctccaccctccgtccggccgcgaccgcgaggaggaagaggagatgggctacgcgaggcccggcccaccccgcgttcgcgcgtgcgcacggggaggccggggcggggcgcgtgaggacttcggcgcgcgccggaagcacgtgcgcgggctgggcgctctggcggtgtgcgctgaggtgggcagagcggcaggtgggggcgttgggggctgagtcccgatttccctgagggagggtcgggtagaggcgggcggtgggcaggtttgggggtgacagagggctggggacagtggggtccagttgccggacagaggaggaaggtgcccgcactggggaggaaagcagtccatttgccaaattggcccgtctcagttaagacgttgtcttcggtcatcatctgcggctgtcagccaggaaaaaacttccctgacgctgttacgatggaggccagaacttggttaatgtgtaacaaggaggcagtaggccccaggtgtccagccagaggccgccctgtgaatgggaggcaggttcatttacccgttgggaagctaagctttcactccaaactgccgggccctcttggatggagctgagcgggtgtgggcggaatgacagaagcgcaagatgcccaggtgctaaaaggtcatcgcaagactacaggctgcagcctctccacatcccattttagagggttctggattacggttgagaagtatctcccggccctcagctggggatgtgtttccaaatttaggagtttttttaatttttattttttaacagggtctggcactgtcagcccagcccaaccgattctcctgcctcagcctcctgagtagctggggctaggggctcacacgaccacaccgcgccaatttttaaattttttgtagagatggggtcttgttatgttgcccaggctggtcttgaactcctgagttcaagcatcctccctccttggcctcccaaattgctgggattacaggcatgagtcatctcacctggccttggatagtttggtttcagaagcaaaactgagttagaatccccttctgtgggaaatgtagagataaacatttatgggaaagagaattttggttgaggatttggcccatctgagcttgatcagggccacatagcgcctcatagttcccaaccttgttcacaataggtagtcgaatgctcaaaatatccttggctaagctcccaagtgacctggactgtgtggaaaatgccagtacatacttttgtgtgtgtgtgtgtgagtcagtttggctccatcctccacataaattggcatcagagcttccctcttccccagtggctatttgggtcggtatttttctcttgtctccgatcctaataacaaataaatgcagttttttctaaatcacagagaaggccccatggtgaaaagttgtgacagctgtaattcctaaaactgttttatatatatttcttgttcagtggctcagatcatttgttgctttcttgtttgtctctctgcatgtcgtgtttgatttaggctcctgagtataacagattggttctgattaaaaccatttcagaggaaagacagtgatcccaggaagcgggaagaaaacagcatcacctgaagttattcctattcgttagatttgttttcttcctgcgaaaaactgctatgtacaagaaagaagtcagtgagctgcagtgatagttagcattattgactgaaactggaccagagatccctgaaacctggacaaggtggtagaaatacaaattatgctgccatttcaaagctgtgggcagttttctactttgtggaaaatgaagacttaggtaggcctttgggaaagacgatttgttttggaaaaaccacccaaagggatcatttggtttgcaaatgtaactgcagtatcacaactggaagaagaaatatacaagggcgaggtttgaaggagcccttcagtatccttggatgatactgtggaagattctttgcatctcagtaactttggatctttgaagatccaagaaaataaatttcttcaaaatatttttagagactgctttgattctgaggcactgctgattatatggaagaaa

SEQ ID NO: 1787 - DNA, 4001 bp, Homo sapiens
catataatgtttgttgaatgaataaatgaacgaacagtaccttccggtctgccagatcgatcttgttccccaacaacaccatggggtaggactgctccatggggacaatcttggccaggacatcaccccgccagatatccagggcttcaaaagactccaggtcggtgacatcaaaagctaggatgcagccatcggagcccttgtagaacgtggacaccatggagcggaaccgctcctgaccgcccgtgtcccagatctggaggggaaagcagttgccccatggggctgtgatgaatggctggaaggaggcccagctggattacatcatgtcaaggcttcttttgctgggtagggagcagcaggccctggtacaggtgcatatggttctttcacaccgtggcacgttgaccctcccacccacatacactccagcacctttgtggtaacatttaacatcctgagagtaatttcacatctgagctctcatttttcctctgggtcatcaaggtggcaattgttattcccatctgacagatatggaaacttggacctcgggaatgtcttgcctaagatcacctgccaggttttccagagaacctgagactaggcgtggggtctctcaactcctggattaatgtccttccttctagatcaggcatcagcatttttttttctataaataacagatagtaaatattttaggctttgcaggtcattctgtctctatatgccaattattactcaactctgccattgtactgcataacttgataagctaaccaatggttatggctgtgccccagtgaagtcttatttacaaaaataggaggtggatcagatttggcccatgagctgaagtttgctcatctctgctctagaccattctagctctggttcacattgctacatgagtggctgtccgggcttgggggggattttcagtgtatgtatgttgaagagggaaaaggagggctgctcacctgtaacttcaaagttgtgtcacccaatatgataatcttggagaggatgctggcccccagtgtggtctggtattcctcataaaacgtcttgtgcacatattggtgaaggagggaggtctttcccacactgaggaaaattccagacacatgtgaacacacacatgcaaacacacatgcacatgcttccctaccattctcagaatcttcccaggcccctcttgccactgtctctccctgagattctgaatttcaaatttctgtggtccatggaccacactttgaatagcaagggagtaggaaatggtttctagaagtagaagccaatcaaagtgagcagagtagtctggagacggtggaatatctcacagtggtggtcaggttttttctgtgtgtgtaggacatgggaggacagatagatgctaaatggcttgcctaattcacacagctggttactgcagagtcactgcagatctaggactggaaaccatctgtttacatgcagcttctttgtcccaactaagcttcttttctggggatgggatacagttgctggtgtcaccctgaatcagaaagggacctatgggagatgggaacacatcaggaggtctcactgtccttgggtgaggggctgcttcccaactcccagagctgagcttggcttacccaatggctccgacgataatgagtttcaggtccaccttcttccggggattcatggaagggcttcagagcctgtaaggaaacagaggtcatccacatgctagccaatgttccttgtggccattgtcactgagtgtggcctctgctttcccctttccaatgggcaagttactgccctgggcccgggactgggtggggttctccgaaggaggcacgtaattcagcaatcttcatatatcttctccctcactttccctgggggcctccccaaagctggaagggtggtgactctccaggacaggcaaatctctcatccctcagctctaccaaccctgctcttggaggcagcctggagtgccaagaaggcaggacaggattaaacagaggcctcgcagacagcccagcctggagccagggatggaggggcatgcaggaagaagagatgggggtgggcaggacaagggttccattgtcacgactgcccagaggctttggatggaagagtgcccctcccccagcccgaggtctagctgcaactgcagaatcaaaaggctcctctctaatgcagctggcgggggtgtaattcatacatgtttctggaaagctattggcagcaagtgttgagagccttaaaaatgttcctgccctccacttctaggaatttgtcctaaagaaattatccgaaatgtgggtaaagactcttgtccaagaatgttcttcactgtactgtttataaacatccaacactaaagcagtggttaaatcatagcacacaatgaattattaagcagtcattaaatggagtttttgagaatattacaataatatgggaaaatgctcatgccctaggatctaaataggatcctaggatcccttaagatctaaatagaaaacagaagatggtacattctcagcaaactattgcaaggaacaaaaaccaaacactgcatgttctcactcatagatcgtaattgaacagtgagaacacttggacacaggaaggggaacatcacacaccggggcctgtcacggggtgggggcagggggtgggatagcattaggagatatacctaatgtaaatgatgagttaatgggtgcagcacaacaacatggtgcatgtgtacatatgtaataaacctgcatgttgtgcacatgtaccctagaacttaaagtataataataacttaaaaaaaaacaacagaagatggtaaactgtacacacaataccacccaacacttaaatgagttcccacttgtatagaaaaacgcctggaaggaaatatattaaaaattccagcaattccactacaggatatatagacaaaggaaatgaaatcagtatgttgaagagatgtctacactcccaggttcactgcagctttgttcacagtagccaagatatggaatcaacctaagtgtccatcaatggatgaatgggtaaagaaaatcggtacatgtacacaacggatactgttcagctttaaaaaaaaacttacaatttatgacaacatgggtaaacctggaggaccttatgttaagtgaaataacccaggcaaagagacaaataccatatgatctcacttatatgtggaatctaaaaaaattgaactcgtagaagtagagaatagaatggtggttaccaggagctgggctgggtgggcagttggggagatgttagaggataaaaaatttcagttagctaggagtaaattcaagagatatattatacagcatggtgactatagttaacaacaatgtattgtattcttgaaaattcctaatagagtttatattaagtgttctcactactaaaaaataagcatgtgaggtaatgcagatgttaattacctcaatttagccattccacaatgtgtgcatatttcaaaacaacaggttgtacatggtaagtgtgtacaatttttatctgtcaattaaaaaatgtaagttattctggttggtaggaaattacattattttaatttttttctctatgctttttaatacattcttttttttttttacaataaatatgtcttgttcctataagagaaatgtaaatgtatagtgtgtgtgtgtgtgtgtgtgtgtgtgtgtgtgtgtgtgtttaacaaggtaaagcaaaactgttgtaggatacatgcttaactggccctttgtttcacccatatatgcacatatgcatatgcactatccccaattcctggttcttttgtctttggatgcactaagcatgctgagtaaaccttgacttgactctgctcagatgaggtgtcaaaagttggtcagcttgtgtttcccctgctacttggaaaaagctgtaaataggacatcctgaggccttggttctggttctcactttgt

SEQ ID NO: 1788 - DNA, 4001 bp, Homo sapiens
tccattttatcctttatctgtaaaaagtgtagtgttgtcactaagcctcattccacccactcagctgactcagatgcttcaaaccaaggaatcctcctagaggctaggctgagtcatcctctactgttaagtaacagtgaaaagcaggattgaaatgcaggactctgccttcagccagccccggtccacacagagcagaacttgcggtgactgactccccactggaggtccccagctctttccccttcttgtctggcagcacttctaagcctggagtcctggtcctgcccatttgccaaagctacagtgtagctcagcccctgtggagtaagaaggactgagctgttgccaagccccagtgcctggcaccagccctccaagaacgctggaacccccttccctctcatttctcacttcctttctctccttaccccgctggctccaacctgaaaccaggtacaatcttctgtcgcatctgcattgggtggggtatcacttctgctgacaggagacgagtgagcaggggcaggtaaggattctgaagcagacagagtctcccgcccccatcatactatctttccaggctcttgtccactttcagcacctcccctcctgatcccataccttggaaaaggacaaatatatccaccctaaaaaataatgggacctacaatcttggaagcaaaatttgtctgtgaaaagaggctatgtagagagcacaaggctttgttgcctcccagtaatgttcacaattccgccttacccacctcaaccctagcaggtctagacctgctccctctgggaagtgtacctacagccctggtttcaggaggcttggcgctcttgttctttaggttatttgaggatcttgtctccttgagtagactgtccatgcctgaagggcagggctgtgcctcacacctctctgtatcccactaaagagcctgaccaatgctgggattctagaggtttccatgaacagccatccatccactcatccatccatctgttcatctgtctggcacaggcagtgcatgcttactaagccccagcactgtgtaggtctaaagatacagacaagttactatctccgtgggacctttgtggtgggagattgatctgtaagcccaaagaaattatttgtattaatacataatacctagcaattatagagcacttgcagtttacaaaatgccactgaagcccaatggatacctgggtcaagaactgggtatagaacccagatccgtccgactctattcattggctcccctggcattgcagcactgggcaaggagaaatatttatgatttagaacaggagtgataatttcctactccaggggccaagcttcccctgatgagacccttaggccaacacaattccatcccagaaggcactctgtcaatgtcacaaggggactctgggtgccagcagggttttgccctcatgcagggctctagtttctggcaggtcctgcaggtttgaggcagcagcgccatcctctcctgactgggccagcagctgcgtcctgggactgatggcctttgtgggtctccgagctgggcctcagctcttcgcacaggcagggaagtcttttcttgctgccacaccctgggagcttctccagggtggggtcttagggctggatttaaactctgcagctgccagattggaaatctcatccttgcattccctgcctccactcctccacccaaatacccaaataactcccagggctgcaggggcagacagaagcactgagacaagctcccggggcacttacagctgtggctgtgcagcactcggcctccgctctgagggcagctgggagtcctctctcagtctggtggtctcttcttagagcagtggtctcagcagggccagggaagaggctctgggacaaagacaggcaaaagaaagtctgttgaagccacgccacttccctctgagttttcctcctctccctctcgtgcacagacttgggaaagttgcaaaagaggctgggccgggtgacctcagctgtgtgggtggagggggtggagtggaatggaaaagctaggctccagagctgactggatttgggcccttcaagaatttcatttataggaaccgtggcccatggtgatgaggatgggagctatgggtcagggggcctgcagggtaacatgtcccatttgtgggccccataaagagcctctggttggctttagaaacttctgcttctgctgctggaagccacccagtaaaggggcccttttgttttcgttgaggttttagatacacatgggtagaagattcagtcctaccaccagcctggtaggaagaggttctggtccttatgctttgcccttatcccagtacctgtatacacacacacacacacacacacacacacacacacactcctcccctactccaatacacacagcacacacacagaaaacatacatacatgccacacaccacacacactgcccacacacaccccacacatgcacaccacacatgcaagcaacacccaaacatacacacaatatacacaccacacacacacaccacatacacaaactccacacatacataccacacacaacacacacaaataacacacgcaccacacatcacacacatcacacaaacacaccatacacacacaccgcacacacccccgcacatacacaccacacacaaacaccacacatacataccacacaccacacacacatcacacacacaccccacacatacacaccacacacaaacatcacagatccatatcacacacaacacacacagcaaacacaccacacaaacaccacacatacataccacacacaacacacactacacaaacacaccacacatacacaccacacacaaatgccatgcatacataccacaacacacacaaaacacaaacacaccacacacagcacacatacatgccacatacaagatacacaccacacgtacactccacacacaaacaccatacatatataccacacacaacacacactccacacatacacaccacacatacatagcacacacaatacacacgtactacacaaacacaccacatacacaccatatataccacagacacaccaccacacacacacatacacaccacatacacaccacatacacacacatacacacacatacatacacaccacacacacaaacaacatacatacacttacacacagaagcaacacatatgcataccacacacatgcacatcacgcacacaaattacatacacaccacacacaccacacacacatcgcacacacacacaccacacacacaaacaacatatatacataccacagacaacacacatcacacaaacacatcacacacacccatgccacgcacacatgcgcgcgcgcacacacacacacacacacaacaaatacatacattaaactccacaccaggcttgtgagatatgaggcaagtcctgacgtctcctctcaagtgaggattgtgacccaacctgaagtacctaggagactacagcaatttaaaacgccgctagcatgcggctaatttggtatctctttgagctgcctggaaccatgcctggaatcgctatgactggcggatgaaagcagaatgaaatgagtttagacaggccttgctcaggggatacaaggcctcaccagagccccctcaagtcgtgtaatgcattggatgtccccttctgcccccacatctctgggggcagattgtgcctccttgggcccattcttcatctaataatcctctgggtcagggagttcttcctcgtatccaacagaagtctctgactctgctctgtggctgctgtctacgtctcatctggccgattagactacacatttctcgggggggtgcagagcgagtatccttgaatcccacactgggctgctcacggtgccaggtacaggcctggcctgggtatgttgtgtgtggtttcttcagtggaaaaaaaggtgaagctgatt

SEQ ID NO: 1789 - DNA, 4001 bp, Homo sapiens
aactctttccctagatgttcctgagaagactgtgaatgctcttgtagaggcaacttgtactcatcagattctgtctgttcccctcaatctacagaagttacaccctcccacagaagcataataaatgtggagactaaaaaacaaatttctaaaaagccagagcttctacaatgaaatctttgaatctttgcctaagcaacacaatttctagcaggggctggagagttagcctttatttctgatatatctattactccttttcatggaaaaaaaacatataggaaacttagattaaaaaaaaagatttgagaagctttttcaataaatttcctcccagccaggaaagagtaacaataccagcacaatttcaacatgacatatttcacaatgcaggctgcttagccagggaagagatttttctcatttcttgataaatatcttcaagaaactaagataagactacttcaataggtattcctgagttaagtatcctattgctattgaaattgtacttgtataaccccaaagtacaaaaagctccctcgactattatgtacattacattcatttggcacaagtgaaaatgttgccactaccagtttttcaggttacaattacatgcttagaattgagttaaagtaacctccaagtaaagtcataggatgttcatggaaaagtactttgttcaagtatttagaaatcataccaggtagctacttcactgttgattagagataaatgtctgatggattatctgttatataagaaagaggtgtgagttcagctgaaattctgactagtaacttctcattacaatgactgttgcaactgaaacccttccttacagacacacagctaaaggggcaagggcaagggtgggaaaagatttgggagaaactgagtgtctcagagtccctgcaaagcaaaatagcctagagggcacgcctactggcttttgctttagcaagaagcttcaatttagtgtctgcaaagcaagcagcacagtgggaagtgtcagactcctgctctgcactcacagacaagtgggaaagcaagctacggggccaaaaatgcagtatcatcctccaaagtatgaacccagggtgagtgctactgagcactacagtgagaccctgctactgagatggagattttctacaaagaacttgcccacacttacctactgagggctaaacagagcttatattaacgtggctgtcttttacagttcttctcaaggagccaaaactgttttcaatactgaccaattctagaaaaagtttgcctgtatactagaatggagaagagagtttggttttgatggtcttggaaaaggcagtaaccctgcttggttcattttgaaatgttgacaagggttgcccatggaagacagacttaaagtcagccccaataacctcagtcagcccagagaaattcacatgctgtaagtttgcacaagcagatgtgctaaatgctcaaagcctgtaaacaaaacaggcaaactggctccctcttgcctttcagaaaagattacaggagacactgcttacataactcttaaaactcacatcacactgtctgaaacatatactccccatctcacacaactgacaccgtttgaacaaaaagcagataacaactgtcctcatagtttcaccccttatggataggagatgtacagctgggaaagtttggttagtaacttttgggaggaggatactgcatttttcaaagagacagacactgatgttacagacatacatagattaaaaaaaaaacttacctcctcaaaagtcatagaccaactactgttttcaatcataggtacaaagacaattaaaaaaaaagaatatccaatgaaattgaacacctactaaaatatttatgaaatggcaataacaaaaacagacacttcttaatgctcttttgcttttcctttgagtgtcatataactctaagttctctctgtgaccgcaaacattcaatggaacaaagatacttgaggtagccagtgggcaagtctcaactcaggaagactcatatcttcaaactcctccctctccacattgctgtttacagtttgcatgaatgactaaaatgctgtatgtgggactattaaggaactacggtgtgaggtgttgatactgtgttgttaaagctgggtggaaggaacttccttatatgacaaggtcagaaatcttgcaaaatagttcatcttcagacaaaagaatgaaattgctgggcagggcaatgcaaaagaaaaatggatcctggatctcatgtgtacctgggggctgaagtctgggtgaagcggttcaagggattgtgaacgtcatttatttcaagatgagaaaccagagaaatgtgaactgttaattaaaagtaaagaaactaagctttaaaggaaaaaatgacgaggagggaggcggctttataaaccctagctcaatattttgggtgttgtctgctgctatgatgaattcttggcacatgcttttaaagacttttaagggtcaggagaaaatgttttcctaaaagactcagtgcaaatttattagcaacaacacactcaactctcacatattttcttttggatacctcttttaaaagagttgacagctatcatattcaagttttcaaatgcctacagataaaatgtttaaatatctatgttgtccataatgaagatctgagaaagaaaatatggatatttgaaggttttgtgcttccctcctttactcatcacatccaattttatctttgtagtggaaaatttcaaatttttaaatgtcaaactaaaaacaaaatcttgtcagtgataaatgacagctggccaaacagactgcatttctttcagcgcttaaaaaactatcttaggttatactcttgcacaggggtcagcaaacttctagtgtaaattgccagaaagtaactatattaggctttgcaggtcgcatggtctatgttgaaatttctcaactctacaaatgtcatacaaaaccagccatacactataaataaataaacaggtgtggttgtgttccaataaaacttggtttacaaaaactggcagtgagccagatttggcctataaaccacagtctgcagatccttgctctactctagtacacaaatcaaattttcaaaaagcagatgcattctagatgatatagaaacatattagtgtcaggtaattttctcagtaatacttaaacagaaaagaaaactttctaaaaattaatgaaagtttcttgaaaactctgaagatcaccagtaaacatactagaaattcttagtgttcctaaagcatattcttcccccaagggttaagtataagggactctagcagaccagcattgttagaaatcgcccactccttattagctatattgcttgagaagccaaaaggatttagttttgcatcttcaccatcctataacaatgaactctctggattatccaagctcaaagagaaagtggaagacttctgaagtttatcattaagttatcataggcatatataaaccatccttgtgtctattactattccttaaaagcacattatttcataacatactatttccaaaagccaacacagtttttgggatatgaaaaaataataaaatgtaagtttatttgctatggcagaaaaaaaattttttttttttttgagacggagtcttgctctgtcacccaggcaggagtccagtggcacgatctctgcccactgcaacctctgcctcccaggttcaagaggttctcctgcctcagcctactgagtagctgggactacaggttatgtgccaccacacccagctaatttttgtatttttagtagagacagggttttaccatgttggccaggttggtcttgaactcctgacctcaagtgatccacctgccttggcctcccaaagtgctgggattacaggtgtgagccaccacacccagccagaaaaacatttttcaaagatggattcacttatcttgactcccctgag

SEQ ID NO: 1790 - DNA, 4001 bp, Homo sapiens
aagcctgattcctcagagatgtagagaatttgttgaaatatagtttagcacttcacaatatcaaaactcctgaaataaaatgcttctcatttcacttacaaaacaaaacaaaacaaaacaaaactcctttctaaatagaatcatgaatccttagttttctcctttaagaaaaagatgaggttcagggaagtaatgacttcacctggacattaaaacacatgtcttcagctctttttatttcttctttaaatgacaaaggaactacatttctcaaaaatatcccccctataattgtatgctagtcactgcatcaaactttgttttggaatgacaaatagactttccttaggatgggaaatttcttatttacatggctatctaacatgtctgttatgattgtacagaagagattatatttgcatgtaaatacatacataaagactgaactagtaattgtaaagataagtataaatagagatgaattatagtgaagggagatataggagagaaaagagttaaattcagtcatgtaaatactgtactgaaaagactctaatatgagagaaccatagtgaggaaatagtctaaaatggtattaaactccattctataaaacagacaaggctaaattattcttattccattaccacataatggtataggactactgtaaaccaattaccttatagaatagttgctaggtatagttctcaagcctgcaacagcgattgtgggtatttaattttaacccttggtaggaaatgaggaagggtgatttttctcttattcaggaaatcaaataacaagcaagtcagacttcccagattcacagcacagaagccagcagctttaagctgtttcacagataaacagttcaatcattctaggagagaaacctaaaatttcctaccaaagtatttttaggtggtaaaattctctatcaaaaaacaaaacaaaacaacaatcaaattggcaatctaatggggaggttagaaagcaaaccacacacagtctagataagttgctatgtctgttgtaaaatttaaccctttggagatatacataacagaatgcctacatcaagcacttgggtattctgctttattgctgagcctagccaggcagaaaaccatttttttgctgccacagagataatgccactaatgtgaccctgggctctgagaaaagagccatgatctcctctaaccaattaaggggtggtgtggaccaggctccaaatgagctgcacaacagtggccactcagcatttccttctcggcagaatggggagaaggagaagaaaaccagagacaacaagcctctttcagagatacaaggaattttcacagaggatagcagattccctacaaatgaagttcaatgaaaaacaatctcaccgccagaagccgaggcacaaacagacgatgccccatccccagaagttccagcactcgacacgcatactcattcaccagcttgctcctctcgtcgtgcatgtcctgggactttttgacaggaggtgtgagcttagcagctggggctgggcagggcaccccttcttccatgagcactaagtaggtatccagaatgagaaagatggatctcttatccacaatattaagaactgcggtgggaggggagccaggtttaggtctccctgggaggacgtacaagccagtctgtggtgggaattgtcagctaatgtctccacaagaaaaacattttggctaaattatccactgcgagaaccccaaagtagactggaaaatgaaaatgaaatcaagtactgatctaaataaaaaacggcaaaagcaatcgaatgcgagaaaatggccaagagtgatgcaggagagttcagatacatgtgtaaaaacggacaagctgcttagaagggtctagcatgtgagaatgtgtgagagtgtgtgtgtgtgtgtgtgtgtgtgtgtgtgtgtgtgtgtgtgtgtgtgcgagaaagggtgtgtgtgcgtgtctatgtgtgagaagacagcagcagcagtagccaggaagccagggcagttgtgaagctgcaaggagaaaacgatgagctcattgcaatcctcgattcgtgacaagcagcgctgttgttgctgctgctgctgctactgctgctgctgctgcctctcgctgtgaatcagtaatgaaggggtagggaaggaaggggagggaagaggaggaggtaggtgaatgagcatgcagagtgtgtctcaggggagaatgctgtaataagaagccaatggcgagccattggacagatgcgcttccccctcccagtctaccttcaatcagtgttagtctgacagcttatgctgttgaatcctaagccacagagagatgaactagcttttcctaacatgtgacgctcacagaaaaaaatcagacagccagtcatctgaacagctgacctttattcactcttgctttctaacaacgagaatagatcttatacttggatttaaagtgggatgttccaatccttattagatgactgaaaccgctacagaagagaggtattagggtaaaatgatagagtatggacagaagagccaaagaccaagcaaccaagaaatgacacaccctcaagttgaagtgtttatgcaataataatgactctttgcaatgcaaatacaagaagcatttcaggattctgggaaggctggccatgattaaaaggaagatttttgtaaacaagcaatatgataaataataaaaacctaacacgtattaagagtatacatttaaagaactattagaattgaaattctcaaagcaaaaataacttttgtatgccacagaccttgataaacactcagctaatagttgaaaacattgttctgataaatctctggtcaaattaatccttccccagtaatataaaaattatccatagttcaaaattttacaatcttagtgctaatgtgttatattagtttacttgttgtgaataaataatcagttgtagccaaatgaaggcaaaatgaccaaatcaccatagggacagtctcttaactttatcctaacaattaactaatccatattcagcatcttgattctgtggttctgtagttgctctcttaagtaccaggctggtttctccatacaaattatagcatggtacaaagagaaacaaggctaagagagccagagcatgtattttgtgagtcttagttttctactctgacaaataagagttacatatctacaaataaccaaatagaaacatatttattgatgtatgtctgtaggcctaaataaatagattaattatgaaaatgagcttaaagaaataggaagggagattctgcctcccttaacaatatattatttggttttgtttttccaaaatctcagaaaaacaagaattttaagaaatttaacatttaagtattatttaacaagttattttaaatgaaatatttatatattgctgtcaagccttttatctcttccaaaaatgatttctttttttttttgtttgaaacggattgtcgctctgtcacccaggctggagtgcagtggcagcatctcagctgcaagctctgcctcccgggttcacatcattctcctgtctcagcctcccgagtagctgggactacaagcgcccgccaccacacccagctattttttttttttttttttgtatttttagtagagatggggtttcaccgtgttagccaggatggtctcgatctcctgaccttgtgatccgcctgcctcggcctcccaaagtgctaaaatgatttcttaacaaactaaataaagtagagctaggaacagtagtgtgtgcctgtattcccagctactccagaggctgaggtgggaggatcctttgagctcaggagttccaggctctaatgtgctacgttcctgcctgtgaacagccactacactctaacctgggcaacatagtggaaccccatctctaaaaacaaaaacaaaaaactatgcaaagtaaagatcttaatgtaaaatgatcataagca

SEQ ID NO: 1791 - DNA, 4001 bp, Homo sapiens
caaaattagccaggcgtggcggcgcatgcctgtagtcccagctacacaaaaagctgaggcaggagaatcgcttgaacccgggaggcggaggttgtggtgagccgagatcgcgctgttgcactccagcctgggcatcaagagcgaaacttcgtctcaaaaataataataataataataataataataataataatacacatcagagcaaatgtaggctacataatatgttaaaatataaactctgccctgctttatctacttctctccaaatgaataatacataatatcagcgcatttattgaactgatttagtatagacaccagtctaactcaaagtctagagctaacccctcaggcaggtgtacatttaatacaatttgatgataatgtatacataaagttcaactagtctttctccttagaaatctcattgtcaatttcataagggacgctctactgagaaaatgaatcacaggccagttttctagtactaggagcttgtgaaccagtattttccatgaacaaaatccacttccaatgtgatcacaaaaagcaaacttcacatccgtatcttctgacatcataactaatggatattctacggaagatgccaaatataaacactactgtaagaaaagtcagaaggttttcatgaaactgtgttttcagaattttaacaagcaactacttacctcccactatgcacgaggaaatttaaatgtattaaaaatccctaaacccctccagtgccaaaaataaaggccttaaaatcattttccaaactgcgctgaaatctgtcaggcaagcaaaagttctccttaccattagtgtaataaggctggcatttcagtttacttgcatgaaaccaattttgcaagtgaccacccaagttttggtacatattctaatataaccctatctgagagatccaaggacctggacacactgcctagtatctgaaacccgtcagttcagctcccatgcacccggccacctcccgctagccggtggcccctttccacatgctgacgcactgcccagccctgtaccgttggcgaccagtgcaaagtactagcccagtctcagaaactttgactcagttatcaggacactgagcactcacaaggtgggtgggggttggggggaggtgtttgtcatggctcaggaggtcaactttgaagcggggcattccctacaggtagggatctgcccggaacgcatcccatcccaaactgcaaaaccacaagcatcaacagcaggagccgagcaaagtgctcggcggaggaagaggaagggcgagggagagaaatggtcgagtacagaagcctgcgtgtgggtaagaaaataccctaaccactcgcccaccggacgcagggcggctgggactgcgaatccagcagcagccacagcgtagcagcgggcggcagccgccgaggcagcaatgtcaggagggcacagctggaggaggcggccgccaaagccactaccccacccccaggtaagggcgccgaccccgcccgccctatccgcgaggagcggccacctgggagaactgcggtgtccgggaggcggccgacagtcctgaacccgccccctaccctccttaccgcggtcctcccgcatcccagtcctcggctggggccccatctcgaccctccccaggctcagcccgacgccaacacacccaggcagcctcggcccgcggatccgggccgccgggccgccctcgtgtccctaggaggccgtcctcgcctcacctcttcacgtctccgcgggcgctgccgagacaacaactccttcaggcgcccgcgttccaccctccacctcgcgctctgaagccgggccggtcccgttcgctccgccaccgctggagcccgaggagggcggagggaactgagaggggaggggagaagggccgcctggcaggaagaggcgagggagggggcgggccgagaaggaggggaggaggcggtggcggcgggtcggaagcgcgctcgtccaggcccctctgcgcggcgtgcgcgctcctgatgtcggaggcgcccactctgccgggcggcggcggcgcacacgcgcgtgcacgtcgctgcgtggccgcggttgcgccgggagcggaggagtgaggtcctgacagaaccagagctgttagagcagggacgcgcgaaaggcgggagtacgggcggcgctggagaacctccgcggcggaggggcctgggggtgggaccgcgcccgcgagcccgccctgaccggggtgcgttctactggcagttgctgagttcggaagattaactctgaatgtggagagattattttcttgctcgtaaacctggtttacatattttcattcttaatgctcagtaatcttaaggaaagtcacctgaaagaatactttttcaccaagtactcttctgcgcctgtttgaaggtgtctgtgtgcttgtgaagcgctcccttgttagttccttctgtgagactcgggggagactgaagagggaaatcacctgcggggaatgaacaggaaagcaataagtaagcaccattacgtattatatgaagaaaatgtgccctcatttgcacctttttatcctttggggtaaaagatgttgaggtacaaactaggtagaggtagaataaaccaacgctttttcgctacgaagattgtactgatccttgaattgtggacatccttcttctagatcctgcaaccagaaatgacctgtaaattttccgaatctccttagcactttgttctgtagttttgtggcacctaacatgtcaggcttatccaggttgccctgtgcagcattttatcccactagacaaccgctgtgaacctgtatcattcatttgtatcttacactgtgcaccctgcctaactcataggaagcactcaatgaatgtgattgcatggataagtgaatatagtgtccagtgattgcagccatagaatgactttagtttaaatatctcccttctatcccacttcaattcccctgccctcattttcccacccatatttaaaagctactctgagaaacgtgacatttgtccaaagggccctccctgacaaattccttccccccacacccccgcttttcctgatgttaatgtctatagatgctgagacatatcaagagtgttgtaactatttttttgtttcccctaccttctgggctgcttcccttattaacttctgtatctcaggagcctacctagccctgggcctgacaataaatgctgaaagtttttattatatttaataaagttagggttagaataacataaatcatctgttgatttcctgagatgtacaggaactattaataaatctgccaaccagtaagtactaagcctctactaaataaagtactagtaaatttacactgcgcgccatgaggaaatcaacagttgacaaagccgcagtttctgccttcaggtatcttctaactggagtgaagctttttgacaaaaaaggacaatggatgtggtaattatgggcattcaataggtaacttagctaaaaaagaatttaaaaaaaaaatggcaagtccaaaacaagtttagtgttccccaaattcagttccatatgtctttgaaagcaatagtggacaccactggccactgcgagttaattcttctatttaagtggagcatgctatcttcatgtgccaacttgctataaggaaaagaaaaatcctgtcccatggccacatgtaacacctctcatcaacaggggtcattctttaaaactgaacttttcctcacagtacaacatagataagagacaagtcatgagagaacctagataaaagacaattaaggtgatctgatgcaaactcatccttaccaccagaaaaacaattctaagcacatgccaaaaaattattaacagatcttcaggcttttagtcgagaaactaaaaggaataaaaaattaataacaaagcattcttcatgtggtatgtgctgctcacttctctttccactgtggcttcatttgcat

SEQ ID NO: 1792 - DNA, 4001 bp, Homo sapiens
cataatggagatttcttccatcatcttgccagctggcctttccacagcagcagctgctgtcccagctccagaccagactatccaaggaaaaatcctactgcagctcagtgccagtgtacacacccacctgagttcgagggggtggagtgtcaaaaatccagaaagaaagaaagagaaagaaaaaaaaagcggctgctatcacaggcttggctagcaattcacccccagtaggaaactaaaagaggtttcttatctatgcaggaagtatacactataaacaccttctgcatttataacagagaagctggaaaattcaatttttggaaacctttaaacttcaaaaaagaaataaagtttcctaactagaaatatcctatagcaataacaacaacaaaaaaaactgatttgtgttatgttcttggtaattaaaaattttcataatagctcatcttcttactgcagtattattacatgaagattgttcttggagaagaagtaaattttcttagtgttcttaacgcttattttttcgtaatcttagaaaataaacagatgaaaaccattttaatttctcagaatttaaagaattcatagtacaagtgatctcctgaagtctgaaaaaaaaaattttcccctctgagtatttctgttaaagaaaaaaatgccaaaacataaaaatgaaacagggacagcgatatcaattaataatcattactcccttttcctactaaaaaaaataagtattttaagcatagttttgtgttgttattcagaaagcaatacaagagtctcatttataaactggttgttttgctcccatagataaaagttctcttcatcttttatctttaaggctaggggtttcttttaattattcaaatcagtagatagccattaactgttggtagcttaaccaccagtagtgctttttaaattacagctggagaccataaatgaactgccatatttccagatgaaaagtttgaaagttgcccataatcaccattacaaagttgcttgatcaggaaatataatgtatactaatttcatggaaaaaggattaagcaaataaaaataaggggaagacagataaggcttctctgaagttgtttttcaatattcctaattaagctagtatcttccctgctttttctagatcatgacactgcagtacttactatgagaaatattctttgttagaactagaaattaatttggcaagttcgtctaaaatcaaaagaaataagttgaaataaaacatttcaaccagttgaaatgtttagtcttcattaccaatagcaggattatgttacctaaatttgtttgcttttcagaaaacaaaactcagaatgagatctatagtgttattttcccatgttttccaaaagtatttttttcatctacattaacatgattacttgtataacaccttgtcccatttaaatgtaattagtagagttttacaactgctatagcattctagcttataagagcgagcacaaggaaggagggaaaagcacctgattgctaggaaacaagcaaatctaataagcttatttaaacaaaaaaatgcaatattttaaataaatccacaagattaaaacagcttcaaactgtgtttgacccttgttggagtcagtaaagcatttttacttcatttttgttctacagtgctgctttgtctgttaagcattattttcgttaacatttttttcctgcacatttatcctgactctgactaaccaggtaaaaattaaatgataatcaggagacaaggcattataaggtgtccaggcagttcataccttttaaactccttatcttttcagaagtactttaaaagatactgtgaacctcttcatgcattcaccagcaccagaagatttcagattatcttgcaacattttctagatgtgaaagcaattcctcttgctttcatatttttctttgctattcagtgactcagagcttccacacatggatatctgaataaggtgcactgacaaagacacctgttgtggaaggtaaagaaagtacttcccacaatgccttactccctgctggcaaccacccaggggcaaacaagagttataaccgcagttcagcagcgcctatgcaccctgggagagtgcattcagcgtaaccataggtaatcttcttggttacgaagaacccttataacccaaaagaaaaggaccagaaaaaacaattttaaatagcacctagaggtgctgtacattaaactcataaaacatttacggcatcaggctataagcatgcaaaaacatttttagaaaaataatcaaaggctttaaaaatagtttaagtttacatacacagaaactaataacttcaaataattcagtccttttagaattctacacaggttcttagataaatgttttaaaaagcttctataatttataaccttcaacagattgttctaattagccacagtgactagaattattaataacatgtcatttctaaacccaagtggtcctctattgtagctgcagtgcacagattttcttgagcagggacactctaagtttgatttgcaatcttcaccttttgtcacccttaaaatgttccttaaagtttactttacttttcagagtctgggaaggaaaaattcaaggtttcgtttccccttattaagtgtactatatttgtggttccaacgaaaaacatactctttgaaaactgatgattagagaaactgtcactctaccgtcattttctccggtctcagaaataacagctacaccaataccctccaaaacttcagaagctattgtacacagtcctgtctacgaactcctgttttaccatccccccaacccattgattccctgggttgtttacacctgagtgtctgcagttatcgccttcacaccacgcaactgcattggaaaaaaaaaaaaaaaaaaaaaaaaaggcagtggtgtggagaattacctgagatcaagggctgtggtgtggacaataccatttgaagctaaaacttaccaggagaagagtatcaaaacaggcaacagaaaccagccacactcccggtaaccaaatagatggtcctcagttcaagcaggaactagctagctgtccgtccccgggcaagtcatttaacttcgctaggtttcagtttcctcatggtcatgtaaattgagagggagagaatagattcctggtttccacatgggtatagaaagtcaaaagcaatgtgtcctattcctatttcctcctatcaaataggtttatttgatagaagatatcaaataggtttatttgatagaaataggtttatttgatagaacctatcgaataggtttattaggtttataaaccctttctggatcttattaagaaaatgtttatgaataaaatatctccaatgatttttaaatgttgttctgagattttacactgaaagagtattccatactagtagctaattttgtcccaacagtcatcctcctagaactgttctttttaacaaaagcatacctgggtcatactatgagtcaaataaaccatctattctcaagtgtcaaatttagagacagccgaaacaaaaatcaagaaaagcttgaataagaagtggctatttttctattgtgttctctccaatgcagcaaagtagttgcattatgggagtagcatttttttatacatcagtcaaagcagcaagtataaaaattatctcacctcaccgggcgcagtggctcacacctgtaatcccagcactttaggaggacgaggtgcgtggatcacaaggtcaggagttcgagaccagcctggccaatatggtgaaaccccacctctactaaaaatacaaaaattagccaggcgtggtggcgcgcgcctgtagacccagctactcaggaggctgaagcagaatcacttgaacccgggaggcaggggttgcagtgagccaagattgtgccactgcactccagcctgggcgacagagggagaattccatctcggaaaaaaaaaaa

SEQ ID NO: 1793 - DNA, 4001 bp, Homo sapiens
tagtatcttccctgctttttctagatcatgacactgcagtacttactatgagaaatattctttgttagaactagaaattaatttggcaagttcgtctaaaatcaaaagaaataagttgaaataaaacatttcaaccagttgaaatgtttagtcttcattaccaatagcaggattatgttacctaaatttgtttgcttttcagaaaacaaaactcagaatgagatctatagtgttattttcccatgttttccaaaagtatttttttcatctacattaacatgattacttgtataacaccttgtcccatttaaatgtaattagtagagttttacaactgctatagcattctagcttataagagcgagcacaaggaaggagggaaaagcacctgattgctaggaaacaagcaaatctaataagcttatttaaacaaaaaaatgcaatattttaaataaatccacaagattaaaacagcttcaaactgtgtttgacccttgttggagtcagtaaagcatttttacttcatttttgttctacagtgctgctttgtctgttaagcattattttcgttaacatttttttcctgcacatttatcctgactctgactaaccaggtaaaaattaaatgataatcaggagacaaggcattataaggtgtccaggcagttcataccttttaaactccttatcttttcagaagtactttaaaagatactgtgaacctcttcatgcattcaccagcaccagaagatttcagattatcttgcaacattttctagatgtgaaagcaattcctcttgctttcatatttttctttgctattcagtgactcagagcttccacacatggatatctgaataaggtgcactgacaaagacacctgttgtggaaggtaaagaaagtacttcccacaatgccttactccctgctggcaaccacccaggggcaaacaagagttataaccgcagttcagcagcgcctatgcaccctgggagagtgcattcagcgtaaccataggtaatcttcttggttacgaagaacccttataacccaaaagaaaaggaccagaaaaaacaattttaaatagcacctagaggtgctgtacattaaactcataaaacatttacggcatcaggctataagcatgcaaaaacatttttagaaaaataatcaaaggctttaaaaatagtttaagtttacatacacagaaactaataacttcaaataattcagtccttttagaattctacacaggttcttagataaatgttttaaaaagcttctataatttataaccttcaacagattgttctaattagccacagtgactagaattattaataacatgtcatttctaaacccaagtggtcctctattgtagctgcagtgcacagattttcttgagcagggacactctaagtttgatttgcaatcttcaccttttgtcacccttaaaatgttccttaaagtttactttacttttcagagtctgggaaggaaaaattcaaggtttcgtttccccttattaagtgtactatatttgtggttccaacgaaaaacatactctttgaaaactgatgattagagaaactgtcactctaccgtcattttctccggtctcagaaataacagctacaccaataccctccaaaacttcagaagctattgtacacagtcctgtctacgaactcctgttttaccatccccccaacccattgattccctgggttgtttacacctgagtgtctgcagttatcgccttcacaccacgcaactgcattggaaaaaaaaaaaaaaaaaaaaaaaaaggcagtggtgtggagaattacctgagatcaagggctgtggtgtggacaataccatttgaagctaaaacttaccaggagaagagtatcaaaacaggcaacagaaaccagccacactcccggtaaccaaatagatggtcctcagttcaagcaggaactagctagctgtccgtccccgggcaagtcatttaacttcgctaggtttcagtttcctcatggtcatgtaaattgagagggagagaatagattcctggtttccacatgggtatagaaagtcaaaagcaatgtgtcctattcctatttcctcctatcaaataggtttatttgatagaagatatcaaataggtttatttgatagaaataggtttatttgatagaacctatcgaataggtttattaggtttataaaccctttctggatcttattaagaaaatgtttatgaataaaatatctccaatgatttttaaatgttgttctgagattttacactgaaagagtattccatactagtagctaattttgtcccaacagtcatcctcctagaactgttctttttaacaaaagcatacctgggtcatactatgagtcaaataaaccatctattctcaagtgtcaaatttagagacagccgaaacaaaaatcaagaaaagcttgaataagaagtggctatttttctattgtgttctctccaatgcagcaaagtagttgcattatgggagtagcatttttttatacatcagtcaaagcagcaagtataaaaattatctcacctcaccgggcgcagtggctcacacctgtaatcccagcactttaggaggacgaggtgcgtggatcacaaggtcaggagttcgagaccagcctggccaatatggtgaaaccccacctctactaaaaatacaaaaattagccaggcgtggtggcgcgcgcctgtagacccagctactcaggaggctgaagcagaatcacttgaacccgggaggcaggggttgcagtgagccaagattgtgccactgcactccagcctgggcgacagagggagaattccatctcggaaaaaaaaaaaaaaaaaattatctcaactcaggagagtagcagtcaagacctttttcctatatctcatattctacttgttgaatattctcatcacgtcacccataaaatcaagatcagacagaaagaaagacaaaacaactacaagagaaatatggcttaggccaggcacggtggctcatgcctgtaatcccagcacttttggaggccgaggcgggtggatcacgaggtcaggagttggagaccagcctggccaacatggtgaaaccccgtctctaataaaaatacaaaaaaattagccgggcatggtggtgtgtgcctgtagtcccagctaccctggaggctgaggcaggagaatcgcttgaacccaggaggcagaggttgcagtgagccgagattgcaccactgcactccagcctgggcgacagagcaaaactctgtctcaaagaaataaaaaaaggaaatatggtttagagggcagaaaggtcttctgcaacccccatatagatgggtagcaccctggagaaactgttcctcctgcatgactggccctcctctaatctttcatgaacattcttccagatgttcctaggtaactctatgcaaacattcacaaagtatacatgactcaatgttaaggatctccaaaatgacaaaatgttcacagtgttcacagtgagataaataactataagaaaggctggttgtggtggctcacactcataatcccgggaggctgagggaggaggactgcttgagcccagtattataaaaccagcctgggcaacatagtgagactacatctttacaaaaaattgaaaaatcagccaggcatggtagcaagttcctgtagtctcagctatttgcggggaacccaggaggttcaggctacagtgaactgcaattgtgccactacactccagcctgggtgacagaataagatgctgcctcttaaaaaaaaaaaaaatagaactataagaaagataaaattctataaatacattcttaattacagaaaatcaatattccaagcaggtttctatctactcttagcagtgtacattacaaagcccatgtgctctaagtgaggtaacaaaagagaaaatatgaatgagaaaccatagaaatatcagaagaaagctttt

SEQ ID NO: 1794 - DNA, 4001 bp, Homo sapiens
aactccatgattgctaatagagtattttcaaggttatgggaacctaacacttaagtaaaaaattaatacataccatatatcccacaaatcggtagactaagacaactgagtttggatactacagggaaaaacatttactcttaactaagttgtttactactttttgctaagattgtcccagagttttcctcgaaatttaaaaatttaaggtaaaactttttcaaggtctcagagtaattctagagctaaagtgttattacacatcagcaatagattcagataatacatgccaacacatcattgaccttgaaagtattacccctaactacaaaaagagaaacccgttttgtacctcaaaccctcatctactttgtctggcaagccctctcagtataggtaaaaactgagattctaataagcccacagcctcagacgtccaaagcacacttaactgaagttcaaaggcacagcacatcctcagttctctgcatggagttggatgccattttaagacataaatactgtctcactgcttatgactgtcacacttctttaaaataaactttccaacataaaaaaattatacatacataatcatctttctttgagccataggatgcgatataatctgcatgtttctccaataacaaagtgtccggtgcatctgacttgataataacatccttctgtggagtgccctttcaaaataaagtggtaatctcatcaatgtttacctctacaacgttcttctgccccacagcatagattcaacatacatctcaattttcacttgatttcatcttgtaataggaaaacgttccatttaaaaattgtaactaactagggaggctgaggtagaagatcgcttgagccagggaaattaaggctgcagtgaactgaggttgtgtcactgcactccatcctgggcgaccggagaccgactcaaaaacaaaaccaaaacaacaacaacaacaacaaattgtatccaacaaaaaagaacttaaatcattcaggcttcgtcttagtcacgattcaggtaattttcaggtctcagagtaattctagagctaaagtagtaataatcaactttagattcagaatacatgccaactcatcattgacccaaaaaattaccaccagcatttcttgttgttcacttttcattcaaaaagataagtaaaaaataaacaccatagaatatcaaagcttatcatttcaggacaacttacggtttacatgtggcagaaagcatatttttaaaaaataaaaaaatctaacccttaacttgcaagcgaattcttgcttaatcaaatgcaggtttcaaagcaccttctaagtaccccaaaagttgttcaaatgtattaaataagcagttcctttagctccatcttctccacctttaatccgagtctctgtatttgcagaagtccccatgtgatgcggctctagttcttttcgtatctatatcttcctcattgagagtacactgcagtcactataacaggtcatgaagattaccggaagtgattaagtaccgaattttcttctgatcccattaaaaatcttaaagcgagaccacatcactaacgattttaaagaaatctttgacaccccctctccaagaaaaaaaaaagccaccaatcagccacagctttttagaggggttcagaaatcgggctgctcaactcttaacaggccctccctacagaagaaggcctggataaaattagaagcggcattgcccgcgaggtctgcagaaaacgctgagtaatatttcacactcaaaaaaccttccaaggcctgtgtcctaaccattctccagcaccaggaaaccaatcctaaggtgaccagtgtgcttaaccctactccaccctgtctgctaccaacccatccggacagcagcgctaaactcacacttaccatgtctaacagggaaaggagagagcagggtcagttcctgggtagacttaggagccgggcgcctgcgcagatgcgcctctcaggcccccatcgcgctccgatatagctgaccacactttcgcctgcaaggcagagcagttccacggctgccgtaggaccccactgatcgctcataggtgtcctcactgcctgcgtccaaagtcctgcgaccatatgcttgtcccatagtcactccgatttgtctagaaacagttttaaataatatttaaatatctgagttgcttttaagaaatcatttgttctagctggacgcggtggcttacgcctgtaatcccagcactttgggaagccggacagcaggattgcttgatcctaggagtgtaaccacccaatattgtggttcactttgcctgctgctgaccgatagcccatttatcaagacaggggacttgcaatggagtctccccaagcagtattcagagtttttaaagataattcggcgattaggggcttgggaagtagggagtgctgatgggtcaggttggagatggactcatagtgggtagacgtgagtttttcttgctgttttctgttcctgggtaggatggcagaactggttgagccaaattaccaatctgggtggtttcaactgatccatggagagcagggtctgcaaaatatctcaagaacttatcttaggttttacaatagtgatgttatccccaggagcaatttggggaggttcagaaacttggagccagaggctgcatgacctctaaactgtaatttctaatcttgtagctaatctgttggttctgcaaaggcagactggtccccaggcaaaaaagcggtctttttgggaaagggatattatcaattttgtttcagagtcaaaccataaactgaattcctccctaaattggttcagcctaggctcaggaatgaagaaggacagcttaaaagttagaagcggccggtggctcacgcctgtaatcccagcactttgggaggccaaggcgggcggatcacgaggtcaggggatcgagaccatcctggctaaaaccccgtctctactacaaatacaaaaaattagccgggcgtgggggtgggcgcctgtagtcccatctactcctgaggttgaggcaggagaatggcttaaacccgggaggcggagcttgcagtgagcagagatcacgccactgcactccaccctgggcgacagagcgagactagtctcaaaaacaaaagttagaagcaagatggaatccgttaggtctgatttctttcactgccataatttcctcagttataattttgcaaaggcggttccaggagatccagaccagcctgggcaatgttgcaagacccccgtctctacaaataataaaaatatgagccagacgtggttgcccaagcctgtggtttcagctactggggaagctgaggtgagagaattacttgagctgtggggcagggggtggaggctacagtgagcggtgataatgccactgcactgcagggtgtgagacagaacgagaccatgtctcaaaaaaataaatcatttgttcttgaggccctttgcactctgaaaatctgaaatggctgttaattagtagagtgcctgcttacacgtagtaagtgttcaatgaatattttttaaatgaatattaatgaaatgttcacatttccttcctgtttgccttatctatctcaaggtccagccctgtacccgccccctctcctcgccacacacacaggccaccctccccaccaccaccaccgccaccacaaacacttcttcggagagtgctaatagtaaaaatattggaagttactttttttaaaaaaattatactgtaagttctagggtacatgtgtacaacgtgtaggtttgttacatggatatacatgtgccaggttggattgctgcacccattaactcatcatttaaattaggtatttctcctaatgctatccttcccccctcccccaacaccatgacaggcccctgtgtgtgatgttccctgccctgtgtccaggtattctcattcttcaattcccacctatgagtgagaatatgc

SEQ ID NO: 1795 - DNA, 4001 bp, Homo sapiens
caacccgcggccggcatatggctcagaacggctttgaatgcggcccaacacaaattcggaaactttcttaaaacattatgaaaaatttttttttttgcaatttttttttaagctcatcagctatcattagtgtattttgtgtggcccaagacaagtcttccaatatggcccagggaagccaaaagactggacacccctgttttacacaatagcaacctgcatctcatggaggttaaataactttttttttttttttttgagatggtgtctcgttctgttgcccacactggagtgcagtgactcaatctccgctcactacaacctcggcttcccaggttcaagcgattctcctgcctcagcctcccgagtagctgggattacaggcttgtgccaccacccccaactaatttttgtatttttttttttagtagagatggggttttgccatgttggccaggctggtctcacactcctgacctcaggtgttccgcccgcctcggcctcccaaagtgctgggattacaggcatgagccaccgcgcccagcctaactgttttaatgttaatgaatgatagtcaggactcaattccatgtatgtttcaattccaagatccatgttctttccactgactccataatgccactaacttcgtaaaattaattgagaactctactcctaaaccttgaagtcttaaaagaaccccgggacctccaccaatctctagatcaaaagtcatcaaaatacctacaaaacaacagacacagattcccttttttcctcctttgatgaaaggctgttttggacgaatgggtacctcttgctcttctactagacattacacttcaccatctgttcaagcacgtgaaataataaaatgatctgcatatttttagaaataattttgaatgataggatgtgtctatggttgaaatgacattatatttgcacttcaacacagtttaccgaaataaatttttttttcaactttctcacttgcgatgatggtggtaggaagggtattaaaatccctaaactgaagggaaaaaaaaagtttttcttcgaaatttacttccaggacgtcagggatctactgcacttgaaatatgattcatctggaaaaccacaggcttccagtgcctcggtaaagtgggtaggttaccagggttattttgccgcgtccccaacaccagttgttcctggggatcctctgtggagcagataggtgcccgtcataaatgagacggtgaattcaggactggcgggtgaggtctaaagtgggaaaggaacccagcaacacccgcggtgagcggcggccgagaggcacctgccgggtcctgcaagctggcgggagctccgagagccggaatggggcgcctcccttccacgcgcccgcggagcaccggccttggacggcggcggggcgcacggcccgcgctcgaagcccccccgggggcagagggccgggctggctgggccgggtggcccagggaagggttcccgcggcaaaagatgccggggcgggacccggttccctccctagccttcagcggccccaggggcggagcctcgccgagctgaggcccgaggggcggggcttaaggccgcgcgaggagggcgcggttgccggaaattgaagagccggggttcagattctgactgcggcggctcgtcgggggagactgtgggtgtaaacggcctccaacctgcctccctacctgtcggcgagagaagagagcggtccctggctgcagcacccgggagccgcaacgctggcacagcaccgccttccggtttcggccctcggctgacactaactcgctcggctgctccgctggttccatcgccgctgccgccacaggctcctcagccacggctgcgcagacgctgtctctgctggctcgttattcactgcgctggcgcggcttggcagaggcggggcggcgagcggacggtcactatgtctctgcgcaggcgcccgcttccccgctctggactctactgcgcaagcgccttcattcattgcctaacctaagtggctaggtgtcggcaggctttgtgacagggacacttcttggcaccagtgacacatctccatacccacctggccactgggcttcacttaaaacctagacaaatcattaggttgaccttactgtttagttttctgggatctgaatttagtctcctgaataaatggggacattattgggggcaatatgaagggaatctgggtcggacttcccatcaagttttagccacattagcttcttctataggaaactacttagaggggcatgtatcttttcggtattggaaaaagatgcgtggaaactttaattgctggtctcttctactcattgtgaccatttactatgcggcaaaatgtgtcaaagcgcctttagaaacttactaaatcatcagtttccttacggggtcggcacgcttgtgcacaaaatgagaaaggtaaagatcagaaaggttgcagcacaactctaaagccactgctcttaattaactaggattgtcaggaaagcaagattatttcagacagaacagtattatatatgaacaagggtgagaacaaatttaggaatggttagtagaccactgtggctgacccacattacacgtggggagaagtggtagtagaggtaggtaaggcagagtgggcccagagctccatggctttaatgtcatgctaaggaatttaacattaataacatgaacaatgggaatctgtggaattttaggccagaaataactgttcgatatttactgtctgctgtatgttaagcactgtaatgatcctatctgtgcttcagaaagataacctatgaataaatagaggggctagattgaagagaggaaaaagagtagaggtaaggtatcaggtagctattacctcatcagtctagctcagaaaggccctgaagctagcagagggaacaaagatatgggaatggacttgaaacaattaaaattgtacagaacttagaaactagctggatgtctgtattgtgatgggggtgacacaaagcaactgctggttttcccaggttagataactaagtagctggttgccagttatgggagcttaaaaaaataagatgaaccaccaaattaggggtatctctgtgtatgtatgtgagcacatgaaagtgtgtacgattgtgaagagtgaaaaaggagctgttttacgtgttgatttttctgtagaacataccattgtggcttcagtgtatgaactatttgtgaagttggtctgaaactcattagtcagcactgaagacagcataggagccatcagtccttcaccctcccctggatctcttcctgagataggaaaagtcacgttttataggctttggtttaattagcatgcacaatccatctgccaaagttggtaggcatcttttaaggaaaataacttcctcatgtggctcctccttccttttgctctggaagcatcaggactgtttcagttttgcaggccttccgcatagctgtttatatcacatgccacaattcaaagcaaatggaaaaaaggactggtgtgactgaaaccctgaaattcaagcgcgtgctaagtgaattcaagatcttttctgtattcctttttcaagtaactccaagcgtcagaggggctaatgaatatggcaaatcaggtaaatattttactgatgagaatctccaaagtgtaaagtggctacctcttacctgtgtctaacatagaaatagcggaactagttggcaaacacacaagatgaacagcttgaagagacaggagctacggctgatccctacatctttccctcccaaatatctactaaaggcaatgttggttagccacaaactctcggcatttgagaccgttgatttttaatattttcttaaaaaaatacaaaggaaattaactctgtaggtcaatacaactcagggaaagagggaaaaatggaatttcagagcaaaggttgtttaggttatcacattcccacactcct

SEQ ID NO: 1796 - DNA, 4001 bp, Homo sapiens
cttcactccaaaagctccatggaatgatggagcaaccaaacatttcgctgagtttccaagaggcaagaatacagctgccttcaactcccaggccactgaggccactccccactcaggccacccatggctgtgaggacactggcactaaaagcatcttcagaagcaaccagcaactgacagcagacccagatgcagagaatgctgccccaagttcaagtctgagacccatgtacatggcaagggtcagccaatgtgcctccttcacaggtagagaagccccttgcacaccacggtacaactattgagcaagccccatcaagccattaggcaagaacacacttgtaccagcttgccaggatatttgaagcctcagtgatcctgtaagacacacctgaaacaaacaccagcacccctaccccacaccttattcacacactgctcctgccaaaaagtgccttctagtccttgcgtagctgatcccttccttcaaagttccagtggccaagcccccacttcttgaactgctcttattctctgaagtccatgctgcactgtcctatttattttggtttacataggtcctgcccacagccagccccaacaagcctccaaaacaggaagcagagcccagggcccaacctaaagtagaatatactgtacttgagtatgagcaaggactggaaggacacaacctgtcagatctaggcccaagtgagcccaggactccaaggtaggcccagaacactctactgttctgtgacactgggcaggggacaaagagcaaaagagccagctgctaattgctgttgtgtagcccttttttccaagcagagtcaaaaggtccaatccaactggctcttttgcttatcttttcccaccaggaaaactgaggctatattagcttctagtgactaccctgaggataaagattttactaatcttgttcaatgcctggcacatagtaagtactcactaaaagtttattgaacatacaaaagaggcatctggaattggctatgtaaccctagaaaccaaatcctggcttcttttctgtccaaacagctctacccaccttccctgtccccttgagtgctcaccactaggccaggttgccagtcttcatcatcacaggacctgccttcaggttttctcttggccagctggctgggagccaagctcctcctctgtaaagggagaacagaaacagtgcctgcaaggatcctgcagcctaggcctactagaccctgacccagggctattcccagtctcccctaggcccacacttaccatcctgggcctaggagtttaaaacgtcaagtacccatgagccaaaggtcaaaagcaggcagcggctaagagtgtaggaccagggtctaatctgtagagggggctgctacattattgagaggaccggctaattaaagagggggcatggatggcgggaatccatccaggaactggtgtttggaaccaaactgtgagagtggccgtccccaataagccgagacgagagattaggccaaagaggaagagaccaagcagagattagtgtgggattggggaggaggcaggtggagtcccagactgggcggagtggagtggggatgatggtcccagtccgggtgaagggaggaggtagttgcgcggcggggcggggtgggattgggggtgggtaatcactggccaggagagagaagctggggtgaaagtccgaggcccgggtggggagggcgagtctggagaaaggaaatttcccagggctggaggtggaaaccaggatcagactcagggaggtcgagcaggaagccacgcgggcgtgtaaaaaacccaggttaggaggggaataccaggaggggctgaaaagagcgacagagatagacgcagaccccagcacctctctctcaaccttcctgttcccaaagcgcgcgttaacagccgccaagactcaccgacccgccaagaccgggtcaatcgaacctcccgccgcgctgccgtcgtatcacccattggctgcgttcgatgagttcggcgctcgcgacccaaggaagaggcgggaatagtgctgcgcccaatgaggagtctgggctctggagctggagaagctaaattgacctactaggaggcgtgacttagatgggagggcggggccaacagaggtgggcggttgggcgagaagagaggggcggggcgggggcgggggtggcgggggaggggcggggccaacagcgaggagcagttgggcgagaagagcggggcggggcgagaagagctggacggggcggggaggggcggggccaacagtggggagcggttgggctagaggagcggggcagggctagaagagctggactggacgcgacggagcggggaggggaggggcggaattactacctgcgagctggaattcggcccgtctcgggtgtttgtcccaggtcggtgagctgtggtcccgcagctatggaagggaagatttacgccacattgagcagcaggggagttaccacctgtagtggacagctggggattatgaaaggcggcacatttctgggagtttggattgaatctacagtggtaccaggtctagagcggagggccggggttggagtcaggcctcgcccacccagaaagtggggagaggcattcggcccagactgccacgtggcgggctcgggcaatgggagcccccggatgacgcgactttctcgctcaggggtgtcttgaaagaagctgccttcctctccaaggccaaaccgcgttggaggaagcgttgtgtttggagtcagagatttaatcatccaatctctcaaaacgtcagtttcttcatatctaaagtggcattataatagtacctcccccccatggctattctgacaagtaaattaatgtgcgtaaagcacccaacagtggcatgcacaacctaggtactcactaataatgataagggtgtatttatagcatttaccaccaggcatttctgagcttctaagatataacagttcatgtaatgctcatgactatgaggtaggtttatttttgtccccattttgtaagtgaggaaacaggcctagataggctagtaacttgtacaaggtcacacacctgagtatagcttaagccatcctcacagggttatcaagaattctgaggtcaggcatggtggctcacacctgtaattccagcactttgggaggccgaggcaggaggattgcttgagcccaggacttccagatcagcctgggcaacacggagaaaccccatatctacaaaaaaattagccaggcatggtggtgcacagctgtagtcctagctattgcagacgctgagcttggaagcatcgcttgagcctggaaggtcaagctgcagtgagccaagatcgcgccactgcactccaacctggacgacagagcaagaccctatctcaaaacaaagaattctgggccgggcgcggtggcttacgcctgtaatcccagcactttgggaggccgagacgggcggatcacaaggtcaggagatcgagaccatcctggctaacacgtgaaaccccgtctctactaaaaatacaaaaaattagccgggagcgttggcgggcgcctgtagtcccagctactcgggaggctgaggcaggagaatggcgtgaacccgggaggcggagcttgcagtgagctaagatcgtgccactgcactccagcctgggcgatagagcgagactccgtcccaaaaaaaaaaaaaaagaattctggagagaaatatcgttttaattaagtattaatcggttgggaggctgtggccagcggatcactttaggtcaggagttcgagaacagcctggccaacatggtgaaaccccgtctctactaaaagcacaaaaattagacgggcgtggtggcaggcgcctgtaatcccagctactcatgaggctgaggcaggagagtcgcttgaactcaggaggggaggttgcagtgagccgagatcgcaccactgcactccagccggaacgacaga

SEQ ID NO: 1797 - DNA, 4001 bp, Homo sapiens
ataaatacactgaaattgtttatcccaaatggcattaatgcccttacattttgatatttagatctgcctcaaaagacctttgaagctacatgataaacttcatgcctacaaagcttgagttagaggttatctttgttaaaataatactgtttggatgctcagttttggaagtttcctcataattctaaattaagatatttagccgtaagagtaatacacttatgtgtatgattctatagcacttgttctatagcacttgtacaagcataatgatcttgagtggaacaggctttataatgagcaagctatgatctgtctaacagcgatactctgcaaacacgggctgaaaagtttcctaaaattctgatggtcatcttcaaagaaacttgaacaggaatcgatctaatggtggacacagaaaaatacccaagtcaactcatgaacactggtaagaaaaggctctctatagcaactaaagtgttggggaaaaaaaatccagggagcataaacgataaagctcaattaactgctgcttgtgtgattccactttatggtcttaaatacacagtaggcattagatatttcttttggggttttttttttttaacagaaatttagtatttcaattgcccctcctccacagctaacatcagtgccctttcttcctcctcccttacccctcccaactcaaacaaattaacatttgtactaggtacctcctatcagctcgcagcttcttcccaaacacgcccacgtacactgaaactggcttgcgtctacacaacacacagctacaggaaaagagcttcgaggggggagctggggcggggggttaataattcgctccgcacaggtttacggctattttccagaaactagttcctcgctcgtggctcgcgtttcttccaaatcacctcaaaagcacggtgtttatgagcctacctaatccgatactgcaatggaattccggatatttgcagacagatctcccggctttgcaagtgtttgatgagatacgttcggaatctccttttttttctagagcccggttccaggccgtagagcaagccgacctggggctgcggcccctgccccacacccggcccgcgcgcccggcccgaggccagcacaggacgcagcccctccggggccggggctggcgggggccgctcgggctgcgggccgctctgcaacaggtcaccctgaccgcgactccgcgggttcgcgggcggccaactctgcggccaggcttctgggcgcagccgccagggccaggggagggggtgtggcccggcttctgctggtcctggctccgaggtccgggatcgggctcacctgaaggaagactgaggcgccgctgggcgccagaacagagcgggcggaggctgggggcttccgccacccaagagggagagcgaggcgggttcaaggggtcgcagcgcccccggcttcaggacggcgcccccgagcggggaccccacggccgctccgactctgagaacccgcggccgagggaggcgcgccgcccagcgcccttctccctcagcctcagccccagctccgcagccccctccctgcgcgcagggcgagcagccccggggcccgcggccgggagagccacactccgcagcgccgccgccgccattccccgcgccgcccggggggcgccgcgtacccaccctccctccctccctcccccgcaccgccccgcggcctgagcccaccgacctgtgcagccgcggccgtcgcctcagaggacggaaagacgatgccggcctcacgcttcaccgccacggccgccgccgcctagagtagcactcgtcgacccgaacagtcaccgtctctcattcagcgcccgcagcagccgccgccgccgccgccgctgccgctcgggggaggagagtgagctggaaccaccccgtccgcgccaggggtgggggacgagagcggacctggcgggggcgcgcgccaagcgggcggggcggagccgcgcgcgcgcgcgcaccaacggagcgcgctcgcgggggctctgagagctgcagccgtcagggtcttaacctcgcgcttcccgcccgcagcttttcggccccgcggagcccaactgccgccggtgatcggtgcccgcagcgcgcgcagccatccgcaaccccaccgcccggcgcctgctgaaaggaggggctcccaccggccaaacaacgggggggggaaggggtaggaggatggacaggtggggcgtccgccaccgcctggccacccgctcccggaacgcggccctctgtgaaatccgccgtgatgtctgtggccttcagcgccgggctcttcacctttaaggccagagaacaaagtctggaagcacttggccccaagatcaaatatccagcccacgccagcggtgtttttagaagtcactgaggacaaatgagggggctcccaatgtggagagtcaccccactgtcttagataaggtcataaattatggtgatcaacatcctcacacattaagattcgggaagtgttagaagtaggcctttgtaagatgttacgcagggtactacccttgacttaaggagcaaatgacagaaattgggcggaaaggtgttgtttcagagtctactaaatgggtggcctacttaaagctagcaccatttgatgcagtgtgactgttaacggaaggttttaagtgagccgcctttgtatctgctgtcattagaccatttggaaatggataattatttgatgatctgcagttctttctctaggcaatgtgcagtagaatgtggaaagaatactatgtaccagcattaagtgtaaaacatgaaaggaccaataattcactattcccatttggtttctttcttccctttaataaccgctaaacagaactgattaatcttgaacgttgaagattgctaattatttcctcctttgattgccttctgtcatagcccttttactctagttggggacgctagaatgcccttcaacctccttctctcaaatagggttactttaaagcaccccaacgcaaagttaagtcaaaaagaaaaacagcgaggataggcaacaaagttcgtagtgtttcatttttattccattttactttcaaagaaagtcttgaatcatgacgaaatcactagaagaagtagagcaatcaaaagaagaaaaaaagcgttcccccccacccaatatttcaaatgacaagagtccaaaaaagaaaagaaaaaggaagatgattggtaaaaaggagggaagtgcattatgtatacagaaagttttcgcatagatgttagttgcttcaagtcccaaataaacaacaactaaatgaattagcacttggaggaaaaaccccttccagttattgagttgggtaaatgtttagtcttcttaaagtgttactaagagattaaggaaaatgtcgttggctatatgccaacaataatacatgcaacatacataccattatcacacataattaactgctcttaagaaatatgaaaactgaggaacggaactcttatgttgttaaatgtcatacaattacttgaaacttgaattagggtttcatagatataaatgaggcagggtccctacatctgccaataattttcacagcttattgtaaaagcagtgaagttttcacttggactttgaaaagaaaaaaacatatgactcatgagcaaggccatggatacactaaattcttatgcctactgaatttgagtttgaataattaccccaaatctgtttctcacattgataacttataaaacaatacttttattaaccttaagagttgtgttaagttcaaatttgtgaacttggtaagattaagaatttgtatataggccgggcgtggtggctcacacttgtaatcccaacactttgggaggctgaggcaggcagatcacctgaggtcaggagtgcaagaccagcctgaccaacatggtgaagctggtcgctactaaaaatacaaaaaaattagccgggcgtggttgtgggca

SEQ ID NO: 1798 - DNA, 4001 bp, Homo sapiens
agatcaattaggagattaataatcttcacttctaacctttttcagtgattgcaaaattgtgtatctttctgctgttgggcaagtagtttccttttcttcccatctattaaaataattaaatgaacatgtgcatatacaacattttctttcttttggaatatttccttgggattcattttcagaaggactacaggaacaacgtatatgaatatacctgtcttctggggtatattaagtgtagatactgtccttcttgaagccatacaaaaagtgaacaaaggcttttgagctgttttaatatggaactgtgtaacactgagggattccatccagttcacttctaagacataagttcatggttggcctcagagggtccctaaaactaatgcaaaattttgtgaataaatgcctattaactttattctggggagagagtttatatatttcatcatattctcaaaggtgtcagtggcctagaaaaggttaagaattactatcttacaaactggaaatggactgcagtatcctaatatagggtacctctcaaaaggacagaagatttaataactagactcatctttgtaatcattcaattcattcaacaaatacttaacacgtatgatcctcaatacctaacagctaatcgtatctgaagtaggccataatttaaaacaccaagaaaactagacaggattcactgaaatatcacgctacaaaagaatatcgaactatatgatttcaaaacaacaatgttataggaaagcataataaagacagaaagtctggggcctaatttaatgcttattatgtcaaagtatcacagaaataaattacatcacaaggaaagaaaaactacacataggcatgtccacccccacacattctgacaggaaacccaaagaaagtttccaaatcctgtttccagcagcatctcttctgagacggcccttcatgcttttgaaggtaggagccccaagttaaatctaagagctgatactttattcttactgtaatcaaaacaaaaacatcatccgccacctaagaagagtggctggctacctgtagggctgtggctcattgaccttctgctctattattctatttcatttcttatacctcctcccttcaaagaagtaacaaaatgattttccctcccaaaacagaatgcattactcctcaatggcagttctttttccaagaggtcaaaggttccctaaactctggttctcagccctaagaggagatcccattttgtaggcacaaatgtcttcctctcatcttctccccgtagcagtaaattacacaactcggctgaagacaccgtccttaacttcctgattaagggggcaagagatactcttaccaagccgctagtttgaaggataacaagaatcacaccgtgacctcttccctaacaaaattcagggaagaagcagagacccatgaaaagtaacactgaaaaggcgaacacatggtaagctacggaagacatgagggtaaagaaggcgggaaaggggctggaaggtggagtgggatgtagatgtcagccctattaactgggggaataaaggaaggaaagggagaccctgaaccctgacagaagtgagcccggagacagcaatgctccagtctacccgcactcctacagcagaggacagagaattcacccaaccctccaaccccgttccccgtgtgtccctcccccccgcccccgcgggcccaaaagggagagctgggtttgaaggaagctctgaccctagacaggggacatgcaagaggaggaaggcagcgatgtccaaccttctacttctctcaggcagtgaggtacgagggcaccgtgtctggggagacggcgagggaaatgggcttgtgctatgacacctcggggagctgaagggtgggggacacaatgtcctctttctctcccacagccggccggggcccctcccgacggtctcccgcaggcctacagtcgaccgggtcggtccgcgggcgtggttggctctggccctggcggcggccgggcctcccagatctccggcccctcccgccggccaggcccccgggccgccgccccgacaccgatggaacgcggaggaggaagggggagccaggcgactgaccggcgacatgagccgcctcaccctcggctcggccgacccgcgccccccgctccctctggggccgtctggagctccccgccccttactcacccccccggtccggcgcctcctccacctcctccacctcctccacctcctcctcctcctcctccctcctctcggccgtggctcctgctccggctctgcgcggcgacagcagcgggagcggcggcggcaggggcctcgggagcggcggcggcgcctcctccagaacgcgcacgcacgcaccacgcaggccccgccccctggttctgccccgcccctccaagttggcgatggctgggcttcggccccgccttccccacggcgttccggagtccgcttaaaggagccgcgcacactggagccgggaaagcctggagctaccgggaaggggcggggagttttagctttgcgtagggcgggatgggaggtgggtaagaccggaaaaaagatgaggaagggtccaaagattcaagaagagaatttggagggaactcaatcattcgacaagccctaattgagcacctgttaggttccaggcgctgttctaactaagcgcagaggtttaaagtcatagacaggcaaagaccctcttgcagcttgcatgctggtggagtgagagaggggagacagacaacaaacaagtgacaaaaattgcaggtagtgataagtggtgtggagaaaaataaagcagaggatagggtgactttacacctggtgagatactgcctctcaaagaagacctttgagcgcatacacacgggatgaaggaataagtcttgcaaacacgcgggcctggaggaggaatagcctttccaagctgagagaaaatcagccataaacccagaggtggggatacgcctgccatgttgcagaaacagtgaaaggccggcatggctgagcagcgtcagccagcccgagagcagtaccagctaggcttggccagatccagtgaagcctgtgggccattataacaggaacgggaaaccatgagagaagggtgagccgaggaatgaccgcatctgattcatgttgttaaaagttagtcttgctgatgtgtgtaaaatacacaatggagaagcacagatgtccttgggataccagtaaggtagcttggactaactagcctggcagccacggacaggatgagaagaaggctattttattttattttattttatttagatacattttgattggaatggatttggatttggggcatagtgtgtgaaagaacaaaaagaaatcaagagttgattcttaggttcgggcctgatgactgagttaatggcggtgccacttaatgaaatggaggagcagatttggggatggggaaatcaagagtcttttcttacacatgttatgtttaaggtgtctgttatacatccaaatggagatattgaataaacaatcgatatatgagtctagagagatacatttgggattcattagcaaatagatactttttaagtcttaagtctagttaggatcacatggggaggggagatagctgaaggaaaggaccaagaggcactccaacacttgaaggttaagtagaaaaggaggcgctaccagtcagggcaggagaaacaccaagagaaggtgaagcgttggaaaacaagataattgtttcaggaaggagagagtgaagagtcttatcagatactgctgaaattagtaagataaggactgagaatttgaacactggatgtggcctgatgaagttgctgatgaccttgatgaaaacagtttcagtggagtcataggggagaaagtctgattagggtatgttaataggatgggaggtgaggaagagaaagtgttctaaacagctcttgagaggctttgctttgaagg

SEQ ID NO: 1799 - DNA, 4001 bp, Homo sapiens
ctcagagggtccctaaaactaatgcaaaattttgtgaataaatgcctattaactttattctggggagagagtttatatatttcatcatattctcaaaggtgtcagtggcctagaaaaggttaagaattactatcttacaaactggaaatggactgcagtatcctaatatagggtacctctcaaaaggacagaagatttaataactagactcatctttgtaatcattcaattcattcaacaaatacttaacacgtatgatcctcaatacctaacagctaatcgtatctgaagtaggccataatttaaaacaccaagaaaactagacaggattcactgaaatatcacgctacaaaagaatatcgaactatatgatttcaaaacaacaatgttataggaaagcataataaagacagaaagtctggggcctaatttaatgcttattatgtcaaagtatcacagaaataaattacatcacaaggaaagaaaaactacacataggcatgtccacccccacacattctgacaggaaacccaaagaaagtttccaaatcctgtttccagcagcatctcttctgagacggcccttcatgcttttgaaggtaggagccccaagttaaatctaagagctgatactttattcttactgtaatcaaaacaaaaacatcatccgccacctaagaagagtggctggctacctgtagggctgtggctcattgaccttctgctctattattctatttcatttcttatacctcctcccttcaaagaagtaacaaaatgattttccctcccaaaacagaatgcattactcctcaatggcagttctttttccaagaggtcaaaggttccctaaactctggttctcagccctaagaggagatcccattttgtaggcacaaatgtcttcctctcatcttctccccgtagcagtaaattacacaactcggctgaagacaccgtccttaacttcctgattaagggggcaagagatactcttaccaagccgctagtttgaaggataacaagaatcacaccgtgacctcttccctaacaaaattcagggaagaagcagagacccatgaaaagtaacactgaaaaggcgaacacatggtaagctacggaagacatgagggtaaagaaggcgggaaaggggctggaaggtggagtgggatgtagatgtcagccctattaactgggggaataaaggaaggaaagggagaccctgaaccctgacagaagtgagcccggagacagcaatgctccagtctacccgcactcctacagcagaggacagagaattcacccaaccctccaaccccgttccccgtgtgtccctcccccccgcccccgcgggcccaaaagggagagctgggtttgaaggaagctctgaccctagacaggggacatgcaagaggaggaaggcagcgatgtccaaccttctacttctctcaggcagtgaggtacgagggcaccgtgtctggggagacggcgagggaaatgggcttgtgctatgacacctcggggagctgaagggtgggggacacaatgtcctctttctctcccacagccggccggggcccctcccgacggtctcccgcaggcctacagtcgaccgggtcggtccgcgggcgtggttggctctggccctggcggcggccgggcctcccagatctccggcccctcccgccggccaggcccccgggccgccgccccgacaccgatggaacgcggaggaggaagggggagccaggcgactgaccggcgacatgagccgcctcaccctcggctcggccgacccgcgccccccgctccctctggggccgtctggagctccccgccccttactcacccccccggtccggcgcctcctccacctcctccacctcctccacctcctcctcctcctcctccctcctctcggccgtggctcctgctccggctctgcgcggcgacagcagcgggagcggcggcggcaggggcctcgggagcggcggcggcgcctcctccagaacgcgcacgcacgcaccacgcaggccccgccccctggttctgccccgcccctccaagttggcgatggctgggcttcggccccgccttccccacggcgttccggagtccgcttaaaggagccgcgcacactggagccgggaaagcctggagctaccgggaaggggcggggagttttagctttgcgtagggcgggatgggaggtgggtaagaccggaaaaaagatgaggaagggtccaaagattcaagaagagaatttggagggaactcaatcattcgacaagccctaattgagcacctgttaggttccaggcgctgttctaactaagcgcagaggtttaaagtcatagacaggcaaagaccctcttgcagcttgcatgctggtggagtgagagaggggagacagacaacaaacaagtgacaaaaattgcaggtagtgataagtggtgtggagaaaaataaagcagaggatagggtgactttacacctggtgagatactgcctctcaaagaagacctttgagcgcatacacacgggatgaaggaataagtcttgcaaacacgcgggcctggaggaggaatagcctttccaagctgagagaaaatcagccataaacccagaggtggggatacgcctgccatgttgcagaaacagtgaaaggccggcatggctgagcagcgtcagccagcccgagagcagtaccagctaggcttggccagatccagtgaagcctgtgggccattataacaggaacgggaaaccatgagagaagggtgagccgaggaatgaccgcatctgattcatgttgttaaaagttagtcttgctgatgtgtgtaaaatacacaatggagaagcacagatgtccttgggataccagtaaggtagcttggactaactagcctggcagccacggacaggatgagaagaaggctattttattttattttattttatttagatacattttgattggaatggatttggatttggggcatagtgtgtgaaagaacaaaaagaaatcaagagttgattcttaggttcgggcctgatgactgagttaatggcggtgccacttaatgaaatggaggagcagatttggggatggggaaatcaagagtcttttcttacacatgttatgtttaaggtgtctgttatacatccaaatggagatattgaataaacaatcgatatatgagtctagagagatacatttgggattcattagcaaatagatactttttaagtcttaagtctagttaggatcacatggggaggggagatagctgaaggaaaggaccaagaggcactccaacacttgaaggttaagtagaaaaggaggcgctaccagtcagggcaggagaaacaccaagagaaggtgaagcgttggaaaacaagataattgtttcaggaaggagagagtgaagagtcttatcagatactgctgaaattagtaagataaggactgagaatttgaacactggatgtggcctgatgaagttgctgatgaccttgatgaaaacagtttcagtggagtcataggggagaaagtctgattagggtatgttaataggatgggaggtgaggaagagaaagtgttctaaacagctcttgagaggctttgctttgaaggagaaaagggcagtagccagagaggtacttgagatcaagggaggatattttaagatgagaaatgctttttctcattttagtatgctggaatgatttttttttttttgaggcggagtcttgctctgttgctaggctggagtgcagtggtgtgatctccgctcactgcaacctccaactccctggttcgagcgattctcctgtctcagcctccaaagcagctgggattacagtcatgtgccaccacacctggctaattttgtgtttttattagagacggggtttctccacgttggccaggctggtctcgaattcccaacctcaggtgatccacccgcctcggcctcccaaagtgttgggattacagg

SEQ ID NO: 1800 - DNA, 4001 bp, Homo sapiens
agcatatcacacccacctgcactgcaccaccctcccagaggggctggagaaggtcctgtttctaaggatgcctgatgcagtcactatcacccttaggctgcagtcgcctgactgtcagattagggacatgggaaggcataggggttaaagagccaggaaaagaggcaggactgggggcagtggggcagggggcagggctgtggggtgttagcaggggtggggggacaggtggagtaggacagtgactacagcagcttggatcatggcaaggatgtaggggtgcggctggggctagcttagagcctttctaggcaggatggaagtttgctggatatctatggtttatggtgggcagaaagaacatcacccccaaggcccgtagcctgcctcaatcctgaagctgttcactcatatccacccaggaagcaaatgtctgcgaatctgggaggagatctaggaggagcttccccccaccctcaccccaacacacgtaccctgctccctaagacttcaggggtaccccagactttgtctcccccaaatccacccagatccagccccaggacgcatgtgtgggtagcactcccgccccgcccagattctcctactgccctctgagggcaccttggtgccgctgggggcaggggctgagcagctgttgggacaacaaacaactcgcctcctgcccagaggtaagaaggggatgaggagggagcccagcccaactctgccagcaagaggacgtcctccgcagggcagggctgggggctcccagggacagctgatggggaaggccgactctgcagacagtgaggtcagagaagccaggacttgcccaaggtcatagaacaggacccagcctgtgagctgcccgtgttggctggccaggaagctcagggcctagcccaggctcctctcatcacctgacagctagcaagaccccatatggaagggtagcctctggcctcccaccccaccccaccctctgctggggtcacctcagaagttgagcgtccacaaggggaaggcagcttggacacaatccccatagctcagagaacactgaccatgcccacacacaagccccagcgctccacaccccaaggtgggtcccatgggtccctatgaccactgggaggtagggcctggtgaaggtcatggagccgcttgtctggctgggcaggggctctgagcccactctgtctaacccatcgtccctccaatttgccaaatctccgcaacaggcataaatccccatcccacctctgcaccccttgaccccaagatgaacctgctgccactctgacctcctccaggcctccaagcccaggcagccagtggcccagggaggaggaggttcctgagagccaggatgcaggaaggagggcagcctggtgcccagggtgggcaggacctgctaagggcttctagagtccctttatccagagcgtcactgaggggcccaacagctgcagaggcaaagtgggaggtccagcagaacctccccctgacctgcctgcccctactcccacatacctatacatgtgagcagttgcgcacacacgcatgcacacacacgcgcgcacacacaggcggagtagccccgcagccccagtcacatgcataagcgccactatcatgtgcttagacacaaacacagcaatgtccaccctgcactcacctccccacacatgcacatggacacgcaatgggaacacacacagacacagaaacagaaacacacacacacaggcgccacagcacgacagccatgcgcgcactgaggtcaaacgctcagcccccacagcagtcatagcccaggcccacccgcccaaacgcgagcacaccccgcacgggctcccccccacgcgtgcacacgcacacgcgcgcacgcgccccgccccgcgccgcgccacgccctacccgccgtaggccccgaaggtgaagctgcgcttccggccgctcatggtgccgccgccgccgcccggcccggcccgcgcgagccggagccgccttcccgcgcccgggtcaccttggcaacgcggccgccccgcccccgcccccgccccagctcggatacgtccgcgccccagcgggccgcggtccagctgccgggggccgccggcgcagaaagggccgcttgttcgcgccgccctgggccggccgggcgggggcttcgcgggactttccgagccgggcccagccgggcggggattgcggggcccggggcccggggcagcccctcccccacccccttcccggccgccgccccccgtccaggccgcagaccctctgttggagggacgccctcctcccgccccctcgagccgccgcgctcctcggcggatccgtccccatcatcacgagctgggagctccctcccagaagcctgggtctgcacggcgggcatgtcccgcccctccctgtccctcgactttctcatctgtaaagtgggattcctcccgccggcctcctaggacctggggatgacgaaatgagttcacgcacgtaaagcgctcggcccaggccctggcgtacagcagatgcttaataaatgccgggtacaagagttccgcagggggacagcgttctacccttcccgcgaacgaatgagtgaatgaacagagcctccaatagcccctccttgcccacctgtctccccttctcccaggagtccccttcccctttgccctggtgaggaggaagagcaaaggggaggagtggagacgcccccctccactcccctcttgaaaagtcatgcagtccaggtcccaacctttagagggaactgggctctgagttctgcagcaggtactcattcgctcactaaacactccaagtcgctcttctgcacccagctcgcccagagctcacagtccagcgctcttcctcagagtaagctgtttcccccacccaagtggagctgtgtcagcagacaccgggttactagccctgaccccagagcacactgccctccagcccaacacccagtcttccccccatagagggagagatccttcccccaggccctgcacccaaggaggcccccacagtctcaaggtttgctatgggattttctgtttaaacaaactgcagggcacagatgcagccggggatgagggaggaaggatgaccaagggcacaaggacagggcagcagggattctgcagacgcctttccggagctgttccacctgggacccgggcctgggcttggtgagctccagcatcccctgggaaatgacgagtctgggtaccagggtctacggtttgtctcacctaggcagggtaagtggcgctgcagtttccccattttagacacgaagaaattgagatcctctctcacaccaattacttctctcttggggatctgccctcagccccctctcggctcccacctgggacctcttctctgcacattctggtgggtgcaggagccctcaagagccccttgcagggttcagagcctggacagggcaaacattatttcctcattcctagaactatgtcccttggttttcagtcctcagaggagggtgtggcttccccttgcaaggtgctctggagcctggactgggccccttctgctctgggcagtgctgtagagtcctggggggaggaatcacaccagggcaggctcctgaggggtgggtcctgagagcactgaagtttgcctgagaagggaggaacttccttccttccttccttccttccttccttccttccttccttccttcctccctccctccctccctccttcctaagtagtagcagcaacaaccttcctccctcccttcctccctccctccttcctaagtagtagcagcagcagcagcagggcctctcagagaggtgggaggcggttggggcagaggactgaagagctaggcctgggctatgaggatgtgcacagtgcttgggctggggcctggactccagccacatctgggctgctgcatccccttcgacatggacctatacctcgccagtcttttcagtggg

SEQ ID NO: 1801 - DNA, 4001 bp, Homo sapiens
aggtagttagagccaggagaggggcctcctgagacccctgccaggcaggcaccttgggaagaagagaagaggagagggctttgcccaagcaagctgggaaggtcccagggtgaaagcaccattatggtgctccacgggacaaccctccctccatgggaaggggtggcaaggcaagcctaggactctggaccctctcctcaacctgacccagcttccagccacaggcaccctcacctcctggcagcaaaggggagcaggtccacatggaccactccaccacggcgttcacccttcctcctctccaccgctgtggagatcttctcccatcaagagtcagagtaccacgattctagaccttgctgaaggtgactaggtgacctcaggcagttcatttagcctctccgagcctcagtttcctcacctgtgcaatggaggcttcagcgcctgccctgaaatattgctgtgaagggggaaattgctcgtgccacctgaggattaatcattaccctggaacccttcccaaggccatcaaggaacacgcaccccttaccagaccttccagctgctgggggctctcagagtgaggctgaggtcatggagaagggaatggggggcccccatggccagctggacctgatcactgcctccccactcagccacagccctcagggccctgtgccagtccagaagcccattcagggacacctttggccaatgttctgtttcatctgcgaggcaaccttccccagtgccccaaccatagcgttttcccccaaacaccctcaggaaggagggaccactacctgtgcagggggggccaggagcctcctgagagcctcatatggggaggaagtggtaccatctcacccccattgcctttctctcctacttccacctggccagcttccctcagtgcccctcctgcctcagtgccccttccctcagtgtccttcctgcctgccgccccaggggcctgacctctgacttggcagggaggggaatggagcccggggacagaggccaatgagccctgagaacagtggatgttcttcctgaccccaccaccgggcctgtgctatgaccccaacaaggactccgagggcatgcacaggctggggtctgttatggtagggagggggccgctcacctccggagactgtgtgtgtgtgcaggtgtgcgtacacaaggtttcttccccaagcccaggcgccccgcagctggcaccaaaccctgcagggcacggaaaccgccccgtgaattcccaccgagtcctcagatcctgccgagccaggggaggcgacgagggggcgcccaacttcgtgacgcgtgtgccccgctctgccgcgggggtcagggacaggggaatgcgtcctgtctctggggatgcaaggacatcaccgccctccccgctcagggtccttgatctgaggcccccacttccctcctctgaggacaggagcgccaccctctggggggcgctagggcttgggcccctccccagggatggaggaaacgcgcccacttcccacagtccctcctctaaaccccaggcgcccccacctcgaggtgggcggaaaactggactccccacccacccaggggggtgggaccaaagccccctggccgcggcctggaccaagtccaacaggctgggggttcagccggctcagtccaggcctccccccacttctccagctgctgtcaagaccgggctgcgcgagcccagctgcgcccacccctcgcccctggagacccgggtcccccacgcgttcgcccccaccctccgtccccgcccgcccgcgcggggtcttcgctgcgagccgacgggagtctggacacctctgtccccttcccctttccagggccgcagccctggcggggcgcactcacccaagggcctgggccgggggcgtcctgggctcggcactctggtgcccgcggccgccgctgcagctctgctcagatgcggccggcgctcgccgccgccgcagttcggggagggggacgtcacatgaccgcggagcgctccttccccggcgccgctccccactcactgcggagcccaagccgcgggcgcgggagcggcggggaggcccccgccctgccgccccgccccgccgcaggtcctggaggagggttctcggtgcccccattttacaggtggggaaactgaggaccagagaggggcagggactggctcaaggttacacagctagacagtggcagaacctgggcgacagcccagctgtccaggcaacagctcatgctccaaggggactgggacaacttctggatcaagtggagacgtcgggataggtggggcccacggcccccatgggctccgcttgtctgcaggcgcgggaggaaggcgcacaggcttcgctgggcgagaaagctgctgtgccctggctgacgccctcctcacccgggcgctcggcgcgcttcctggcagaggccacgcggttgaccctcgccagcccattcgcggctcttggactttgtctctggactgggcagctcgcccccgccccagcctaacccgggcccagggcgggtgtggggaggggagccacaggctacggagaagtggaagggaggcacccggaagagagtgggatcagaacaagagtgaaaacccaggcagggagggggcggcagagatcacctcggcctgacttccaaggcccagggagagttagagacttgcccaaggtccacagcaagtgagcggcctgcccactcgagtcccttctttgatggtcaacagagcctgaggctcctgtgccccactccccaccaagggggagccctcacccacacctctttctgttctccactgagctccctccccggggaacagcccacatgaagcaaagaaacacgcagtgggtcggcaaggccagaactggggacaacgggtgaggggtatggttggtggctccaaggtcatgaactcgtcacagaacactcgtgttccagggggatctctgaaatctctggatctcaccccaatgttctaagaactgggaaaacaggctgcaaaaggtacaaagacagacctctttctcaaccatttcgaattggtgggtcaagccgacagggccctccaaggtcaacaagtccaataggcccacttgacagataatatttagggaggggaaagtccaagacatgtactcaatatatttcttgagcatctactgtgtgcttaaaaccacaactgttacttccagctcccactattttcccggccacatgggctgcatttcacaaaaggaaagatccgaggtcttcagcaactcttacatcagcctctggaggatctgagacatgcaagcctccgggttttcagtcccataggggctggggaccagagccatgttttccggtcaagactctaatccccgtggagaaaaggtgaataagggggaatagcaggaaatgccccaccctcttcccacgcatccacccacctgtgaaagggcagaggggaaggtagatcaggcacttgttcttttcagtcctccctccagcaagcttccctagctgtatatgggaaagagaccccagcccaggggggtttctcaaacttctaagagtgcaggagcggtctgtagactcagattcagattcagtgggcctggagcctgagctcctgcatttataatgaagcttcgtggctgcagacatcctgagcagcactggtagtacaaggcaagttgtcagggcaggaggaagactcctgcggtatcacatgctcactcatggaccacccaacccggggggccctttgatctcctgcctaggaatacaccaggactatatagttggctcaaacactgtaataaaaaggcaagaagttgaatgaggctggccgaggcgcttctggggatgatggtgaagggactgtggggcatagcaactgccctagacaggtatgtcctgcagggctctggtcctgggagatgcttggtcaaatacatcctacttaggaaatgcca

SEQ ID NO: 1802 - DNA, 4001 bp, Homo sapiens
aagctcagagaagaatctaagctttgtgtaatacaacatgaatactgttaagttggatagagcattaatgtcctcattctcacagccatcagtcctcttaaaaacagtgcttaaataatggattctccagtaagacagacagtctcttctttcctactgggtggagaattcacttggtaatttggtttccgatatagccgagaggagtaatgaaactattccttataacttgctgcccattccacacagacttgtaagtcagtactacacttacacagacccagccaaaaactggaaagagcaggtcaggctttaatacaaaaggacaacatccctttactgtgcttatagccaaatcaagctaacttgttcccaggagttgtaaagagccatgacagattctgttgacagtggctatctttactatttagctcactagaatagtgtggcctctcatccccacaatggtctccagaaaaatggaaagggcagcaaccttttttaggcactaaatgaaaatgtatgaagacagatgttcactgtctgttgcggctctcaagatccttcacttaaattatctgctaacacataattcatgaggtgaagtaacagacgatccttataagcagggagaaacagaaatggaccttggataaggaagcaactggtcaaaatagctggataatttaaaatattatcttatatttttgaataaacataacaaaggcagtgaatacgatttgctttcagtaaaacagatacattacaaaaatagatatttgcatacagaaaaaagtttactaacatatttatacagaaaattgatgtcctaaagtcttttaaaaaattaaaagcagcgtacaaactaattttccttcactgaaagccattttttcctcttgataaatattttgttacatgtttttggttttggtcaagagcatgtatcaatagtgatttgatgacatccatttctcaatacctcctctccataagatttcaatctaggtttatgatgtacttggtctatttaggcaataattcattgtaattggggctagcagatgtagtatagagaaaatataagcctatatataattggttctatgaaaaacacgttaaactgacaataaggagatctgggttttcatttcaattctgttcctaattctgaccttgggcaagtaccttagaccacaaaattttcattgaaaatggagagaatagactatagataatctccaagtctctttcagatttaactttcaataagtcaataaactttcttacctgtcatcttggcagaggatattaaaagcctaccttgggcaaaaataacaagcaaagttctcatttgaatgctcttactgctgtctatggatcaaacctgttaaacttttgaatgacacagattatgtgttactgagattcaagcaaggctgttaatatcttgttgatggtcaatatattctgtctcactcagagagaaatgagctttacctgttcccaggtatctttatatttcataaagaattttaagaaagatccagaataaggacccatttcatattattaacagaacaagtacatgctgcagtgttaatattttgctatggtcattattcttttaatttatctgagtttcttagatggctattcttgtgctggattttgtactggaatgctaacagacagcttccacacagtatttctgtgaactcacagcaataaaaaccaacctatttttttaaagccaataatcataaaggtaaatagtcactgcatttgtgtaatttttaaaaagccacattccccttaaatacgtgacttttcatttcggtctcagactctacaaactcttacctggggtctgcatcgtgtgaagtttctgggtgtgctaacatgatctttccggcacgccagtcagaaactcaaaacactttgtatactgtactcgcctgtgctcgctttcctgctctctccctttttgctctcatttcgtgcctcagacagtttggaatgcagaaaagccagagccaatgccagttaaactcaatcctcgccccaaccccgcccccaatcccattcttttgctagagagcactaaacaatagccacccttccttactcactcactgggctttctttcacagcactgggtgaaggcagtctacttcaggagaagcaatgtgatttaccaagctaagtatttcattttttctatcacaaaggatgggagggtggatgtgtgaatctgtgcactttaagaagtgattttttcaaaagcagtctaaaataaaactaagttcagagattcttattttgaatgttttattatgttgaatttaaatataaactcttcagagtataaaaaccaggtaaatcttacagctgacgcagagatagaagcctgttaacacatatacattactatcttaaactaccttcttaaaccgatcagtttaacttaccataacggaaatatctaaaatttagaaaaggaacaaagtttttatttccctaaagcccttaattcaggtcttaggctagaacttcattttttaaaagttatttttaaaaaatatttaatactttattcatacagaaatgccctgtattgtatggactctgtattatatagtctgtagctgtgctgaggacagtgttgactactaaaggcaaagtcttaaaatgaaaagttcatctactgttaggcaagtcccattaagttaggaagttattagacccctggaagctgatgcctgatttcctcctcaaaatttttttaacttattgacagataaaaatctgctctgctgtaatcaagagatttcctgttgagattaaaactgagaacttcattttttaaataaagaataatcaaaacaattttataaactgagtggctttccaaagctaattttctactagatgcaatgaaattatagatagtattactgttctcaatcatcattttagtttgttttaaaatcagtcatatttctagggtttttttctatattcccccaataaaaaggcaagtcaactatgtaatcttcattattaatatgatgacctaacatattatgcaggtgctcagttgctgaggttagcatgtcagaattgatcaatgaaaaaattcatagtttgaatcacagtggactccacctgccacattaaagcagtagaacagaagagacatgaaaatgacacagtattaatctatcatctaccttttaacagctgatggaaacacatacactgtatctatcatctatctacccatttatatttatgtatatatgtattatatatcttacacattagatatgtattatacacattaaaatgaggagcacatagtcatctagtataaaaatagctaaatcactgtgataagttccaagaaagacaagaacagggtgccaggtttgtgtacaatatgagcaccatggtttcataagttggtagctaagtattgaaactgactgatgatgttatttatgtttgaattataaggtcatgaaatcccagaaccggaagagatctttaaaatcatctagtccaaccagtcattcactgcttgaatttttcttattattcacttgaccattgctgatatttgactattttttgacttacaaacacagcatttttatacagttcaacctaatacaaacatttattaagtttggtgctgggccaggaccacataagatggattagtcaagacaaccctacccaactctttatacaggggagaaatgtgaaaccaaataattataacatagtgactatttgtagaaataaaatggctaaagtggcctcacctatccaaaatgaacaggcttggtgctgagttgagtggtcaaattgtgtgatctaatgcaacagttcaaaactccatcaaactctatgaggctattcgtaaccaatgagggattcactacagagacatgaatttcggccactttctagcttgagctcatggctaaatagtg

SEQ ID NO: 1803 - DNA, 4001 bp, Homo sapiens
gaactacacagaaaaaaacctaagtcttggtcactcttgaatagtaagcatataccctgttcagaaagatgaaagaaaaaaacataaggtacttgatcactacaggcttagatgcacaagactgcaggataacatcttaacattgtgtttgatcccaggtgcttcaaatttgccatcttatactcagccacgttactaatgtcttctgcagtcacgtgagctaggcgataaacatcttgccgtttcaatattttggaaagccacagctcagtcctgaatgccaggctataaatccttaagctatgagttttcaaaaccagcatggttttagtgctgccacaaggctcaccctaatagaatctcatcattcagttttaattaaagaggtggttaccaggaatgcagaaagggaaagttttagtgtgttcatcacttttaacctgctgagtggcaacccagtcactttacaacgagattcagaaacaatagtgtaatctgaaacaatccacacccgttggaataagtggttgcttttagagagagtgaggttcaggcagaggttatagattagtcttgctcccaccaaatacatagtttgcatttttttcattcattagcttatcctctgctttttcataatatcttggtttccagtcttgcctcattcaacaataaaaagagacgaaaatccattcacttggtttcatggagtttttccatcataccttcttgaagattgattgcctggctgttcccttgaagtaatcgcctaagaattacgtcttggatagcccaactcccgcattaaacttactgcaggtgtctgaagaggtccaaagaccatactgagtgacatccctgcccaagtgatagtctgaagaaacttgtcagaaatgcacccccagaacaaaaagggatgtgggaaactgacctagcacggatgaggactgggaatgagcctgtgacttagggaatgaatttcagcccaagcaaaaataggaaacaccagcctctaagacggcctgtggtccttaccgtacacccggacccagctctgttgctggcacacggactccagaaggatccgatccaacatgccaccggcgacggctccactgactgggacaaccgcgtccaggtcctccgggggcagcggcgagtcggactccagcgccgggaacatctccggccaggacagcgcctccgcggctcctccggacgacggagagagctccatggtgccccgaggcgggagggggacgaggcggcggcttcggggcgggctggcgcgcggctccgcgccctgcctgcggtaaggggaggaggagagcgcgcagcgagggcagggacccgagcggcagccggcgcggacacctctcacctccttccccgtcgcccactgcccgaggctcgggcgatgcagcccacctgcagtcggcgggcgggacccaggccgggaggaggatccagcgtggccccgaccaagggtgggtccgggctcaggtgtgtgtgggtccctcccgggagaggacgcagaagaacccgggaggggaggctcgccctcccacctcctcggagccgccttcttcagccccgccggcgtctctcgcggtcagaccaggctctggctggggatggagcggggccgggcagggctgggcttgggggcgtcgccgccaggggccgccccctctgaccggctcccgccgccgccgcctcagaagctccgagtgcccgttccctcagcctgaggaggggtagggggcggtggccccgggttctagcccgcctgtcctcggcccccacttctggaatgagcctgcccgccccctgactctcaggccacagctccggccacagctctggctcctgctccgcggcggatcccacaaacccggcagccacggcggtggcggtggcggtggcggtggcggtggcggcggcggcggcggcggcagcggcaggcggcatcccagggtgataggctgaagcaatcgagggccgagagcccggccgcgtgtgcactcgagtaacgaagccggggagggactgcgccgcaggcaggaaaagtcggacaccgaattattcatccggcctgtcccgcctactttccaagtaccctcccagggatagccgggtattgagcggtccgggtctctgctgctcaaagtaaagaccgtttgagaaggcggggaggtaaaagggtgcgggaaatttaaacagaaaagaaaggagcttcccttccttctcacacctttcctatttatttgtttctttctttctttatgggccaacgtttctttcttattggacaaagagatcgaagaagctgctttatcttacagtcacccaagggggagcgccttcttccttcccagagtggagtggcagtgggtccgggattctgggatatgcacagggtctgcgccctgcgccctgtccgcgctgaagctgaacttgtcattggtttgcaacagcatggtgaagaagtgtggtgtggatggacggacgggcctctcaggcacatgaaatactcaaagcccagtattaaccaaacatgtttctctgttttgtctttgatctttgtgcagtgtgttggcttttttcctttaatgatgtcacttgtattttatttttggtttatttgtagactgtctccctccttggccatggctttacttttatgtccacccaaggagagtttcaccagtttaggtttaagaaattactgacaagttaacaataataatttcaaaattgaacagtaataacttaaaccgtgccttggacatagtagatctccaacagtttttcttgaatgtggctacctaatgtggaacaagatttttcataattacatgttgctatttttaataccttttgggaggttctttagtcccccccgccctttctccctacgttgcacaaagagactggtctacaaggggtcctgttagttttctggttttgtggggtcctggaatattgtttgggcttattgagagttaacaaggatgtattttgtgagtttctccaaagtcttatttagagtaatagtatttcaaagcaagaagtgttttagagagaacatcattctgcctcttgtttaacaggtgaggaaactgaggaaaaaccagcttacctggctaatcaaccacaagtacagatagttccacaatgactcaatggatattacttcaactttgttccctcaagaaacttttgtgattaagcttgttgatttgtggcttgatggtttacaggaatggtcatttttaatatctaggaccctgcttgcttgcttgcttgcttgcttactagactggctgcatagtcagtcttccacgtgtaaacaacagtgtgtgctttagtggataagagatgttgagtgctgagatttcaaggctcagcactgagtagacctagagcatttttatttatactaaattaatgccatggtaacataagttagacagcaagtgaatatggcatcaaatgtacaaagttgagtatctctttactagtcaatgtataaggaatttatttacccaagcaattatcttaaaaacagcattacaagtggtatgcgaaacatttccagaatttatttccacatctgctctttcagtggcatcatccattcctgagctcaagaaaaggcctctgccaaccgccagtaatcctgcttttttagtaatcctactattttttttttaactttaagttctgggatacatgtgcagaacatgcaggtttgttacataggtatacatgtgcctatgtatacctatgtaacatggtggttacagtaaacatggtggtttactgcatctatcaacccgtcatctaggttttaagccctgcattcattagatatttgtcctaatgctctccctcccctttcccccacgccccgacaggccccagtatgtgatattaccctccctgtgtccatgtgttctcatcgttcaactcccacttataagtgagaatatgcagag

SEQ ID NO: 1804 - DNA, 4001 bp, Homo sapiens
cagaattacctggggggcttttcaaaatcctgatgcccaggctgtaccccaggccatttaaatcaggtgctctgggcatgggaaccaggtatcaccagtattttctaaagcttcctgtgaatccagtgtgtagctaagattgataaccactggtctaaatacctagctagctggagtatctgtggggatttgggggacttataccacgcggcaagaaccccacgggagggtgggacacctcccctctgcagccacggtgttctgcaggagccccacctacagccagggaaagggacgcctgtccctttgcccctcaccctctggaacatcccctgctctccagcctcatgagtggtgccctggaaaacaggtgctagttacaggggcctattttagttgactccttcaaacataaaatcacaatctcttctttggttcttgggcctcttctcacaattggaaggtacagtatatttgcctgacttcagaatccaggaaaggcagagcctacaggcaagatgaattattaacaaaggaggcctcagagtcaggcctggggaagtttttggttaatttgaattggtgtagcactgctgaattaatgatgagcctgccacacacctgcgaaatataacagctcacttctgtctataaaccagccccttctaggtaacctctctaaggacctggcttggagccctctcatctaagtagcaaaacaaataaacaaactcagctttacctccactcccaccaagatactgacagacacgaggcctgcagccaactaggagagtggccagggcacccaggcttgctgggtgtctagaggcggacacctttaggaaatacaagtcatgccatcaggaaacacacgcaagccccttcaggttacccaaaccgacccaggaagttaaagtggtagcatgacagcagcctaggccagaagttttcgtctgcttctaaaaacaccctggacttctgcaaagttgctggattacgacttaaggtggtttctggccacttcaaatacggaagtcccaaccgatgaatgtgtgtttatgaatgtttatcaactgatgaatgtttatcttattgtgggattgggtggcattcagtttccacctagaacttctaagctaggatttggggagggggtgcggttatgagaccgtgcactcaggcacaggtgaacctgcagccaatctaccagccaggggcagcccccacattctggagagccattttgaagagatctgtggatggaaccgctgtgaggagggctgaccaactgaatagtgcaggtccctgaagggctccagatacgatgctcagccctcagggcaactgcctggccactttcctgacatgtggctttgtccctttgctgggagcaaggtttcccttctagattgaccacagaggttatttccccccacgaaaggctcctgcattccattattatgtttacctttgaaagatgtttgctctgcgcatttctgaaaaaggtagtcttagcagtgaagaagcagtcttccagttcctcgtccaggctgcagtacccactgctcatgctgctgtccacggtcatctaccccggagttcccggccgaggccgccagcgcatcaagggggccgggcttgggatgcggcggagggaggtgggcacccctccccgggctccgcttggcgtaagcccctagctctgagccccgagccgggagctggtcgggtagcggaccaggcagagccggcgggccgcctgcgtttctttcagcggggtgcgagcgctcgggcggcccggtaacctgctcctgtccccgcgccgcctgcgcctgcagagccccgggcgcccggctcgcgcctcactccctgactcgtccgggctctgcggtttcgtgtccccggcgccagcgccctccctccgccgccgtgcagagcgccatctccgcacctcccccgcctcccgcgcctttcctgcccctcgcgtaaagcagttctgaagccacttcctctgcaaggttcctcaaagccggctcggctgtcactgcgcccctcccccgcctccccgccgcctgggtgccacccgcccccggtggcaagtggactcagggaactgcaggtcatataagggatgcagggaaagaagggaccaggatggacccgagggggaacattccctctgttctttcttcatcatgcacttgcttctggaaagagcccattctcatcagccccggtgactcaggttccacggagtaaaaggtgctagctataagggcaacaccatccctcctcccttctcccccatccacttcctcacccccaccccctccctcccccattcgctgggtgggggagccgggtcaatcggaatggttagagaagaaaaaaatcaatatctgccctgcctggggaaacagcaatattttaagttggaaatgccagaagaaactgcagggtcaccacaaacacatgcaaatcagatgcagagttatggcaacctagagagcaagctgccttcccacccatagaacttggccctcaggaagcctcaggatacacaggagcctgcagacactgtccaggtcatctgtgtatcttccggatagtctgagaaagaggggtcttggcctgatcttgtcattcctaacattgagaagggctcatttatattttcccatctgactggacaaaggaacacatagggctgaatccttcaaagcagttaagacaattaccccacaatagatcaatagcagttctagctaccattgtttgaacaactctctgtgcaagtgatttacgtgcactctatcattgactcattccaatagccttgagacagagactgtgtacagatgagaaaagtaaggctcggagtcacacaggtagaacacgtgtgctgggactcagccctggtgtgtgcagctgcctacgccccagtcactgtcatgtacagaccctcagcaatgatgaggctatttgggtgggcactttgccatctttaaatacagtgggggctggagtcccggcagggaaactgccttcagaggcctggctttgctaccatgttcatggagtctgatggctcatggaccccggagggccctggactgtggctgagaggggttatcaggtctctctccaaatctgtgtagcttttcctacagttctgaaacaatccagtcctggggaaacataagctgggtggaggactagactcagccccccggacaccaagctgccaactccatcttaagctctggctaccttcatgagaaaccctctccctctcccacctaagccaaatccgtcagtgctcgggaaggtttcaaactgcagcccaatttggcttcatcctcccacacagtcttcttcccagaagcctgcgagtgcctggcaggcacaaaaacaagagagctgagagtcagcaccccagccggctggccgccctcggtgcaggagaactgtcaataccagtagctgtcttctctggcaggcagataagaggagggagacggtcagcacccggggctggggtgagctaccgggtgtttgcaggggaagatctcacattaatgggggtgaaagtaggttctggctttgtctggagcaatctttttttcaaattttagaggctgtttggggggtttcccccagagaggtggtttcctgtgatccttgggccatcaataacagctcacctgctttgtccagccagctaagaaacatgcttttcttcataaaaagaacctccttgctcagtgggaatctaatacttaagaaaaaaaaaacaggccccagattctctgtggccacactgtgtccttggattcatgccgggaagctctgcaatgcaaccttcacatacagctaataacaacctattcaaacaccaagccaaggtaccccaggagtcagcatgaatctctccttagaagcagcacaccagatgccagacctggttaggaaagttctcagggacactgtgttctttt

SEQ ID NO: 1805 - DNA, 4001 bp, Homo sapiens
gccaacacatccaaggataagttgcatttgattctactgtagtcaaaggcatttaccaagggacagcagcccctctacccacaacatgtacctctacaaacctttactccttccttcttaattagcacctgaactgggggttctggtggaggaaagagcagcacccacttgcccttccaatctttcccttccacttgacccaggcttagtgtctgagttctatttccctgcagccagctgcagcgggcagcacattgaacagcctccgctgcagactgcaggcagaaaaagggtagggttttcctgatgtggaaatcactgctgctgtccaacgctgcagttggatgggagacgtgaggctgctgccataggggaagggcctttgctgaaagatgcaaaccacaatccatttccagagatgcttgttagaggctgtgccattgtctgtgctttgggcttcagatatttgaaatatccatgtaaacacatgaacacatggctgtggatatcctctgataaacacgcaagagcaaatgccggggtgggggtggagggtggacacctattaaaggcatacacacccctaactgtaggaggagaaaaataataaacccccaaggagactgaagattggctcagaaaatctatacactgggggcccagtgttttctggctttgagaagcgcctggctcaggaggtgactggaggggcctgagggctgtggagaggaagggaccctgtcaggagctgagtaatgttagagcatgacgactagggcaggaacccaggaggaggaaggggaggaggcagggcacagccaaacattggagcagagtccaaaggtttgaggggccagaggtgaaaggcaggagggggcacgggttcagggtgacttcaggctctcttcagcctcacagcctgcctttatccaaaatctaacaaggtctcctccctgtcccaatacgtccccctggaggagaggtctgagcctgtaccatgggcggacaaacaagcgttttgtcagtaaccctaataagcaagggtcaaacggtcatctcaacagcagtctcacaacccactcccaagaactcacaacaaaaccatgagggtgcacagggagatgacagaggccgccgaggccatcacccacccaccccccacaacctgtgtgcgagtgtgtgtgtgtgtgtgtgtgtgtgtgtgtgtggagggccaaggcacgcacctgtcaggagacaggtatctgttaactaccgcataaccatacctaggtagtgggcaggcactaaaggataccgggcagggaactaaggagcggactgtccccaggggttgttatctccttatgttcggggctcccctggagccaaagagtgtaatggcccctctctccctgccccagggccctcccagtccttcgcccccagactgcggtctccccgcacgcccctcccctgccttcacacttactagtgcagcgcagcgcctgccgcagcacctctcgtccgcacaggtcacaccagccggggccgcccggcagcaccaactcggcgaagcagtgcccctcgcctcgctccgccgggactctgggatcctgcggctgctcgaagatgctccgcacgtcgcggggtcggggcgctccaggccgccgccgcagtctctgctgcagaccaggccggagcgggcgagcgggtcgggaggcccggggcgggggctccaggttcccccgggcagccctccgggcgctgcgcccctcgcgcgccccgggcgcagtggagaggggcgccgggacacagaggcgcgaggaccggtcggggggcggcggcggtagctcggggccgctcaggctctgtagatagcgcggcggctcggggtccaatagtagcgggtacgggcgctgcccgatggccggggacgccatggccatgcccggctagtggcggcagctttggcagcggcggctttggcgactgcgctactcccgagccagccccgagagaaggggccgccccacaccagcgcgcctttaaaggaaccgcagcctgctgggcggggcgggggcggggagagtcggagtggcaggaaggacgacccaagagaaccgccgacggaccgaagggggtagggtccgtgccaggcgacgtctgcgcgagtgtggatttgggggcgtcttcacctggagcagctgcaggattccgcagaggagcgcctctgtacagtacagctcagagggcgcatttctgcggggggccctaggccttcagccctgcctctttcccttgccaatcactttccccaacaccaggttcacccccgacccgcaccctcacgcgccccgggagggagcaggtcggagggaaaagcttgggaactggctcgatggggtctgagtagggcccctccgtctaggcgtccgctcgccactctcccgctgatggtgccgacaggagggccgtgctccttggcccttcctctctccggcttgtcgccgcccgccgccccctctagagcggagctcgacgcgggtccggaatgccccgcgcgcgctcccgcagccgcgctttgtcccgtgggtgaccgccggatgcctccaagggctggcagagctgtccgcgtgcgactttcgctctggttggatttccccttccttcgcagccctgccgggtagggtattcctctttcctggaagactggtggggggtggaggggagttgggggggctccattgagagaacgctccctcgccccaagggttgggggagcttttcttccttagccaaccctccgttccccagagctgctctagtaattactgtggagataccagttcccctaaatgccctaagtggaacctggtatggatggttcactcatgggacccaaagagagatctcctttctcccggcactttcccccgtgaaggcttgcttcaagccttcatggacccttgtctggtttaacgctctgcggtcaccatcttgaaagtcttactttttgaacaaagggccaggcgttttctttttgcactggttcccacaaattatgtagttgttcctgacaggcacctttgcccatggaaacaggcccatcttatggataaggaggactcctggatctctgaacctgggcctgggccctggccctctctagccccagtattgttaactgtacattgggctggaggtggggagacaggtggttgttaacgtggcactctccagctccgtcattatgactcagtgatcacagctttcctcttaaaacacaggttcggtttggtccgtctagcggtggtcattttttagaagaatagtctaaattcttctggacctggtctctcccttctcttcccaggccagagatgggtctccccctagtgcttcgtaggggaatcttcacttttgctttttgtttttcccttggaggtaatttttaggtaattcctaagatttccagagtccagtggccagggaattcccagccagctttgctccatggcttctccctcacggtaatcatagtcctctgcctcccaaatctgtagcagaagagaggttcctggggctctgggggctcaccagaggcgggagctcaccctatgaggtggtttctgaggaatgacccatgggacagtcaaccccacagtgctaccaaacagaggagctccgatgaggggtgtaagccacaggccaccgcctctgccccacccctcctctacctttcctcttccctctcctaaccttgcttttgctacatcagtggttttcaaaccttggtatgcatcacagtcatctggagggcttgttaagattattgggcttcatccccaaagtttcagaatctataggtctggggctggggtttgagatggctcattttgagcaagttcccaggtgttgatgctattgatccagggacccaacttggaaaaccattgctctaggtctgaggtggtgattctgagaatgggcttctctgttccttctccccaggacaagtg

SEQ ID NO: 1806 - DNA, 4001 bp, Homo sapiens
ttcatgtctattgcgaagggaaatgagaaagataccaacagcaaagcaagaatagacagaacgtcttcaatttggggtctaaatatatttagaattaatgcaaggaattgtgataacaaaaacagctgacattctacaaagacattgagatacttctctatttctctcctcctagactgtctatacaaagagctgctattttttaaatttgtttttttaaaaaatgccatctgcttcttccaagcctcctccttcctgagctcccttacagtcctctatttgtatgggcaggggaggctgcttccaagaaatcagtccattgcaggtgtccttaacaggtagtatcacaaaacattacctgacagatgggaagtggaccatggcggaatggaaagagttgaaagacagatgagataaacaatactgacagacactgcattttgaaacaaaatagccccccatgcctacgggttataaggttatatgttcatatttattgtgaatggctatgtaaggtctcattacatagtaatggggcattggtctcattattttataagtcacatggaagaactgccatgcaattgtcaatagccagccctcttgcaatttcatgcatccggttacaggaggaactacaaatccgcaactaccaggacagcccaccacactcggagcagtatataaattcaggttatatgtgaaacatgtgtgaacatccagacagctaagaaatcctgaagaatcaaagaaatgatttcaagcttttgataaaacaaaaatatatatgcataggaaaagagaaaagaacaacatcccaggataacaatggttatcttcaggtatcagaaatatgggtaatttctgtgtcccctttgtgcttctctgtctttcctagctctcctacaatgagcatgcagcttttgaaatcaggggaaaaaaaaagttaaatagatgcagagtttctaatcttaaaagcaacagttaatctggattaaatacacagagtagctatctttaaacctcatccaagtcactgagaacaaaccctccagtactgtacttggcgtagcaggaggcggctgcaaggctccaaggagcgcagcaataactctattctggggccttagcaaactgagaagacagagttgtttcatagaaacttgggcaagtgcttctgcaacaacagcgaaactcactcccagctctctcgtgcccctgccccctatggcactcccgagcaccggggactatacgttggagccctcgcccctgccaaggtgctcccgaagcttcggccccctctacccccgctcccccccgcaaaatgtgtgctccacaactcacctccactctccttcacctcctactcctctacggccgtaggggaaggaaagaccgggccgaacttggaggcagcagcccctgattcccgtgaccttggagaagccgcttcgccactcagagcctcagtttcccaatctgcccccctccctggcagggcgtctgcaggctagaaaccccaagaactcagtcaaaccgaggggccgctctcaccactcggcgccgacccactccccaggaccgctctgaggcgcccccgatcccagcctggacacggagcgccgccccgccgcccctcgggacgcgtcgcccctatcaccgtcccagtacctggcagttgctgtcctggggcaggtttttcaccaggattttcctgcggttgctcagctcccgctgcatccgctgcagtcgcgcggcgacctcctcagggtgcagcgcggcgggcatcgggtccggggcgccctcgtgcgcttcggctgaggggccctgcccgcgcagccccggccccggccccagccccgccgcgctgcccaggcccgcgcccccctcgccgccgccgtctcccgccgccgccgccatcttcccgggcgcccagcggctgcggactcctcggaggctccaggggaagcggagagagaaagcgggaggaggcccgggcgagggcgaggcgggcagaggccgcagagtgggcccaaccgcggggaaggggggcggtgggaggagggagtagagagaggcggcgccgcagccagcagcctgctggcggggagaggaaacctgaggcgccgaggaggagcccgagaaccacctcgcgggaacctcccccgccggcccccggccccggcgcacaggcgcgcccgcgcccgcctctcgcgggtccgcaggcggggccgggcgccgccacccggacacctgtgagggcgcggacgcgcaggcgggctccccctctctgcgaggccttcgcgaacgcccagggtcgttctctgggggatgcggccccttcgcggtggcttcgccgggagactcagccccaggcgcctgtccccggctggccccccatgtgacgccgcagctctcccccggctcccctcgaaactcccgcgctggggcggcccgggggctgcgggcgcgaactcggtcttcccacacccgagatggggctggaggggtggcaggagggcgcctcctgcagcccggctggctcccgatggtaacccttctgttggttcaagaagagcatatttggcaaagtttgagtttacaatgagattttctggggagtaaaaagagggacattgtgggagaaatgttatgtatttggtaaaacctgatcgtaatgtattttgctagctgtgtatgagaaagcctgtgcccttcacctgtccctctgtccctgtcatgcagttcctaaaatgtaaaacctgggtagttgggtctgcaacatggaaagtgatgctgaaacaaagactagaatggaaaaggagctgtggcagaggggctggagaatacgctgcttggaacattattttaattgaaacttggagggagagttacagtgtagaactatacttagtcaaacggatgtcatcagatcaaacaatccagcagcctttggcactagcccaggtgaccatcagcgaaggggaccatgcatcttaattgtgtagcatgcaagtacactagcaaaaaaaaaaaaaaaaaaaaaaaaaagactttaacactaattaaaagaaaaacaaaatgttttaaagattttttaaaaatactacaaattcagtccttaccatgtgctccccccaaccacgcatttctaaatgctttacatatacatatttatttactcttcatgatcattcaattacgtaggttttgttttcctcactttacacgtgaggaaatgggatctgttctgattgattccaaagcccagtgttctgaataacataaaataattcacccgtaatccgtccacccaaaaataatggctgctaatacttgtatcattaaaatgatattcggcaatacacccttctataccaccactattcctggtaaccaaaggatagaaacaacccaaatgtccatttattgatgaacagataggcaaagcgtgggatatatatatgctaagaaatatttttagccataaaaaggaattaaggacccctacaaggtggacgaacctccaaagcattaaatgaaagaagccagagacaaaaggtcatatattgtatgattccatgcgtataaaatatcagaataggtagattcatagagcggaacacagattggtgtttaccaagggctggaggagaaggtaatgggtgcaaacatccttatggaatgatgaaaatctagttttggaactagacagagggggcagtagcccaataatatgaatgtactaaatagtcactgaactattcacttttaaaatattaattttattacgtgactattactgcataaaaatgtttttgaatgatattctgtagtttacagctctgttttctgctttttacagtatgtctgctgaatccctttctatgccaatgtatttgaataccatggtttttatggctgcatattattctgttgaattagaaaattcacttatttcctagcattagtatttcctattatttttatctattgta

SEQ ID NO: 1807 - DNA, 4001 bp, Homo sapiens
cgatatgtagcaccaaatacagccccaataaatgcaagctattttatcccctctactagagataagctacctacacgtaagaaacataggattaatcttttagccctcactatgcccaaaccccttataagaaagccattccaccttcaggtgttttctaggtaccctaattatctctctacaactgctgtcaccatatataactataattattagtttatatctgccacttcaactagacaatgtgctccttgaaggcaggtaccatgacatactacgagaattcaaattaagttttgttgaggccaggtgcagtggctcacgcctgtaatcccggcactttgggaggcagaggcgggcggatcaccagaggtcagggggttggagaccagcctgtcccacatggtaaaaccccgtctctactaaaaatacaaaaaaatttagccaggcgtggtggcaggtgcctgtaatcccagctacttgggagggcttaggcaggagaatcgctcgaatctgggaggcagaggttgcagtgagtcgagctcgcgccactgcactccagcctggacaacagagtgagacaccgtctcaaaaagaaaaacaaaaaatttttgttgtaaggactagactcattgtaatacttttttctttttttgtgtggggggcagtagagacgagggtattcccagggctggtctccaactcctggcctcaagtaagtctcctgcctgggcctcccaaagtgctcggattccaagtgtgagccactgctcctggccataatactttttgaaagttgacaagttttgtactattatttggtacagccactattattacaggtattatcatcagctacagctatttaattcagtattgagaaaaaaacgccaatatgttttctcttgtcaggtaagttacaaaatcattttgttattttgccttactttgtggcctagaaaaaatgtcaccaagaggttttgatcacatgccttctccgggtgactgaagagcggaaaaaagaaaatcaatatgagaaatctacactgaaaatacatcaaaataacgttcgggagagtcatgtcacctggttacatctggaagccactgggcagttaggctgggccactccagagcatgggtcatcaccaaatcataaagaaaaggggtgttctttttccatattttgtattcctcgttgatcactcgttcttccactgcgtcgtcgaaggctgctaaaatttttaaaaacaaatttaagttagcaaacaaacggaaaccgagtaatcctctgcaaagccacctgcatgactcctacagcctaaccatgaaatggaggtgatttgtctaaatccccacggcagaggcatccacactctccactttcgcggcgccgaaactcctcgggccatccccgccaaacactccgttacccgttccaggccaaggggccagccaggccttcggagcacgctcgtgcgcgccgaaactcacaagcccgacgaggaggcccgagctccgagccttgtgggtaggaagcggtgtccccacgctcgggacagaggccgagaaaccgatatcggaggcaggaagagaaacaaacactggccgggggccccaccgctggcttcgccagctgcgaccgaaatcggtcccagggaactggcgagccgttagcacgccccgcggggagttccctcttcacgccttcagtaccggggactgcactcggcaaactcgggcctgccctcactgttaggccatgtcgaggccgcggctcagcccaggcacccactgccctcctgggtcggccccggcaccctcaccttccttgtcggccatggcgggcaggcgagccgggggaatcctggggtcgagcgttgcgggaggggcggggaggctgcaagagctcgctctgtgcgcgcggcctctattgtttcctgcgcccccagcgcgagggctgactcgcgcaccttcgcgccaacatcagccaatgggagcgctcctaatggcgggatgggcggggaagccgcgttcgcgaccaatccagacgcgcggagtagctttccgcggggaccgaggcgcgcgctccgcccctccccccacgcctccccgagccgacttccagcgattgcgcgcgccggcgttgacgggactgcgcccggtcagggtcacgtgagagaggtttggtccgcacactcccgcggcaagagggcagccattttcttgaaggctattaagcttacgaccctttcagagtactgagatgaaaaatctagaatgccttcgggtctagttatcaattttgggggtgaagcgggggaaagaacctcgccagtcagacccagacgggtttcattcaaggtgcccttcaacgtttttccttagtctttggaaagaactagtaatgaaggaatcgcagaagatggggttttggctttttaaatatgcgatccaagcggcagggtagggactaaagtaggtcaacagccaactccgagaaaggagtgtggtcctttaagggtgtgcgccaaggggcggagtctagagcggaagtagtaactccgggccgaagtccggtggatgaagggcggaagtagagtgtctaatcctgcagtcatggcgcaggaagaggaagatgttagagattacaatttgactgaagaacagaaggcgatcaaggccaagtatccgccagtcaataggaagtacgagtgtgagtaggtggcttacttctctctttacatgtaagcacacaggcatcccctctccttacccgcggcttcctgctgctctttctactgtgccccatgggtacttcaggcatgatcccatttgtgccggctgttgtagtcgcgttcgtacttctcctggggatgctgaaggaaaaagccacctggtttaatagtcgcgaaacctggcctccctcatttacagtctcttgaacttcttccacatgtgcctaatcacatttatcttcgtaaattctaaagataaccatattttcaggcgtttgcagggttgttacccccatgtatttcccaacggtgagattagagtgtgcgaggttagaggactcggaaagctaattaggggatttctaacttgatgtttcacctcgatcatattagcaaaaaacctggttttgccatttatgattgtgatttttaaaaatgattattttaggccgggctcggtggctgaggcctgtgatcccagcactttgggaggccgaggcgggcggatcacctgaggtcggaagttcgagatcagcctgaccaacatggaaaaaccccgtctctactaaaaatacaaaattagctgggcgtggtggagcatgtctgtaatcccagctactcgggagactgaggcaggagaatcgcttgaacccgggaggcggaggttgcggtgagccgagatcgccccattgcactccagcctgggcaacgagcgaaactctgtctcaaaaaaaaaaaaaaatgtgtgtgtgtgtgtgtgtgtgtgtgtgtgtgtgtttttagagatggggtctcgctctgtcgtccaggctggagtgcaatggagcgatcatagcccgcgctgcagtgcccagctggttttgccatttattcgcttagtgactttaggcaaatcacataacctatctttgtctcttaaattctatattaaacgttaagctgtcatccctaaaggtagctgtggtttggggagcacaaatctgacttttatttatctgcttaaaatctttcattaatttctcattgtcctctctgtaaaatctacttatttaccatagtattctaggcaatgtgctttctggagctggcatacctcctagcatatccccttctctcacttaaaaacaattttaaaatattataggccgtttgcggtggctcacacttataatcccagcactttgcgagactgacgtgggtggatcacctgaggtcaggagttccagaccagcctggccaacatggtgaaaccccgtctctact

SEQ ID NO: 1808 - DNA, 4001 bp, Homo sapiens
gaaaacttacttttgtaccagaaaatccattattccaaatggcacaatggtcttgttaaaactatgttaatatcatctaaatttaccctcctctttgttttttgcattgtcatttcttcctaagaaatgaggcaaattgaggcaaattttccttcctctgataattttatctgtaccacttttatgctaattataactaatttggatccccgatatgtagcaccaaatacagccccaataaatgcaagctattttatcccctctactagagataagctacctacacgtaagaaacataggattaatcttttagccctcactatgcccaaaccccttataagaaagccattccaccttcaggtgttttctaggtaccctaattatctctctacaactgctgtcaccatatataactataattattagtttatatctgccacttcaactagacaatgtgctccttgaaggcaggtaccatgacatactacgagaattcaaattaagttttgttgaggccaggtgcagtggctcacgcctgtaatcccggcactttgggaggcagaggcgggcggatcaccagaggtcagggggttggagaccagcctgtcccacatggtaaaaccccgtctctactaaaaatacaaaaaaatttagccaggcgtggtggcaggtgcctgtaatcccagctacttgggagggcttaggcaggagaatcgctcgaatctgggaggcagaggttgcagtgagtcgagctcgcgccactgcactccagcctggacaacagagtgagacaccgtctcaaaaagaaaaacaaaaaatttttgttgtaaggactagactcattgtaatacttttttctttttttgtgtggggggcagtagagacgagggtattcccagggctggtctccaactcctggcctcaagtaagtctcctgcctgggcctcccaaagtgctcggattccaagtgtgagccactgctcctggccataatactttttgaaagttgacaagttttgtactattatttggtacagccactattattacaggtattatcatcagctacagctatttaattcagtattgagaaaaaaacgccaatatgttttctcttgtcaggtaagttacaaaatcattttgttattttgccttactttgtggcctagaaaaaatgtcaccaagaggttttgatcacatgccttctccgggtgactgaagagcggaaaaaagaaaatcaatatgagaaatctacactgaaaatacatcaaaataacgttcgggagagtcatgtcacctggttacatctggaagccactgggcagttaggctgggccactccagagcatgggtcatcaccaaatcataaagaaaaggggtgttctttttccatattttgtattcctcgttgatcactcgttcttccactgcgtcgtcgaaggctgctaaaatttttaaaaacaaatttaagttagcaaacaaacggaaaccgagtaatcctctgcaaagccacctgcatgactcctacagcctaaccatgaaatggaggtgatttgtctaaatccccacggcagaggcatccacactctccactttcgcggcgccgaaactcctcgggccatccccgccaaacactccgttacccgttccaggccaaggggccagccaggccttcggagcacgctcgtgcgcgccgaaactcacaagcccgacgaggaggcccgagctccgagccttgtgggtaggaagcggtgtccccacgctcgggacagaggccgagaaaccgatatcggaggcaggaagagaaacaaacactggccgggggccccaccgctggcttcgccagctgcgaccgaaatcggtcccagggaactggcgagccgttagcacgccccgcggggagttccctcttcacgccttcagtaccggggactgcactcggcaaactcgggcctgccctcactgttaggccatgtcgaggccgcggctcagcccaggcacccactgccctcctgggtcggccccggcaccctcaccttccttgtcggccatggcgggcaggcgagccgggggaatcctggggtcgagcgttgcgggaggggcggggaggctgcaagagctcgctctgtgcgcgcggcctctattgtttcctgcgcccccagcgcgagggctgactcgcgcaccttcgcgccaacatcagccaatgggagcgctcctaatggcgggatgggcggggaagccgcgttcgcgaccaatccagacgcgcggagtagctttccgcggggaccgaggcgcgcgctccgcccctccccccacgcctccccgagccgacttccagcgattgcgcgcgccggcgttgacgggactgcgcccggtcagggtcacgtgagagaggtttggtccgcacactcccgcggcaagagggcagccattttcttgaaggctattaagcttacgaccctttcagagtactgagatgaaaaatctagaatgccttcgggtctagttatcaattttgggggtgaagcgggggaaagaacctcgccagtcagacccagacgggtttcattcaaggtgcccttcaacgtttttccttagtctttggaaagaactagtaatgaaggaatcgcagaagatggggttttggctttttaaatatgcgatccaagcggcagggtagggactaaagtaggtcaacagccaactccgagaaaggagtgtggtcctttaagggtgtgcgccaaggggcggagtctagagcggaagtagtaactccgggccgaagtccggtggatgaagggcggaagtagagtgtctaatcctgcagtcatggcgcaggaagaggaagatgttagagattacaatttgactgaagaacagaaggcgatcaaggccaagtatccgccagtcaataggaagtacgagtgtgagtaggtggcttacttctctctttacatgtaagcacacaggcatcccctctccttacccgcggcttcctgctgctctttctactgtgccccatgggtacttcaggcatgatcccatttgtgccggctgttgtagtcgcgttcgtacttctcctggggatgctgaaggaaaaagccacctggtttaatagtcgcgaaacctggcctccctcatttacagtctcttgaacttcttccacatgtgcctaatcacatttatcttcgtaaattctaaagataaccatattttcaggcgtttgcagggttgttacccccatgtatttcccaacggtgagattagagtgtgcgaggttagaggactcggaaagctaattaggggatttctaacttgatgtttcacctcgatcatattagcaaaaaacctggttttgccatttatgattgtgatttttaaaaatgattattttaggccgggctcggtggctgaggcctgtgatcccagcactttgggaggccgaggcgggcggatcacctgaggtcggaagttcgagatcagcctgaccaacatggaaaaaccccgtctctactaaaaatacaaaattagctgggcgtggtggagcatgtctgtaatcccagctactcgggagactgaggcaggagaatcgcttgaacccgggaggcggaggttgcggtgagccgagatcgccccattgcactccagcctgggcaacgagcgaaactctgtctcaaaaaaaaaaaaaaatgtgtgtgtgtgtgtgtgtgtgtgtgtgtgtgtgtttttagagatggggtctcgctctgtcgtccaggctggagtgcaatggagcgatcatagcccgcgctgcagtgcccagctggttttgccatttattcgcttagtgactttaggcaaatcacataacctatctttgtctcttaaattctatattaaacgttaagctgtcatccctaaaggtagctgtggtttggggagcacaaatctgacttttatttatctgcttaaaatctttcattaatttctcattgtcctctctgtaaaatctacttatttac

SEQ ID NO: 1809 - DNA, 4001 bp, Homo sapiens
aatgaccttacactttatcaacagcatcattatttgctctcaccatttttcacgtcactctcttactcatcagcactatatgcaatctattctcaaatttgtcatccctacctcctcaatgtcttttctatttcctagctcaggccttcctcatcactcatataatctacccctccaaactggttttacactcctccaaaactcaactccacattgctgtcagacaaaccttacaaactcatagctctgattgagttactaagtcaaaatccttcaatggatctaccctaccttccctaaaaagcccaaacttttgagctaggcattcgagaaccaacacaaaatagatggcaccgatcccatcccctggcattctctttatccacaacctggccaagcaggaaaattctttaggtcttctctcactgatgcctactgaacatccctcccatattttcatacttcagcctgttgatattttaccaaccttaaaaatccacttaaggccggacactttgggaggctgaggtgagtggattgcttggggccaggagtttgagaccagcctggccaacacagtgaaaccccatctctgctaaacatacaaaaattagccaggcatggcagtgcgcacctgtagtaccagctactcaggaggctgaggcacgagaatcactcgaacccaggagacagaggttgcagtgagccaagactgtgccactgcactccagcctaggcgacggcgcgaggctgtcttaaaaaaaaaaaaaaaagtccacttaaaactccaactcctccacaggtttggggggtttgtttttcctggttgacttcttcctttaccccaaagacattcactctctgttccaaacattcttagcaactggtaatgactctttcaggcctgcctacattctgcaatatcctacagctattttacataatcaccttaaactccctgcttaatgaaaagctctttaagggcaaagaccattttttatgtatctttgtagcccttttgacaattaacatatcttctgacttttttaaaagagaaacctaaccattaggaacagcaagtagtgcagaagtccttgaaaacctcagctacccctagaataccatgctaaatgtcacctaatggaagtccaggagaaaggacctacagtttttaaataatctggataggaggtaaggaggcaatgactcaaagtgagggcgacaaaagacaactccctccgtatttcacacctcagtgttttacacaccgtccctagcaaaggaccttaaacagaaagttaggataattggattccagtgccaactatgccatttacttgcttagtgcctagccattaccctctgagcctttattcatctgttcaatgagaagcttctaccagaagatctccaagtcccctccttagacttctcttttctacaaaaagattaacctgttcaggcacccaattccctgacaagtcttcaaagcttcatcccaagcctcacttcttcaaattccatctccaacaactctggtcctggctgctctgggtacttcaacacctgcgatcctcataatcaaagctaagtcacaaactgtctgtccccatcgctccataattgatatgaaagtggcctcgggaggggcaatgcaacctactcgggcagaaggtgggcttcctcctcccgctgctgctccacatcaggtgtgcccagtgatccatagccgaacagtgtccctaagattgcagcctgactcccctcccgcctgggttccctcctttccagtacccaacgcttctctaaaacgcagccacagcccttctcacccagcaactcgaggttcatccctgcggactgtggccgcccggtctcagctccggcaacaacaccttctccccggccggcttcagcaacttgcgtctaagtggtggacgccgcgaagagactggcgcaagctccgaagactttcggccttagaaggccccgcggcttccgctttcttcccccgccttccttgttcgtttcaggtgggctgcccaaatatatgcctgaccaaaatcaagcatacactctctcggaaacaattaattatgatctttgctgaggtacaacaatgttatcgtcactagggactttaaatagcgcgacaatttaagattatttgctccgggaacatgtaggtgaggtagaaattccaggcatacagttaacctactagttcttgccctgttgtgtgttcagcggcgttgtccgggcgggctacctcagactccgcaggaaaggttccggacaagtcctgctaatgcaagaaaccagggaaggtcgtcccctagtgctcgggtgtgtagcgccgctgacctcaccaaggcgcgtacttaccctgtatgtaggtggcgttgcagggtgtttcggtctcgtgaaaattatttctcatttgtaaagatatgctattgatcctacagaaaggtacgacaacatatgttaggcctgtctgtgttaagataataaaaaccttattatctaaggttttaccctttaccaaacagtgttgacagggacgctgtgaaaaagactgtgaaaaagaattggaatgaggggtggactgagtttcccggagctcagtcatacagaactccaatgaaatacccaaagcaattagagaagtccagttactggtatctagcgaaagagcaaattttatatgaacaaattcctactataaatgctgtggctcatcagaaaaaggaaacaacgtcaaaggctcgctgcagaaaatagtactcgggctaggtctccgacaatggaaaaatacacatacacaagtttattaatcgcagtattgtctgcaattgcaaacttttggaaacaataatgaaacttttgaactagggagcccagcattttcatgttgcccagggccctgcaaattatgtagctagtccagtctgcctctacttgacaaatttgcagaaaaagcagcctcattcacacagtgcaccctgtccctgggccccagttgattgctctttcagtaagcccctgacctaagctcaacccaattaaattcctttcccaagaatttggaatgggaattaagtggcccccacagtctgacacatcgattgaagagagtaaatgtgaattaaggagctatttaaagcgcctaataatagatggacaccatggtagttggctgcaggttgcagaatgaagcagaagtccagaaactagtcaaagataatacttggtgtatccaattagttcccaagaacatattacattaatgtcttctatttccattatccttggacctttataaagtatgtcttttgcagccgggtgcggtggctcacgcctgtaatcccagcactttgggaggccgaggcgggctgatcacctgaggtcgggagttcgagaccagcctgatcaatatggagaaacactgtctctactaaaaatacaaaattagttgggcgtggtggctcatgcctgttatcccagctactcgggaggctgaggcaggagaatcgcttgaacccgggaggcagaggtttcagtgagccaagatcgcaccattgcactccagcctggacaacagagtgagactctgtctcaaaaaaaaaaaaatccacagtttttctactctccaaagacaaaggaaaactttgcataaaggcaaaagcaacaaggaaaaatatcgtgtgaaaaccacagcctagtttcctctaaattctctgactctactctcaaatccaaagtaatcatatatatatgtatttagagatatggtctcactctgttgcccaggctggaatgcaatgacgaaaccatagctcactactgtaaccttaaattcctgggcacaagtaatcctcctgcctcagcctcccaaatgcagggattacagattacagctgtgagctaccacgcctgattccaatgtaataatttttacagattggatgctaatatagctaatgaagttaaaattaaag

SEQ ID NO: 1810 - DNA, 4001 bp, Homo sapiens
taggctggtctctgctgctgggcagatctcgatcacctctgtcccggtccaaggaccaaccatcccgcctgcgatctaggctatccagtggctcgtaagcaggcacagaagtagctgcagtccgagtgctgcgttctcggactgggggtgggggtggcacccaatcagagtcaggataaaggtccctatcacgatctctgtatagtaagggtggtgtcctatcccgagcacccctcaaagggtctggtgcccgatgtccaaaagcatctgtcaccagctcataatgagtcaagggcagaggctgcagatactgctgctggtaacgatgttcggtgtcggcaaagtctactctaaggcgtcgatctgggccaccaagtgggaagccccgcatatgggtccaggcagcatgcgctgcatccaggctttcatactggatatatgcccaactatcaccttttcggtagtctatggtgcgtatggtgccaaatcgatcaaattctcgtgccagggcagcaagaggaacccaaggtcccaggcctcccacccagaggcgggtggtgggtgtagctttaccataaccaattttgataggattccgaattataattttgccagacattgctaatttggcccggtgagacatatctaagttctcaaatttgagaaagccgtaagtactagtctggccgcgagaaggcctcttgatatctacttctgtgatgactccaaagcgatcaaacgcccttcttaaatcactctccgttacagtgatgtctaggttgcccaagaagagcgtccggttagctcgctgatcatcctcgggtgaaatctcatccacttctctgaaaggagcagcacctgctccagctcccacccttggctcaagactgtatgcagggcgcactctctcatagaacgggtagtctctttctctctccaggtctcgaggcaatggtggcggaggtggagggggcaggcggccaagagccaactgctgcagccggtagtctctgtatcccaaagcagcgccaccaggggaaagtgatctctggcctccaccacctccaggggggtgccggtgaccacctacagaggccccgaccacactggctgatggaggataagtatctttgtctaaaggggagcggctgcggcgccggctcacatacacagcttctatcttcagaggccggtcatagagcaccaggcggcctctggcatgcttggccgcccgcgcgtcctctggccgccggaagttcacaaaggctacccgctcatccccgctgccagaacccgacagatgactgattttcacacttacatcaccgaagcgtttgaactcatgaaacaggccgtcctccaccgcttcgtcactaagctgggaccccaactcgcttatcttcagagtcttgtattccgcgccgtccccgccgccgggagctgaggaggcggccccagaggaacgtgactccccgcctccaccccgggagctgctgcgcgattcgcccccgcccgaagaatttttggtgctcggggagctataactatgcaagcggctactggagctgcccccaccggtatcatactcgcggctgccacctcgactgctggacttgtccaggtggagactccgccgcgacccaccgccgctatcggtctttccgctgctgctcccattgctgccaccagagccccctaacttcttgctccgctcaccgcgggaagtcgagtcctcaccaccacgggagcgtttggccttcactggcgagcgctcttttcccttcattgttgcgggtcgtcggaggtcgtctccgcggagctgagtaacccgccgccccgcgctcgtttcacacagcggaaccgcacgccgccatcttggactccgccgcggcacagggtcccgccccgcagtcctcattggccaattgctctctcttctacagtctcattgggaaaattatttgtctatctttacatctccccgcgctccaggaaggcgcccgcccaaccactgttattgggttcccaaccccctagtcggagtacctcattggttacatttgttgtctatcttaacggttcctcgcgccagactgtagctccgcccctcgcactctgcggtcacgtgacccaaagtgttgaggtgttgattggacaaaaagtctgccctgtaacggtacttcttgctcagtgacagcagcaacccacctccttatccctttcattggcttataaacccgtcctttaaaccactatttgggaggtcgggccatcagtttcggcgttttttccagagaggcaggctcacagcgatatcgcgagagacggtaagctccctctttcgaccccctttttccaactcctccggcggctaaaagaagtttaaatctgattggatgtcggcaaggaagttgataggctgaaataactgtccatcactcgcttaaaggggtaggcctgtataacggaggaggctgactgaaggtgaaagactagaacacgtgcttgctgtgcgacgtcacttagatgtcgcgagagggtgactgtgcgccagccccgcctccccgcgttttcggcgttctccccacaaacatttgttaagttccgtggggtgtttggctgtgcttcggcccttggagttcgaaacttctgagctccccgccgtcgtacctgtgccggccaaggggcggggcaggctttccggctgtcggggccctccagtccctcaggaagccgtcctgggacgcctagcggacaccattttacgtcgctgtggtagctgagtgaacagccggggggagccccgccccccgcgcgcgggagagcgccgcccgcggtcacctgggcccgcggggcagagagttcacggttcctgcagcctcgggtcatgctgacgcccccgggcggtgctaacacgtaacacgcgggacctcgagagctaagaagcagggcgactaagacgcagccctcgcccaggagcccgtctctcccgcgagctacccgttcccgcccaagtactccgggtaaccgaggggagtgaccgtcgctccccgcctcgtggcccgcgggcggagccggaactgtcgggacaccgcggacgtgtctttgggcggcatgttttatgttgcgaatctgtgtggatttttaaattctgtattcccctaaaatagcagtgtttttaatatgtaatgcttctaccctgaaaatcaccaagcgaaatttaggctccatgcagatatgtcacttgtttttccccctgtggcttcttgtatcccttggcactcttattgtgtgttaaaagccagcagcacaggcaccttgcggccgctccagatccacctcgtttggctccttcagtcgttcgccgtacaactttcctttccatagtgcgttactgtggcggacagagcacctgtgagaggtgcaggcgatgccgagcttaggggggtatggcctgtgccccagcactcgccggttgctggagggacgcagcgctgaggtcaccacagcctttagactgtctgcagccctcccaggttcgcgccggggcggaggttatgaggattcttgtattgatccggtcctcaaccctatttcccaagatccaatctatagtagagggtgtgaggtgtttttaaacgtgacatttttcaaggtaacaataatatcccaaaagctgaaacctaaacttaaaaactgtgttaagattagggactgtaacctaaatttagccttggctgagccatccttctttttgtaaataatcgtgaggaatgtgaagctggaggccttctatctcttgattagatcaaagaaactcgaaggaagaagctcaattgtaaagcataaaaatccacaatattgtaatgtgtagacatcttcattgtattaaaatgggaaataaaacttcataaggcataaaataatgtgtataatacgctaccatttgtggttttaaaaatgtttgtatttatgagtatgtacatttaaaaaatatattt

SEQ ID NO: 1811 - DNA, 4001 bp, Homo sapiens
gaacaccaaactcggccaggtgtgatggctcacgtatgtaatcccagcaccttgggaggcggaggcaagtggatcatgaggtcaagagttcgagaccagactggtcaatatggtgacaccccgtctctactaagaatacaaaaatcagctgggtgtgatggcgcgcccatagtcccagctgctcagtaggctgaggcagaagaatcacttgaacccaggaggcggaggttgcagtgagtcaagattgcgccactgcactccagccttggcgacagagtgagactccagctcaaaaaaaaaaaaaaaaattttttttttaaaaagcaaaccaggccaggtgcagtggctcatgcctataatccctgcactttaggaggctgaggtgggtggatcacctgaggtcaggagttcaagaccaacctggccaacatgatgaaactctgtctctactaaaaacacaaaaaattaaccgggcatggtggcacctgtaatctcagctccacgggaggcctgaggcaggaaaaatcacttaaacccgggaggtggaggttgcagtgagctgagatcaggccactgcactccagtctggacaaaaagagcaaaactccgtctcaaaaaaaaaaaaagaaacgcaaaccaaattcttttatatacatgctgaaatatttatagatgaaacataaattttcattttgcttccaaataatgaggtggtagctgggcgaggtggctcacacctgtaatctcaacactttcggaggccgaggtgggcagatcgcttgaggtcaggagttccagacctgcctggccaacatggtgaaaccctgtctccactaaaaatacaaaaattagctgggcatggtgacgcaggcctgtagtcccacctactcagggccgaggcaggagaatcgcttgaacctgggaagcggaggttgcagtgagctgagatcactgcactctactgcagcctgggcgtggcatcaagactccatctcaaaacaaacaaaaacaaataatgagggggtatatgagtggggtaaaaatacaaaaaggttagccaaatattagtaattgctgatgctgagtacacggggtttcttagccttttcaacttttctatatgtactggattttccataataaaagttttgaaagaaagtagaaatatgaaataaaactgacgaatattccaagtataggaatgttaatttaccatctaatttctttaacatcaaataagagaattttaccaacctgtctgccaactttttttctgcgttagtgtgtttcttcttcgctttcacttttttggcaggttcttgcgaaagtggtctttcaatctgggatgtactttcttcctcctcattccgtttcgtttttttgatggtttgctttttaaaagtttgaagttatatttgagaccccatacttctagaattctgaccctaagccataattcagtctttctaaatgagaatctcttctctctcactggtatgtaagagtcatgaaaggttacttaaaatgaatcctgtctgccccctttagaaatcacgcttcacgcggtaggtaagaagattgctttgtatgtaagtggttctaacgagctattcgggaagaaagcccagtgacttactttaggcacaggcacgtacacgggttgaatctggggctccagagaactgaagagggacgccagccgaccggtgccacctctggaatggtgttcgccgcgaaataagctactggcgacctgtccaagcctgtagtcttccggcggactcccgcgaacgccgtcgtcaggattctctctagaaatggacgacagaaactcagccacgccacgcaccaccgcttcgccagcacgagggaacgtacaacatccctccccaggtactcgtgccgcgcgccactcacccctcctggacacttctctttctcttccgtttgctcatcccttccaaggccattcttactccaaagactcccagactgcagctgcgcgccagctcgcacttccgggttccgggcacttccgctctctggccacgccccctcccctccggcagtcggccgccgggcggcggcgaagggaggcgctgggtgagggagcaggtttgtcgccgtcggttggtggtcctcgccgtttcagaaaagcctcattttgggagtgaaggacgtcttctgggagtggttgaagcctgcagtgtgaagaatcagccaggctaggagcggggtgtccacccaagccgagagagaaacacgtagaatactgacttgttgaaaaggagggagggaggtttggcaagaaatgcggttaggggtgaacgcagtggggtgtttacaatttgctaatcgctgtgaagagtacaaaggaattctttgtactcttcttgcaacttgtctgaaacatgacattattccaaaataaaaaccacaactctaacgagtcacgtcaacatacaattcgaaagattgtaatgcggacctgctattctacctggaaaagtagatacttggcattcaaaacgcttcaaggtgttctcagcccgtcttcccagactcatctccctccagcccctgacattctagcctgctttctccactgcctctacagttgttattcctgtcccctctgttgtaattgccctcctctttccccttctgcaaaataatgtccatccttcaaggcctacctcagatactgtctaacttagtatttctttgcagccaggtgcggtggctcgcctgtaatcctaacacatttggaggccgaagtgggaggattgcgtgaggactaggagtttgaaccagcctggtcgatctagcgagacttattctctacagaaaagaaattagacgggcaccttcgcgctcggcgcctgtagtcccagcactttgagaggctcgggcaagaggatcccttgagccctggaaggtcgaggctgcagtaagctgtgatcgcatcactacactccagcctaagcggcagaccctggctcaaaaaaaaaaaaaaaaaaattctttgctatttacaatagggatattttcccaagcccccatggtacttactataatcatttttggtctgctttagtgttagttacagtctctttagatgtaaaggcaagacagtaaggattatgttttattcatcatgtatgctgtgtctctattagctgtacatagtgaatatttgttaaattgactctcagggtaataaaagattactagttaaatcatccaatagtttgagtggcaaaataggatttgactttgttcttattttctttcagacaaggtgttgctctgtcacccagactggagtgtagtggtgagatcacggcgcactgcagccttgacttcctgggctcaagccatcctcccaccacggagtagctggaactgcaagcagcagcaccatgcccagctaattttttttttttttttggagacagagtctcgctctgtcgcccaggctggactgcagtggcgcgatctcagctcactgcaacctccgcctcccgggttcaagtgagtctcctgcctcagcctcccaagtagctgggattacaggtgcatgccaccatgcccagctaatttttgtatttttttagtagagaccgggtttcaccatgttagccaggctggtctcgaacccctgaccttgtgatccgcccacctcagcctcccaaagtgctgggagtacaggtgtgagccaccgcgcctggcctttttttttttttttttttttaaatagagattggggtttcactgtgtttcccaggccggtcttgaactcctgagcttgagcagtcctcctgccttggcctcccaaagggttggaattacaggcgtgagccactgcatccagccaggatttgactttgagtcttttggggacagcctaagctttttgaaagctactcaaccaagttgactgggaatatatgtgacttttacttcccccttcagagaaatttatgaaaaaaatccacaat

SEQ ID NO: 1812 - DNA, 4001 bp, Homo sapiens
ttgaagctgcagtgagctatgatcagctgcaatccaccctgggtaacacagcaagactctatctcaaaaaaaagaaaaaaaagaaatacatagagttcagtccctagaagtatcttcacaatgatccatacagccttgctatgctttagaactttcaattttaggacaggaaagtaacattaaatgtagaaaacaaaaatggaacatttattcgcaactcaaatactacgcatatacggtaagagattaaatataaacacagcaagttccaccccagtcctatttgtccaaggctgcatggtcaaatggaatcttgaagagaacacctggacaacagaggacctgtcagcgacgtctccggtctggacttctgctgcgtcttcggccacctctagggaaaaagaagcagggagaggagtccattagagggacataatactaagtcctcattctgtttcgttcgtattcccttcacccagacagtatttgccctcttcattttacctcctcttgccttttggtggaccccgaacaaaacaccagtcaacgctgatgggctgtcccatcaaatcctggccattgagtccctccatagcagcctgggcttccttgtatgtttcatattcaactagagtatacccctggggaaagtgaaaagacagatatgaaaaccctcctatttccccaagtatcactgagtatctttttcctcaaatctaaactcagaaaaatctacacactttaaacaatgaatgtacatcatatatctctactgtatatatacatcatctccgtttctgtctctttggcgtgtctgacaaaacatagatttccaatgtcattttatttcaactttgctcttggccaaccacagcaaacacagaactacgaatgctacctaaggcttatgaaagaaaggaggcaataaagtgtcacttaggataccttcagatatcctgttcgcctgtcgaggttgagatgaatgtttttaatttccccatattctgcgaatttgtcgtgtatgtcttcttcggtggcttcctcatggactccagttacaaagagaatccagccttcaacagctgttgggggacggggggaagttgtatgagtacatgagagacactttaagcaggctcacaggaatagagtgagtgcggactcagattgtttaagctatctctgaacccattcctactgcgtttaactattttattggtttctaactactaccacagacacggatacctcacaggttccattattactcacagcgttgtggtccgggttcatcgccatcctgctccacgctgtcataatcctcacgcatccgcgctcgggacccctcttctataagggacatacacgagatcaccgaaaactcctcctttctcccattgttcctatgaggtgggtggggactccaaaacccgtagctcctgccctactaggccactctaccccattttccccacactcaccggagccaaagccgcgacccttccgtttcttcgctttttctttcagtttgtgaatgctctctggaaccccagaagataaaagaataagtaactatgacagtcatttgtaacaatcgtctctttcccaatacactaccagcaagccgacccacaccgcctccagtcttagtgccttcccggtcacgccctcccttctcctgaagggggcggaatctctaatccacccaagacccggttcctcgattcccatccttacgaccgaggaaaaaagagtaaattttcctattatagccttctctcgcaccttccccgcttcccaccagccgtctccactgtcctcaccgtccccatcctcatccatggcgaaatcttcgcccccagcctcgtgaagatctagcacgtccgccatctcgccttcgatcgagatctcgtctgtgccgctcagacactaggtacctcgggaaactgtcgcagaggggaaaggtcgccagtcaagctgaccaatcaaaggctaactctaaatccctccctctgcacggtaaaaacacgcaaattggggcgggcctagtgcggaaagataccggaagtgtttctgtggccatcttgaacagatcgcaagctaaatcatccatcttaggaggtacagactacagggggccgtggcttcctcttaaccgcggcagctgctgataaatactgtactattaacagtgaggcccggcgtaatttccttattagagggcttctttacgtctcttcatcccaaactgggaaatggtaattgaagaaacccttttctttcaaaaatcccaggcctgtaccctgtctttaggcagcgtggtgtatgataggagcgtttttaaaaaatagtttgatcagcagtgagggcataaagagctgcttctggaacctgcagcaccaaatttctcttcaggaaactaacagacttggttgcaatacggttggtgagacagatatcaattttttttttaaatataaaactccctgcctgtaatcccagctactagggaggctgaggcaggagaatcgcttgaacccgagaaacggaagctgattagctgggcgtggtggagtgcacctgtaatcccagctacctaggaggctgaggcaggagaatcagttgaacccgggagacggaggttgcagcgagccgagatcttgccactgcactccagtctgggggacaagagcgagactctgtctcaaaaaaaaaaaaaaaaagtgaataagagtaaaacgaaaaataaaatttaaaaagcgattaggagacactaattcattctccacagtaggtactgtgatcattttaaaaatcagttggttacatacctactaaaaatccttgttgttgttgttttgagacgtagtctcgctctatcacccaggctaagagtgcagtggtgcagtctcggctcactgcatcctctgcctcccgggttcaagcaattctcctgcctcaagcctcctgagtacctgggactacaggcgccctccaagcctcctgagtacctgggactacaggcgcccccccccacacacacacacacacccggctaatttttgtatttttagtagagacgggatttcaccatgttggccaggctggtcttgaactcctgacctcaagtgatccaccagcctccacctcccaaagtgctgggattacaggcgtgagccactgcgcccggcctaaaaaccctttttgttagaggggtttggttatactacccaggctggcctgaaactcgcctcccaagcatctgggacgacaggggtgtaaccatgcacccggctctttccttggcattttgctgcacttagaataaaaattcaaactcacaaagcctgctctgcctgtgttttcaacctgttcaaccaccgttcttctccttcacccatgaagctctccttgctctttcgcccaactgtggtgtgctctttctcatcccagggcttttgcaacttggtttgttttgtttttgagacggagtctcactctgtcactcaggctggagtgcagtgatgcgatcttggctcactgcaacctctgtctcctgggttcaaggcttctcctgcgccagcctcccgattagctgggactacaggcgtgcggcaccacacctagctaatttttgtatttttagtggagacggggtttcgccatgttggccaggctggtttctaactcctgacttccggtcatccgcccttctcggcctcccaaagtgtttggattacaggcatgagccactgctccccgcagctttctgttcctggtgctcttcctctagcttttcacatattgggttcgacctcatttttttttttttttttttttttttgagatggagtatcgctctgtcacccaggctggagtgcagtggcacgatctcggcccactgtaacctccacttactgggttcaagcgattcctctgcctcagcctccggagtagctgggactacaggcacgtgccaccacgcccagctttttaaaatt

SEQ ID NO: 1813 - DNA, 4001 bp, Homo sapiens
aaatcatggcagaaggcaaaaggcacgtcttacatggtggcaggcaagagagaatgagagccaaatgaaaggggaaaccccttgtaaaaccatcaaatctcatgagacattcactaccaccagaacagtgtggggaaaactaccccatgattcaattacctctcctcaggtccctcccacaacacatgagaattatgggaactacaactcccatgagatttgggtggggacacagccaaaccatatcacttggcatttgaggaaataacagtagcaggaaggtccccctcagaccttcttttgcccctcttccctgaagcaggccataaaagaattctctgctcttcctctgaagaagatcataagactctcaagtgagaggtgcttttcccatacccagaggaacactcttatctcttgggatatgaaagagcaaaataaatgcccctttatcaactaagatgggccctaaggttaagaaaacaaaaattggccggtgcggtgcctcacgcctgtaatcccagcactttgggaggccaaggtgggcagatcacgagggcagatgttcgagaccagcctggccaacatggtgaaaccccgtttctactaaaaaatacaaaaattagctgggcgtggtggcgggcgcctatagtcccagctactcggagaggctgaggcaggaaaatggcgtgaacccggtaggcggagcttgcagtgagccgagatcgtactactgcactccagcctgggcaacagagcgagactccgtctcaaaaaaaaaaaaaaaaaagaaagaaagaaagaaagaaaaaaagaaaacaaaaattgcccacgggtcaagggttcagggattggccggcacggcaacttcccagattcctaaagctacaagaaaaactacactcgtggcagggcgcgtggctcacacctgtaatcccagcactttgggaggccaaggcgggtggatcacctgaggtcaggagttggacaccagcctgaccaatatagtgaaaccccttctctactaaaagtacaaaattagccggacgtggtggctggcgcacgcgtgtaatcccagctacttggaaggctgtggcaggagaatcgcttgaaccgaggaggcggaggttgcagtgagttgagagtccgcgcaccgttggcaccgcgatgagggcgggaagcacagcgcggggcccccgggagcaagaacgccgcgggcacccagccctcgtgggaggcggcggtcggggcacgccccgggccgaaccaggctctgcactcccgcgggtgcccggacctgaagggtcgtccgctggctccaggattctgcatccccgacccgctccgggtgcgccgaggctgctgggacttcgctgcgggagcgcgcccggggccccggggcctgcacggaaggcggctgcggggagggtggccgggcagaggcttcggtcccgggcgccccctccccggccggacccccctccccggccggaccccgagtctgcagtctccgcaggtgtgccgcgtgcgggtagagacggacgtggggctggacgcgggcactcagggacggacgggtgggggaccgacggccgggggaacagagggcgtggagagacggccgtggggacaggggggcgggtgggcgcgggaaaggacggactgggggactgaaggactggggtcccgcgcccgatggacggaggcgccaaggaccagcggactcgggggcgactgggcgacggtgggcgcagcagggcggaggcacggacagaggacgtacctacaggcccggcccggccgccttcgcctgatcccgagacccacggcgagcctcgcgccgccgccgcctcccctccgccttacctagggccagcatgtagccctcgaagttgtcgctgctgagcagggtccaagtaccgctgaggtcggcgggcatggtcggggatcgcgggacaaacccggcgggcggccggaggctcgggccgggacctataaaccaggcggggcggggcaggggggtggggccgcgcgcgggaggagcaggtggggccgcgtgggtcccactcacccctagaagccgctgcgctcccggccgcctcagcccggtgctcctggctctgcccaccgcgcggcagcttccccctttccttggggcttcctctcctactgctttctcatgtcccagactgtttcgggccacattttcttccctgcttatatgttaatgacccagggatgatcttcaaactcatggcattgaatattgtcagcttcaataacaatatacctctcaacgtaactctcatggtctcaataaataggagtttatttttcttaacaaggagtcctgagagaagtgattgctggtgatgattcgcacctaggaatcacagtgattcgcacctcggtaacgccgcagcttcgtctctgtgactctggtggccttttattcctgcttgttacctcctggtcatgagctggcagctgggttcccagccaggacatccacattcaaggtagggaagagggaaagcaccaaaggtcagtatccctgcagcacaaacctccccatctcctataagtctggatagttggaaaaaagaaaagaaattacccagcaggtttctgtgtacatttcattagccaaaactgtatcaatgccacttctaactgcaagggggcctggggattctagtctgcagcatttagcctcagagcagagaaaagcaaaggagaaggggtgggaatatgggctaacctacaacattagccacaaacaccgcctagatatgctggctccaagactgacttattgattttatttttattttttttcttttgagacagagtctcactctttcttttttctttttttttttttttttgagacggagtctcgctctgtgcccaggctggagtgcagtggagagatctcggctcactgcaagctccgcctccggggttcacgccattctcctgcctcagcctcccgagtagctgggactacaggcgcccgccaacacgcccggctaactttttatatttttattagagacggggtttcaccgtgttagccaggatggtctcgatctcatgaccttgtgatccgcccgccttggcctcccaaagtgctgggattacaggcctgagccactgcgcccggcagagagggagtctcactctatcgccccgggctggagggcagtggttccatctcggctcactgcaacctccgcctcccaggttcaagtgattctcctgcctcagcctcccgagtagctgggatcacaggtgcccatcaccatgcccaactaattttttgtatttttagtggagatgggggtttcatcatgttggctaggctggtcttgagctcctgacctcgtgattcgcctgcctcagcctcccaaagtgctgggattataggtgtgagccaccgcacccgcggtatttattttttcatttattctttttattttattttattctattttattttttgagacagactctcactctgtcgcctaggctggagtgcaatggtgcaatcttggctcactgcaacctccgcctcttgggttcaagcaactctcctgcctcagcctcctgagtagctgggattacaggtacctgccaccatgcctggctaatttttatatattttagaagaggtggagtttcaccatgttggccaggtaggtctcgaactcccaaccttaaaagatccacccacctaagcttcccaaagtgctggaattacaggcatgagccaccacacccagactgactattttttgagatagagtcttgctctgttgcctaggctggagtgcagtggtatgatcatggttcactgtagcctcaacctcctgagttcaagtgatcttcctgcctcagccttctaagtagctacaactacaggcatgtgccaccatgcctgactaatttttttaattttttatagagatggagtatccctgtgttgccggcggttggtc

SEQ ID NO: 1814 - DNA, 4001 bp, Homo sapiens
tacaaaaattagctgggtatggtagtgcacacctgtaatcccagctacttgggaggctaaggcatgagaatcacttgaacttgagaggcagagattgcagtgagccaagatcacaccactgtactccagcctgggtgacagagcaagaaaaaaagaaagaaagaaattatgaaacactgtaaacacatttttacaccttagaaagacttttgctttttcagacaactgatacttatatactcatcttatatcctgcaactctgcctagttttttgtttctaatagcttttcctttgcagattccttaacattttctatatataagaccatgtcatctgtgaatgagattgtttttattttttacttcttatctgaatgtcaccggtttcatttacttgcctaattgccctagctagaaggtcctgtatgatgttgaacagaaatagttaagagtggagatccttgacttgttcctgatcttacagaaaaagcatctagtctttcaccattcagtatgttagctgtgggtttttcatccatgtcctttgggttgaagaagtttttctcctagttgtttcagtgcttttattatgaaaaggtattggattttgccaaatgctttttctgtgtctattgagatgatcatatgtgtgcaattttgcaacttttactgatatagtgaattacattaattgatttgcagatgttaagtcaaacttacattcctaggagaaattggtgattatatattttaaagtctaatttattttttctttttccttttagatgaaaggaaaatttgggaaaattttattttttttattgtgataatatatacataacacaaaatttaccatcccaaccatttttaggtttataaagcattaagtgtgttctaatggttcccaaatgttgtgctatagtttttgtcacctttctcatctttcatttcagttaatgtctactgagtaaaactgcctgaagcagctgcaccttctctactgagtaaagtgcagtggttttatgaacaatagttttctcaatgttaaaaaaggtccttatgacttacctcttaggtttcttttctttttttgagacagggtctcactctgtcacccaggctggagtgcagcacgatctcggctcactgcaacctctgcctcctaggttcaagcaattctcgtgtctcagcctcccaagtagctgggattacaggcacacaccaccacacccagctcatttttttgtatttgtagtagagacaggatttcaccatgttggccaggccggtctcaaacacctgacctcaaatgatccacccgccttggccctcccaaagtgctgggattacaggcatgagccaccacacccggccttaggtttctctagcgatctgcatagctaggtttattgaatatctgacaagattaaatggatgttactgtactatgactaaaaagcactggactaccacaataaatctaacatgctgaaataaaggatttacagtaccaaacagaattatacctatttaaatagaaggcaatgttacccaattttaattcaacaggtttctctcaggagaaaaacacgcacaacacacacacacacacacacacacacacacagagagagagagagagagagggagaaatttaaaagtattaagtcacccatcctacctgagcacccacgagctgcagcaatgctgagttcacagggaggagctcaatgtctgtattgatagtggtctggtcaaatgggcaagccttgcggtggagtttattcaggcacatcttgcagacagtatggccacaacccaaactgatgggctttcgaattgtttcgtcgaaagtctgagtgcaaattgggcaggagaggaaatccgtccattgtggagcttgtacaggcattgcttctggagttacaattcacgaacacaaacacacacacaaatctaaagcaaagattccactggaatcaaaatctttgaaaaaaagtttatcttttttttttttaaatatcttctgtagatacagtcagcacatagtgtgaaatataacctgaaaataaagaaaaaggaaaaaaattgagtgtctttcttttcaattaaactgttgaaaaagaaccacaagtccagtcttattccacaactttttataccacatttgtatcactgtaatccatctttttacacttttacagaattagagccatgatagaacatctatttccattccctcattttagagatgggaagtagtcccctgcctaagaggaaacttgaagttaataataaagttccatccaggaccctagtctcttaagtttatctaagtcttttttttttttttgagacggaatttcgctcctgttgcccaggctggagtgcaatggtgcaacctccgtctcctgggttcaagcgattgtcctgcctcagcttcccaagtagctgagattacaggcatgcaccaccacacctgactaattttgtatttttagtagagacgggatttctccatgttggtcaggctggtcttgaactcctgacctcagatgatcctcccgccttggcatcccaaagtgctgggattacaggtgtgagccaccatgcccagctaaatctctaatttttaaaaaataaatatatctaaaaaataatcttggctgggtatggtggctcacgcctgtaatcccagcaatttgggaggccaaggcaggcagattccttgaggtcaggagttcgagaccagcctggccaacatggtgaaaccccatgtccactaaaaatacaaaaattagccaggcgtggtggcaggcgcctgtaaccccagctactcaggaggctgaggcgggagaatcgcttaaacccgggaggcggaggttgtggtgagccaagatcgcgccattgcactccactctggggaacaagagtgaaactccatctcagaaaaaaaaaaaaaaaaaaaaaagctttgttggggaagggggtagagggagggaagaattactgaacaagacataaataacttttgacagccaggcgcggtgtctcaggtttgtaatcccagcgctttgggaggctgaggcgggtgggtcacttgaggttgggagttcaagaccagactggccaacatggtgaaaccccgtctctaccaaaaatataaaaaattagccaggtgtggtggtgcatggctgtaatcccaggaactcgggaagctgagtaaggagaattgcttgaacccaggaggtggaggttgcggtgagccgagatccgccactgtactcctgcctgggcgacacagtgagactccatctcaaaacaaacaaacaaacaaaacttttgacaacataagaatattttaaaagtagaaacaatttatataaacatatgtttcctctgtatttataccacaatcttgacagactcatacaaatttttcaggctgggtgtgatggctcatgcctataattccagcactttcagaggctgagatgggaagactgcttgagcccaggagtttgagaccagcctaggtaacatagggagaccctgtctctacaaaaattagccaggcgtggtggcatgcacctgtggtcccagcaacccaggaagctaagggctaaggtaggaggatcgcttgagcccaggagtttgaggctgcagtgagctacgaacatgtgactgcactccagcctgggtgacagagcaagaccccatctcaaaaaaaaaaaaaaaaaagaaaaaagaaaccttattccattcccaggaaaaatttaatttagttaaatgacaaaaaaatgttttattggtctttactatgtgttcagtactaacgataaaaaaaagataagtcattctaagtccacatggagcttgcactgtttctttcactaaacatataaacagcaatcacataactaaatatataattgcaagttatggtaagtgatatgtaggtaaagtacagggagatacaagcatatataacagaggcaac

SEQ ID NO: 1815 - DNA, 4001 bp, Homo sapiens
agcctaaagatgtgactgaattcctgcaatctcaaacaaaacctgaatggaagggagttggcttcctgtgaatgagcaaagagggtggtctcttgagataaaatctactcctggggaagatactgtaaacattgttgaaatgacaacaaaggatttacaatattccataaacttagttgataaagcaatggcagggtttagaggattggctgcaattttgaaagaacttctactgtaggtaaaatgctatcaaacagcatcacatactacagagaaatctttcgtgaaatgctgttgtcttattttaataattgccacagtcaccccaaactacagcatcaccaccctgatcagtcagcagccatcaacctcaaggcaagatcttccaccaacaaaaagattacgacttaatcgtttgcattattttttgagatggggtggggtctcactctgttgcccagactctagtgcagtggcgtgatcatgttcactgtagccttgaccttcccatgctcaggtgatccccccacctcagcctcccaagtagctggaactacaagcacacaccaccatgtccggttaatttttgtattctttgtagagatggggttttgccatgttgcccaggctggtctcaaactcatgggttcaagtgatccactcgcctcagcctcctaaagtactgggactataggtgtgagccaccacaccaaccgatcattagtattttttagcaacaaagtattttttaaatgaaggtctataaatttttttaagacatatgctattgcacacttaatagactatagtatagtgtaaacaagacttttatatgcactgggaaaccaaaattcgtgtgaccggctttattacaattatctgtaacgaaacccgcgatatccccgaacaagcctgtagttgaaacccagtgtcaggtctcagcctatctctgtagcacatgacctggctgcctattccattcattcttagacctccctgtgtccctgccttctgggtcttgcctcttcctggcccttcttcctcaccagctctatcttttttactgcctctttctccacatcctcatccttttttcatctttctctcctgcgtgactttatccacactggagtatttagctgcctaatcaccagaggttctcaactaagttcctgcctccctgtggttcacacacacctgtgtcaatactggctctcatttcgtgcaacgaccttaagacaggatgaatgtcaccaaagttgggagggaagccagagcagaaccttgagcaataaagaggatgggtagtttggaaaagtaccatgtccccaagagcctgtgatctacctgttggtctttcctgcctacataccctgaaaatcagtcatccatatgggtacattcaaatttatataccaagactcactctcaatcctgagttctagtcttgtatttttcactttttctttcttttttttttgagacggagtttcactcttgtccaggctggggtgcagtggcgcagtctcggcgcagtggcgcgatctcggctcactggcgcaatctcggctcactggcaacctctgcctccagggttcaagcgattctcctgcctcagcctcccgagtagctgggactacaggcacatgccatcacacacctagctaactttttgtatttttagcagagatggggtttcatcatgttggtcaggctggtctcaaactcctgacgtcaggtgatccccccgtcttggcctcccaaattgcaggcgtgagccgccaccacgcctagccgtatttttcactttctattgaatatatctatctgggtggcccacaggtacaacaactgtttttaacttactcatttatcgtgccagaaatctccaatctggaaaggggccctgcggaagcggggcagggagtgacagtgtatctcactgtggctttcattaatcttttcttcaagacaaagttgtcaggtggacttagctcttacagtgcttggttcatttttctgttatacacttacattgtgattatttgtttacaaatcactcctagctacaagactgtatctgtgaaaccccaggccctggcatagtttcccgctcacagtgtatgcttaataagggaggctgaataacagcaggtagtattttagttaccccactgatatgtcagcacagacaaaggtaaattgaattctgcatgggattagagatagcttcccaaggaggcaatggtgagacttcaaggatgaacagaatttcaggaggaaaagaatggggagcattccacacaaagccagcaggacatgaacaaaggcaggaagacagtaggaccagcatgcacaaaggtcacgtgatctggcatggctagggtgcaaggtgtttggtgggggtggcatgagacagtcggaaaggcaggtatgggccaggttgccaagcaagtagggttacagagttttgacacaaaaaccatgtcaatatcagcatgccattgtgggtttttaggcagggaaatgataaaaccaagtgcaatttaacttttagtatctctaaaggtgggctgtctttgtatcttatctcttagaggcactaatgtttctatcctattcccaacccattaaaaagaggtagagaaaatactgtgcccgggtttttggaggctggtaagttggggagctctggctgactagattttgaaatttgagaaagtcaacctattcttgataagatttgtttgtttcaagttccctcgtctaacccgtaaaaagattttaaaaaacagaacacaggaaataatccttcacctgacttaaaaaaaaaaaaattcttagaatatcacaccttcatttcctgttttctaccttcaattttgagtaccttttttttttttttgatataacttcaaacagaagttataagaatagcacaaggaactcgggtatgctgtatcctttacccagagtcaccaattccttctgttttgaccatctgctttatctttctctatttttatagacatgcattttcctgagccattgaaagatggagcataccccttttacttccaaatacttcagtgtataagaacaagatcattttcttatataacccataggataattatcaaaaacaggaaatttaacattgatataatactattatctaatacataatttgtcaaatgcataatctggattcaaattttatcagttatcctaataatgtcttagctattttccttcaatttttctttagattattgtcaaattatttgtcgtttgtcccaagatatctatatttctttctttttccttttttagagacagggtctctgtcatgcgggctagagtgcagtggtataattatagctccactccaactatcacaagactaaactgttcctcagtttaccaatccagggaactcttgactggcccagcagaaagggctgaaccgatatcctccagctcctgtaagcaaaagtctgtgctaatccaggtttcccgtcatctccagcacaactctaactacggctggcttctggcaaattgtttcttcatggaaatatcaaatgagtggaaaaactccaagtagcatgaccatctgctctgccacaacaggcctgtgacaaaagtcatctatcaaggcaaaatgtcaagcacatggcatggatcttgcattttctgttctgatcaggaaaacgcaaattctttctcctccaggattaaaataataataatttttcaaattaataggcttcccaacttggtgaacatttcagtatcttagctagatgtacttttcactttttttgtatgttaaaaatgctaccaaacaatactggaagcaaacaagtgctccattatcagctctacaagtgtcctgctgtataaccttgggaaaaatcccttggtttttctgtatttataaaatgaacaagataaaatacataaagtgtataaaatatataaaataaacataggtgctt

SEQ ID NO: 1816 - DNA, 4001 bp, Homo sapiens
agcctacaaaacatatgaaaacaacaggttttaaagaataactgaagttgagatatataagactgatgctatttgttgtgctgtgtataatttcttttccctggatagaacctctacattctaggggaaaagtggagattgctgtccgacctccaccttctgtgttttttttctaagtaacaaacggtgttgaactttagagcttccattatttcacaggcttcaggctaatggatttccgcgtcacactatttttcatgctttaagtccttcaaccaacaactctaacaccatataaaatctgctcttgtctgttacctaatgttcacatgtttgaaacctttacaaacgttatatttcaacagcaggaaaaatcttgtttcctagaaaagcactgaaatctgttttcaggctaagagagaaaaggtttggctgggtgcggtggctcatgcctgtaatctcagcactttgggaggcagaggtgggcggatggcttgagcccaggagttcaagaacagcctgggcaacatagtgacacccaatctctacaaaaaattagccggcatctgtagtcccagctactcaggacgctgagaggtgggaggatcgcttgatcctgggaagttgaggctgcagtgagctgtgtttgcaccactgcacttcagctggatgacagagcgaggccttgtctcaaaaagaagaaaagagaagagaagagaaaagaaaaggcaaggcttgccaatgcagtaaaatgtaaagctgatgacctggctaaagaagagactcagttttcaagcttttcacagtcttcctggatggaaagcccatttctagatcaatttaaatccccaccaaaaagaacacatttgtgtgatgcatatctggctcctgaattatgtgtttacagagtttaagatattgaaccaaagccaatgaaatagtcttaaaacaaattactttacatcgtatgtaatcacagctacagataaatcaattgcttcttttgccaaatagtacatcagagacttctatgaaaagttcaaataaatgtggtgtacttggtggcttccaacaagtggaagcgaatatttttggctttcagcactacaggaaaacatcactttaaataatccttgtttgtatctgaaacacggatctggattgcttcctacactagaatcctaatctctaaaggagatgatcagattttgcacggaagctagaagaatcaacctggaacagatcactcctgccctacctgtccaggcggcggacagaagcagacagacaagtttcaagaagttagggagtcactaatgcgatggtgatccacgcaccgtgggggaagcggggcaagggagaaagacagggggcttccaccttccaggcgcccctacaccgctcctgccttcacaggcaggctgggcctgtcggcttttcaaaaggtcaaacacacttggtgggagaaaatcgttggtggagaagacaaaacatttttgttttgttttccgggacaccaccctcgaggctgccagactagaccccgcgcgcgagaagggtgcggcgggaggcgaggtcgcgggaggcgaggtcgcgcgcggtagcatctcccggtcccgcggctcggagtgcccacccctcccggacttctcggggcggcttttttttttttttttttttttttaacttttcatgcaccaccccccccacccgccccgccccgccccgccccgcgctgggtgcaaacctgctggagaggccgggcgccgtggggcctcacctgcacgccccgccgccgcaggacgggagccgggagggcagcggacgggcccgggctgcccgacggggctgcggggagccggacggcgcgagctgcggggcctctgggagcctggtgggcggcgggcggggccgaaggcagagccgggagccgcctgcagcagcagcctcgccgccacgccctcgacgccggcgagagcggccccctgggctgggactagggcggtgtcccggctgagctaggctgccggcgccgcgcgcccgcctcgtcccctcctgttctggcagggcgcgcgcacggcggcgcaggcgccagagcccaggacaaggcggggacccgggcggggaccggggcgggggcgcgcgggggccggggtgggggtgtctcgccgcgcgcgccctcctcccgctcctccgggttcctggtccccagcctgtggggggcttgggctgtagcgctggggcgggggctttagatcaccccgaaaacaggacctctggcgaccttctcgttttccaccgggagcggagagagccgatctccttttcctgctagccccgtaggacagtccccggagcagctcataggaatatgacgaacgtttactcagggctggttactatgtacactgcgccccgcgcgcggcgagtttacctcggttcacctcccggcaaccggcggcccggatattatcagatgctgtgggcttcccggcgcctcattgcccgaggagaggcggccgcaggtagctgagctggagctagcacaaggtgtgggacggcacaggctgggtcccgccctggcgggtacaaccctcttccccttacccactccttcccctcccctcccatcccctcccctcctctcctccccactcgtgctcttctccctcctcccgctctccctcctcctcttactcctcttcaccctatgccctatctaccgttgtcatacaatccacatgtttaatgctttctttttcgtgtaaaaacccttccacgcagtcttgcttgtctccgacgccttaggagaccatgggacatgattacaactattacgcaaagggaagagccggggtctaagctgttgagcgagtttcagtgataggaccgaggcttacattggcaggtattattaccaccaataacaactatgatgacaaagctcctgagcccaacttggaaggcagctggtgtctcttcccttagccggcagagaaggaagcagggtcacacagcagggaaaataactgggctcatctcccacctacaaggacgcgcagtcacgcagtggtgcgcacccgtagtcccagctaactcaggaggcagaggtgggaggatcggttgaggccaggagtctgagaccagcctggacagcatagcaagactccgtctcaaaaaaaaaaaaaaaaaggaatgtgcagttagaagaaaatcagctctcattacccactcaagacctttcagaggcaaagtgaggcacagtgaagcttaacatcaaaggcactcagcgcctgcatcatggggcaggaagatggactaaaatgtgtacagcacatctaatccctgttagatgtaaactaagaaatcagggttggattatgaccccaagggctccccagcagttgagcccagcatagtcaccgaggtatgtccagcagatcgcccctcctacttcctgcttgctgcttctgtggttcctgctgcctccaaccgtgctgctcctgctccccatcttgtcttaaactaagttcttcactttcattcgtttaactaatattgatggcaagctgcttcttttgtcaaggtcactctaaggactatagtaattattttttctctaaattcctctaacacagcaacttttgcaaaaattgagggttgtttttttttttttttttggtgtttttttgtttgttttgagatgggtctgctctgttgcctaggttggagtgcagtggcacaatcatagcctcaaccatccaggctcaagtgatcctcccatctcagcctcctgagtagttgggactacaggcacatgccaccatgcctggctaatttttctactttttgtagagacaaggtttcacaatgttgcccaggctggtctcaaactcctgaactcaagcaatcctcctgccttggcttcccagagtgctgggattataggcgtgagccattgcacctggccaaaaaattgagttttcacatcaaatgagatt

SEQ ID NO: 1817 - DNA, 4001 bp, Homo sapiens
attattttattttatggagatggggtctcgctatattgcccaggctggtcatgaaaccctgggctcaagtgatctgcccgccacagcctcccaaaatgctgggattacaggcgagagccactgcgcctggccctgttctttcaagtgtttctttctttcttttttttttcttgagactgagtctcgctctgttgcccaggctggagtacgctggcgcaatctccgctcactgcaacctctgcctcccaggttcaagcgattctcctgtctcagcctcctgagtagctgggattacaggcacctgccaccacgcccagctaatttttgtatttttagtagaaacggggtttcaccatgttggtcaggctggtctggaactcctgacctcgtgatctgcctgccttggcctcccaaagtactgggactacaagcatgagccaccacgcccggccactttcaagtgtttctaaaggcactaagattccatttgataacataattgcttgtcatccctgctgcctggccttgattctgctgcagggctggacaccatgaggcagaagctgcatgactcacactctatcccctgaagcaactggcaccagcgcctggcacaccgtaggcactcaagtatgtcctgagttaaacggtattgaagttctgctccaagaaagtcatcggaagggaaatattttgggtacatcggctgaaaactaaagggccagtgatagggttttgagaaaaagctcagaacaaggaagacacatcccagtggcagagctattttacttttgtgggactaagacctatagccttttgtgaggtcatgacggggaaaaacaaaacaaagcacacacacacacacacacacacacacacacacacacctctctttctaggtaaataataaatgaactaaaggaatctttaaaataataagctcaatcattttccccagttatagaaactaatacaagaaacgtgaacaattttgttacgacaaaatcataaatagtcctaataggttttatgtaaatcagccccaggaaaaagctgaattccttcttttgtgaatgcactcccaagtaataggaagcccggctaaagatccccaggttttctttaattgtagtctccgaaaatgaataagtgaataaataagtgaatggattgaataagacttgactcagagttcactaaatgccagtgcttcttaaagtgtctatggagaagaactggttttgaaacatttcctaactgctgcagactgaaactcttctaaaaatacaataaaaattctgcggcaacatctaaaagtggacatacactttcttttttttttttttgagacagagtctcactctgtcccccaggcttaagtgcagtggcatgttctcagctctttgcaacctctgcctcccaagttcaagtgattctcctgcctcagccctgcgagtagctgggattacaggcgcgcaccaccacacccggctagtttttgcatttttagtagagacagggtttctatatgttgcccaagctcgtcttgaactcctgacctcaggtgatctgcccacctcagcctcccaaagtgctgggattacaggtgtgagccaatgcgcccggcctaaaagtggacatacactttctatacttaatttgtcagggaccagtcaagctctgtttccccaaatccatacacatttaacatgctacaaatgtagggaaagggaggatagatgcctaccttctgctctcgtgcctcaaacactgcttcatggacgctgcaagcaaaaagtgaggtaggcagatcacttaaatccatcatctcatccaaatcatcttcattttcaccaaaaatcatctcttcttcctcttcttggtcagtgctacacagatctgactggctatcattccaagatttcatagtgtccctcagcattatcccccaaagtgggccttttccttctgtatagtcctaggatgtctatcaggcacccactgttaaaaaaaaagaaaatgcagaggtaaaactccgaagaccaaataatgttccaatcaatcaatgtctccaggctgcaattcatcaaatgaagcaattttatttagaacgatgaatcaatatttaaatcaatgcattacagtcctcgtaagtgaattctagatacgctaatttgatttgcttagcatattttatgtaacatatttcactggcaatgatttattaagaaaaaaaggcaaaacgttttctagtgaacctagggaaaaaagggtaatataaaatgagatcatatcaatatgtattctagtttataagcagtagaaagaaaaatgtgaaccagaagagcctccacatatttgtttggggttttccatctacaacactgtaactggcacagccaaatacaacccacactaattctctcaccatctgtaccctgaaatatggtctgtgatgagctgactctacctctcctaaccaatttgttctttttgaatacacttgaaagaattaagttacacagaatcaaaagctgtctataaattcagtctttgttaatgttagaaatatttgcggtaggcaaaatttaacacagaaaatcaaaaagagggccaggtacggtggctcatgcctataatcccagcacttttgtttttgagatggagtcgtgttgtgttgcccaggctggagtgcagtggcgcgatcccggctcactgcaacctccgcctcccgggttcaagcgattttcatgcctcagcctccactacaggcgtgtaccaccatgcccggctaactttttatatttttttggtagagatgggatttcaccatgttggccaggctggtctccaactcctaacctcaggtgatctgcacacctcagtctcctaaagtgctgggattatgggtgtgagccaccacatctggccaatcccagcactttgggaggctgaggcagtgatcaaaggatcacttcagctcaggcgttcaagaccagcctgacaacatagtgagaccttgcccctacaaaaaattaaagaaaattaaaaaggtgtcctttttctgaacttttttttgagacagagtctcgctctgtcacccaggctggagtgcagtggcacaatctcggctcactgcaagctccgcctcccgggttcacaccattctcctgcctcagcctcccaggtagctgggactacaggcgcccgacaccacgctcagctaattttttgtatttttagtagagatggggtttcactgtgttagccaggatggtctcgatctcctgacctggtgatccgcccaactcggcctcctaaagcgctgggattacaggtgtgagccaccgcgcctggtccctttttccaaactttaaaaaataaccaattttaaggcaaatgtctggagctgacagtgtccctgggtggaataacaggacagaatctgtctctcataggctgtttctatgcatgtctgcctcttccaatgaagtgcacatcacatgcaccaagcagagagccttggacatgacacatttcaagatgcggaggcagaatttaataaatacgtagcaggcacagacaaactaagtgattatgattactacctcaataccacctgatttgtgatttttcccttttatttcaaagaacagaaggtcacaaatacattgcttacacacagtataatacagaatggtaattatggaataaaaatagtgaggttttttggtattctacaatatcaatcaagactacttctaagaagtaaaatctttactcatttgtatatacattttctgagtgcctactgcttggtgttggggagtgaagaaaacatggttcctaccctcaaggcactcccagcaaagccagcatttctcctcttcaacaatgctaagcacccaatctcctaaagaacctcgttccatcagctgtcagctgtacttaattttttttttttttgagacagaattttatcctgttgcccaggctggagt

SEQ ID NO: 1818 - DNA, 4001 bp, Homo sapiens
tacaaaaaattagccggcatctgtagtcccagctactcaggacgctgagaggtgggaggatcgcttgatcctgggaagttgaggctgcagtgagctgtgtttgcaccactgcacttcagctggatgacagagcgaggccttgtctcaaaaagaagaaaagagaagagaagagaaaagaaaaggcaaggcttgccaatgcagtaaaatgtaaagctgatgacctggctaaagaagagactcagttttcaagcttttcacagtcttcctggatggaaagcccatttctagatcaatttaaatccccaccaaaaagaacacatttgtgtgatgcatatctggctcctgaattatgtgtttacagagtttaagatattgaaccaaagccaatgaaatagtcttaaaacaaattactttacatcgtatgtaatcacagctacagataaatcaattgcttcttttgccaaatagtacatcagagacttctatgaaaagttcaaataaatgtggtgtacttggtggcttccaacaagtggaagcgaatatttttggctttcagcactacaggaaaacatcactttaaataatccttgtttgtatctgaaacacggatctggattgcttcctacactagaatcctaatctctaaaggagatgatcagattttgcacggaagctagaagaatcaacctggaacagatcactcctgccctacctgtccaggcggcggacagaagcagacagacaagtttcaagaagttagggagtcactaatgcgatggtgatccacgcaccgtgggggaagcggggcaagggagaaagacagggggcttccaccttccaggcgcccctacaccgctcctgccttcacaggcaggctgggcctgtcggcttttcaaaaggtcaaacacacttggtgggagaaaatcgttggtggagaagacaaaacatttttgttttgttttccgggacaccaccctcgaggctgccagactagaccccgcgcgcgagaagggtgcggcgggaggcgaggtcgcgggaggcgaggtcgcgcgcggtagcatctcccggtcccgcggctcggagtgcccacccctcccggacttctcggggcggcttttttttttttttttttttttttaacttttcatgcaccaccccccccacccgccccgccccgccccgccccgcgctgggtgcaaacctgctggagaggccgggcgccgtggggcctcacctgcacgccccgccgccgcaggacgggagccgggagggcagcggacgggcccgggctgcccgacggggctgcggggagccggacggcgcgagctgcggggcctctgggagcctggtgggcggcgggcggggccgaaggcagagccgggagccgcctgcagcagcagcctcgccgccacgccctcgacgccggcgagagcggccccctgggctgggactagggcggtgtcccggctgagctaggctgccggcgccgcgcgcccgcctcgtcccctcctgttctggcagggcgcgcgcacggcggcgcaggcgccagagcccaggacaaggcggggacccgggcggggaccggggcgggggcgcgcgggggccggggtgggggtgtctcgccgcgcgcgccctcctcccgctcctccgggttcctggtccccagcctgtggggggcttgggctgtagcgctggggcgggggctttagatcaccccgaaaacaggacctctggcgaccttctcgttttccaccgggagcggagagagccgatctccttttcctgctagccccgtaggacagtccccggagcagctcataggaatatgacgaacgtttactcagggctggttactatgtacactgcgccccgcgcgcggcgagtttacctcggttcacctcccggcaaccggcggcccggatattatcagatgctgtgggcttcccggcgcctcattgcccgaggagaggcggccgcaggtagctgagctggagctagcacaaggtgtgggacggcacaggctgggtcccgccctggcgggtacaaccctcttccccttacccactccttcccctcccctcccatcccctcccctcctctcctccccactcgtgctcttctccctcctcccgctctccctcctcctcttactcctcttcaccctatgccctatctaccgttgtcatacaatccacatgtttaatgctttctttttcgtgtaaaaacccttccacgcagtcttgcttgtctccgacgccttaggagaccatgggacatgattacaactattacgcaaagggaagagccggggtctaagctgttgagcgagtttcagtgataggaccgaggcttacattggcaggtattattaccaccaataacaactatgatgacaaagctcctgagcccaacttggaaggcagctggtgtctcttcccttagccggcagagaaggaagcagggtcacacagcagggaaaataactgggctcatctcccacctacaaggacgcgcagtcacgcagtggtgcgcacccgtagtcccagctaactcaggaggcagaggtgggaggatcggttgaggccaggagtctgagaccagcctggacagcatagcaagactccgtctcaaaaaaaaaaaaaaaaaggaatgtgcagttagaagaaaatcagctctcattacccactcaagacctttcagaggcaaagtgaggcacagtgaagcttaacatcaaaggcactcagcgcctgcatcatggggcaggaagatggactaaaatgtgtacagcacatctaatccctgttagatgtaaactaagaaatcagggttggattatgaccccaagggctccccagcagttgagcccagcatagtcaccgaggtatgtccagcagatcgcccctcctacttcctgcttgctgcttctgtggttcctgctgcctccaaccgtgctgctcctgctccccatcttgtcttaaactaagttcttcactttcattcgtttaactaatattgatggcaagctgcttcttttgtcaaggtcactctaaggactatagtaattattttttctctaaattcctctaacacagcaacttttgcaaaaattgagggttgtttttttttttttttttggtgtttttttgtttgttttgagatgggtctgctctgttgcctaggttggagtgcagtggcacaatcatagcctcaaccatccaggctcaagtgatcctcccatctcagcctcctgagtagttgggactacaggcacatgccaccatgcctggctaatttttctactttttgtagagacaaggtttcacaatgttgcccaggctggtctcaaactcctgaactcaagcaatcctcctgccttggcttcccagagtgctgggattataggcgtgagccattgcacctggccaaaaaattgagttttcacatcaaatgagattggaaacagctgcattccatagccctgcctggagatgtctgatgcacgttcacacaaaaaaaatggccctgagagatcctaagtcaaacaaccagattagcttaatttagtttccctgaggtattaggccctgtgtgggtgttgggcttgcaagggtaaggtccatagagatctgccacctgaggagctcacagatgggggagacagtgattgtgatacagttgtatttgtgcactgagacatttgcaaagtgctgacaaagcagaggaagaagtgagcaatcctacatgatggttcagggaacggggttcgcattttccagtattattcaagattctctttttttcatggaatacatcaatcagactgggttaagcagcaaatggaatgcattgactcacataatagaaaagtttggggcttcaggcatggccggattcaggggcttaaactacgacattaggattaagttttttctctccattttttttttttttttttgagacggagtctcgctctgtcgcccaggctggagtgcagtggcgcg

SEQ ID NO: 1819 - DNA, 4001 bp, Homo sapiens
aaatctctgtgtgtaaggtccccaggagggaagggaggagagggctcatgtgtcaacaatatacatttggtgagctgctgttatgccaggcacacaggtggtatatttcacactaggagtttctcacctgggatccccgttctatacaacctgtgcctgggcctatgtgttcatttttcctgggggaagggacacacaacttcactgctttatgaaaattataggatattactattcgggaggctgagacaggagaatcgcttgaacccgggaggtggaggctgcagcgactgagagcacgacactatactacagcctgggcgatagaccaagattctgtatcagaaaaaaaaaaaaaattggccgggtgcggtggctcacacctgtaattccagcactttgggaggctgaggcaggtggatcacctgaggtcaggagttcaagaccagcctggccaacatggtgaaaccccgtctctactaaaaaaaaaaaaatacaaaaattagctgggcctggtggtgtgttcctgtagtctcagctgctcagcaggctgaggcagaattgcttgaacctaggaggtggaggttgcagtgagctgagatcgcgccactgcactccagcctgggtaataagagtggaaactccgtctcaaaaaaaaaaaaattatatcctcaccacatgccccctaccattgctttacagataaggaaaccaatgctctgggggactgggtgggttgcccaagggcatctgatgagaaagttgtaacgatgaacagaacaggattcctgctcttgggatgtctttgaaacaggagcctcgtgaactcctaattcatctgtccaggtttcactctgatacccttcttgggggaaatcttccctgcctcctccaccccgcagagttccttagtcttgcacacaagacgcttcgtgacccagcccctgctgtatcatcttgttactctcctcctccagtcacctcaagacctgtggtatccctgaccacaatacctataccttcatgccgttgcacgtgcaatccctctgcctgtatcaccctaatcccactaccctcagactgcctgaaaaactctgttccttcaaaaccccattcaagagtcacttcacctggaaagccatccctgagcctcctgggcagggtgggggatccccctgagggctccccgtaacaccccacacactcaacttctgctagggcacacaagtcacacgtggtcgaagttaggtcaatatgtgacgtatgaatgacttgccagtagcgtccgtcgcctgggttcaagggcatagttcgctaatgacacgggcctgctcttctcactactgtcccccagccccgcaagagagggacgcaataaatggccagcaaataatctgctgacagactgagctgctgcggagttcaagacacacggctcccaaaggtccacagcgggagaccctcgagctcctacgacccaccctctcccgggcagggctccctccccgatctgcaaaccgccttctccaagcgcatgccggacaaaaccatcctcctcgcggcagagacccatcccccgcccgggcggccgcgcgcacccggcccgccgcgctcgcgcagtttgaatctcccgcctgcgcgggcgccgcggtgcgggcgtgagaggcgcggcggcggaggggccgcgcggccctagctccagcgaggcagcgcccagccgctgctggagcgccccgcggggccggggaatcgcgagcccgcaccgcgccttcctgcctccgggcttcacgtggggccggcgccgcgcgacacgggcgagagcgggcagcgacttaggcccgcgtggaccggcccgtgctccggctgtggccgctccgcttaccgccctctgcccggaccctccgcgcgtcccaggcgagacctaccttggtgcacgtcggccacaaggaactccggcgctccccgccgggccgcgaactgccccagagcatgcgctctgcaggcctctggccccgacccgggtgagaaaggaaaacaaagagcccggcggcccctggcggccatcccaggatctgcatgtggcgcgctcccgggctgggggagcccttggccgggctgggggagcccttggccaggctggctcccctggcccggttccagtgggcgtgtattttggaaaccccaaatcgggacacgtggactaacaaccagaaagactccttgagttcggtctgtttaggaaaatcttgtgcggtagggtctgtacggagaaaaaagatactcatcttccctaccctcaagagggcatggagaaggttgaaaaatcagactatcaacaaccacacaacgctatgacagggatacccagaggggcatctgactcagtccggggcttaagaacagctttccaagttaagtctaggggggcaggacatcctaggagaagcgacgtttgcaatgacagggaaccacgagaacccagggaggttgtgggaaactgccaagtagatgggagtagagggtgcctgtgggagtgacagatcatggatacagggtcttgtgtgtctaaggggtccagcctctatcctgaggcagtagggatatatgggaatttgggcacgggaatggcatgatcagatttttttccccgtgagttaacatcagatgggtatgtgcccatgtcttaacaaggtttgagggaggcacatctcatatgcgtgtgaacacccagtcatcttcttatgagctacaagagcatcctaatatgatcagatcttatagaacaaaatagagaatggacttggggaaaacgggagccaagtggggaggagcaagaggaatgagagagaccagataaaatagaagggtgtgagttggggttgggttagagatggaaaacaggtaccaagaaaaggctgtctcttattaacacccattcttcaggatggatacaaacagttcttcaggatttcaggtgttccctgaaacccttgcaaaggacgttttctcgatttcatgttgattcagactctgagtcattctacggcacccaaagtctagatggacacttttgatgagttcttaccaactgaactgaactttttttttttttgagatcgagtcttgctcttgtcacccgggctggagtgcaatggtgagatctcggctcactgcaacctctgcctcccaggttcaagcgattctcctgcctcagcctcccaaatagctgggattacaggtgcctgccacaaagcctggctaattttcgtatttttagtagagactgggtttcgccatgttggccaggctgaattcttatatgcagagcctgccacaaagcactcccctgtcttcagggtttcttacctctccaagtttacctctgcctccatcatggactcctcttttggatgatgtactgtgaaatttctccaacttttaaccctgggatctctgatctctctctctctctctgctgtcttcctccaagatcttacacattcatgtagcttcatgtaataataataagtgattattattattattgcctattttgtaagaccctttattttgttaactacagaaacatccatgtcagctcatttgttcctcacaaaaacctcatggcagttggaagataagaaaactgaagtttaaagaggtaaagcaagttttctggggtcttcacacaagtggtggaaggagacctcaactctttttttttttttttttgagatggggtctcactctgttgcccaggctggagtgcagtggtgcgatctcggctcactgcagccaggttcaagcaattctcctgcctcagcctcccaggtagctgggattacaggtgcctgccaccacacccagctaatttttgtatttttagtagagacagggtttcaccatcttggccaggctggtcttgaattcctgatctcatgagccacccacctcatcctcccaaagtgctgggcttacaggcgtgagcctccgcgcccagc

SEQ ID NO: 1820 - DNA, 4001 bp, Homo sapiens
agccaatttttcttaaacatgtattaagacttcaatccagccaggtgtggtggctcacgcctgtaatcccaacattttgggaggccagaggctggcggatcacaaggtcaggagtttgagaccagcctgaccaacatggtgaaaccctgtctttactaaaaatacaaaaattagcctggcgtggtggcgggggcctgtaatcccagctactcaggaggccaaggcaggagaatcacttagcataatcacttgaacccgggaggcagaggcaatggagtgcgccactgcactccagcctgggcaacagagcgactccatctccaaaaaaaaaaaaaaaaaaaaagacttcaatccagattcagtgctctagaaggctgtttcctgcatggtttgtctccccagtaattgtcgacaggactctgggaagctgtaggaatatgcaggcgcagacacgaggcccagctttatttccaacgttgtggaaagggacttgtacatcatggggcagagccctatgctcccctacgccacttggacagagcccggggagagtgacctcccgggtgtatccacgttggacaatcagtgtaacgcataaatttacagaatccaataggaaacaatttcatccattcatgttactacagatcttaaacaagaaagcaaacgagtttccaccctgtccacagtggggtgttaaaaaaaaatcggtttctagactggtaacatgcatattcagctattctaattactttacaataggcggttagtactatgtggaaggtaccgcagaagcaaagacaacaattaggcccagctatcctaaattcaaatgaaacacgtggacttgttaattacccccaaatcggccaggcacgatggctcacgcctgtaatcctaaaaatataaaaataaaaatgacccaaatcacaaaaatacgagaaagcataattacgaaacgcaatgcttccaaattatgaaaatcttcggcctggcgtggcggaccacaaggtcaggcgttggagaccagcctggccaacatggtgaaatcccgtctctactaaaaatacaaaaataagccaggcgcggtggtacacgcctgtagtcccagctactcgggaggctgcggcaggagaattgcttgagcccagcaggcggaggttgcagtggtgcgatcaaataaaaagaaaaattgagaaaattcttaaaggcaaatgaggatccagaataaaactgtgtgcaattatattgagaacgacaatgtgcctactatgaggcagtaagataaacagtgggggtggcggtgcaccttcagaggctcgctgggtcgggcggcagccctgcgggtcccgaggtctccatggcccacttctggcccaggcccgtctaacgcgtactttagagttgggaccgatgccgcctaagacacccatatatagttttaaattacatgatttccggccaggcgcggtggctcacgcctgtaatcccagcactttggaaggccgagggtggtggatcaccggaaatcaggagttcaaaaccagcctgaccaacatagcgaaaccccgtctccactaagaatacaaaaattggccgggcgtggtggcacgtgcctgtaatcccagctgctggagaggctgaggcacgagaatcgcttgaacccggcaggcggaggttgcaacgagcactgcagtccagcctgagtgacaaaccgactccgtctcaaaaaaaaaaaaaaagtaaataaataaaatactatatgatcttcctagggaagctcggctactgatctatagcattagacccacaactccggtggcaagcatctgatcacacttaccaaggatcacacttaccaaggagaagaagcgaccactgcgaatctgtctccaaaaaggagagagaaaacgcgaagcatcctttttaaaccttacgaagtgcccggaagtcctggaatgtctattgcgcgtgcgcagaagcatgcgcagttagagaatcagaaactcactgaggcttctgggaatctactgcagattgagccccaccccttcctggctgggaggcctctcgcggtagtggatccttcccgcgggaccttgctggggaatgtacgttacagaaataggtttgtaggtatgtagctgcagaggacgtttacttctgtgcaatcactggactcagtctgtaggatatgcccttagataaactggccaaaaagtttttggaagagtcgaacgcggtggctcacgcctgtgattacagcagctctgaaggccgtgaggggcggatcgcttgaggccaggagttcgagaccggcctgggcatcatggcgaaaccccgtctctacaaaaaatacagaacataagccaggcatggtgccgcgcacctccagtcccagctactcgggaggctgaagcatgagaatcgtttgaacctgggaggcggtggttgcagtgagccgagatcgcgccgatgcactccatcctggtcgacagagcgaaactctctctccaaataaataagtaaaacgttggaataataagaatgcagaatgaaaaaaatacatatagagaaatacggagtatcaaaaggaattgaatctgctctgtcacctgtgaaagaaataatttgataaatgtgaaggtaaataagatgaaagtgcccctagacgaatcagataaaagtttaaaaactccaggcctggcccggataaaaataaataaaaataaaaaataaaaaactccattgcacaacagtgtgaatgaatgtaattaaaagcactgccctatactctttctttttttttcgagatggagttttgctctgtcacccaggctagagtggaatggcgcggtctcggctcactgcaaccccggcctcccgggttcaagcgattctcctgcctcggcctccccagtagctgggattacaggcgcccgccaccgtgcctggctaatttttgtatttttagcaagacggggtttcaccatcttggccaggctggtctcgaactcctgacctcaagcaatccacccgcctcggcctccaaagtgctgagattacaggcatgagccagcgcacctggactttttttttttttttttttttgagacggagtctcgctctgtcgcccaggctggaaggaagtggtgtgatctcggctcactgcaacctccacctcccaggttcaaccagttctcctgcctcagcctcccgagtagctgggactataggcatgccaccatgcccggctaatttttgtatttttagtagagaccgggtttcaccatgttggccaggctgctctcgaactcctcacctcaagtgatgcccgccttggcctcccaaagtactgggattacaggcctgagccaccacacctggccccctatacattttaaactagttaaaaatggcaagttttatgtatattttaccacacacaaaaccctctgaatatgaagtaggcaagtaaagaatgcttacgatatatatacataagaaatgttgcaaatatgatggaatttttagtgtggtgtaaggtggaaaaacgttggctagagagacagagctatcacagctgggctatcttgagtagtaacgtttatggtgttcctcctacatattagattttgttctgaatgctttattacgtacattatttactatcgcagcaattctttttttttttttttttgagatggagtcttgctctgttgcccaggctggagtgcagtggctcgatcttggctcactgcattctctgcctcctgggttcaagcaattctcctgcctcagcctcccgagtagctgggactgcaagcaagtgtcaccatgccccaccaatttttgtattttcagtagagacggggtttcaccatattggccagggtggtcttgaactcctgaccacgtgatctgcccgccttgacctcccaaagtgctgggattacaggcatgagccaccgtgcccggcctacaaattttttttttttttt

SEQ ID NO: 1821 - DNA, 4001 bp, Homo sapiens
cagctggagacagaggtgggccagggagagccagtgtccctcacacactccctgtctctacctccttgggtcaatctcagcatggggtaaggatcttttgctctgatggcaaaattcagcgttccaacagtctggagctgtacagctgataactgcagtcttggatgtctaaacacaatcttgcttttggaaactcactcaaaataggatacaggagacgcggaagctcacctggcctttctttttagtttcatcctaacatactgtgttcggagggcaaatgtctggagtctggcacagcagactagacgtcaaaggaaaacagttcctgtgttccagtttctcaatactttggccattgtctagtctagcctgatccaagaccccgggcaagaccttttgacagcttttgacgggctctcctccactgcctaacatgttaaccctttcacccagaaggcacttttacaaagcatattcccatgtgcaatttgcagggacatcaggagttacagcatttggagatccagttccatccatgactttggacaaggccctcgaattctgtgccccagtttccctatctataaaacggacgtagaaaatgtgttattagacactgcctgcgcttctctggaggaaagcactctgctgttaacccttaaacacccttaggagatgggcacttatggaaggaaaaaaacctctccgggtgtcaggctctacaccccaggtggaagttcttgctctctgggggttatctgagaatctggtgaaaacttagaccctcttctgaaaaacatatcccacaccacaccaaacttaaagaaagttctgtgggggtggggagatgctgtggcggcagatgccgggttcagatctccggctctgcaggctttttcgggaacgttaacttgagtcagccacgaccttaattaagatttgagaaaacagaagcccgcccaggaccctaggagatgcttcttcacttgggggggctacaacagagccctcgcgagcatcctgcagcttcggaccaccggcggcaaacaaagcccgagcaccgctcagccggggggcttccccgacctcgggggagggctctgcggagcatgcgcggcggccgtcaggccccgccccccccgggcgccggagccgaggcggcgggaacctcaaagccccggcgcaaacggccgctccccgcagagcgccggccgccccctccccgcggcgcccgggcgcagcggcggccacggacgtgtggggcccgctggccgccccctcttccaggccgggcgaacttaccgaggtcccctttcccggggcggggggggaggggcgcagagggagctgtgggggcggggccatgaccccctcgtgcgggcttcggccgcccctcccccgccgcgggcccgggcgcgcgccccaaccgccaaccgcccgcgcggtgcccggggtcgggtaggccgcgggccgcgcgccccgtaccgagcccttttgttgcgcggaggcggaggcaatgattcagcccgcggcctgcgccggcccggccgccgggagggagcgtgacgcgaggcggcccccggctggaacgcgcgccgtgccgcgtcgctgagcccgccggccccggccctgcgcccacccgtctaccctgaccctcactcacgacgcgctccttggtgtgctcgggttcggtgatgaccacggccgcgccgcccgccttgcctgctgtcgccggccgcgccgcgcgcttgcccccgccgggggccccgtcgagctccaggccgtcctcgtcgccgctgctgccgccgccgctgctgctactgcagcgctcgggccgctcgcgcttcctgcccgccgggccgccgcgtttcctgggcccggcgcgggcagtgccgttgcccgagctcggctcctcccaggccgccgccgccgccttcttcctgggcatggtcgcggctggagggagacacggggcagcggcgcacaatggacgggttataaactgcgcggggggaggggagcggagacgagccacccggcctccacttcctcctctgccctccccaaagtggcggccgcagggtgggcggagagggggcgagttgggagaggaaatcgcgcccctccctggccccggcgcggctccttcggggaatcccgcagggcagccgggagccccagaggcaatcccctggagggagaattgagacccccggcctatccgtaagttaggtttgcccacaaagcatcacagttgcaacctcgccccccaaaagtaaagggaaagtaaaaccagcctccagtcccctagattttcattaaagaaggcttcgggacacttccaggattcccccttggcacctgggtggtaagggagcccctgctccccggctaccccacctgctgcttttgtctccgcagtctccccccaaacccactcatggcatttaatgcaacgctctcccccaccccgcatcagccctggacccccgttcggccccagctcaggggtgccgacctcgggctctagttagccgaatccctacggcggactgcccccggcgacgggggaagagcccgaagaaagctggaccccagccccaaacacctgctcgcacagacacgaaaaataaaaactttaatggtgcccaactctctcccagcccccttgccggccgtgcggcccggccggtctccgattcgactgcaaagtgtccagggccgccgccagctccccggcgtccctgcgctctcccctgtctgcttttttttttttttttaattgattttgaacaatgggatctctgtctgtctccgattaaaccacgtggatccgccttccttcctctttttattccttcaatcacccagcccccctcccccaggtttttttttaaccttttctctttaaaaaaaggaaaaaaaaaaaaactttcccagaccccacaaactgatcactgtcgattttcagaccctacctggttggagtgatgagaaaccggagagaaaaaaggaagagaagcaactaaaagacggatcggagggcttttttttttccggcccagacgagggctccagcccactcaccagatacacttaaaatgtaaatacgagcttccagaacaaatgctacaacacaaaacagaaacacatgtgcggccgcgcggcaagcgagcgcgcggcggggcgggaggcgcggggcgcggggcgcgcgcgccccctgccggccggcggacccgttgccggcgcccccgccccgcccggcctggccctgccctgcccacccgagcctgcgccgcgcgccgcgcgcctcgccgcccgcctcggctccgctgctcctgcgcctttcgcgggcccgcgagcgcgctttgggccttccacgcagtgcggcctgcgcgtcagggacttctttgcggcttaggaggatgttggattgtttttcctgggcacgtctagacaggtcacatgaggacactcgctggaaaatagttacttcgctcacgcagcagccaacaagggacgtgccctaattgagtgattggaatgaaagatgaatacaatttgaataattttttcctgtgcagagagaagctgagttttatttgcctgtggatgtgtcctcagtatgtaacaaggtgctgtgacacggaagaatcacataaaggtttgctgtattagtgaattaattcataattaatttgagggccgtggaggcactggaagctggctttgaggggaactttttcattttttgccaaatatttactgagcccccggtacatgcaagacccacagtgcccggggctgcagagccagtgaacaaggtttccaccccagtggaacgcacagcctaacggaaagacagatcagtaaacaagtaattacaacagtggtaagctttacaaagtgatgcctgtgtaggaacattatggcgaggggatttatcctagtccagggccagggaaggcattcaggtggaaagttatgctgaacaactt

SEQ ID NO: 1822 - DNA, 4001 bp, Homo sapiens
ggccgctccccgcagagcgccggccgccccctccccgcggcgcccgggcgcagcggcggccacggacgtgtggggcccgctggccgccccctcttccaggccgggcgaacttaccgaggtcccctttcccggggcggggggggaggggcgcagagggagctgtgggggcggggccatgaccccctcgtgcgggcttcggccgcccctcccccgccgcgggcccgggcgcgcgccccaaccgccaaccgcccgcgcggtgcccggggtcgggtaggccgcgggccgcgcgccccgtaccgagcccttttgttgcgcggaggcggaggcaatgattcagcccgcggcctgcgccggcccggccgccgggagggagcgtgacgcgaggcggcccccggctggaacgcgcgccgtgccgcgtcgctgagcccgccggccccggccctgcgcccacccgtctaccctgaccctcactcacgacgcgctccttggtgtgctcgggttcggtgatgaccacggccgcgccgcccgccttgcctgctgtcgccggccgcgccgcgcgcttgcccccgccgggggccccgtcgagctccaggccgtcctcgtcgccgctgctgccgccgccgctgctgctactgcagcgctcgggccgctcgcgcttcctgcccgccgggccgccgcgtttcctgggcccggcgcgggcagtgccgttgcccgagctcggctcctcccaggccgccgccgccgccttcttcctgggcatggtcgcggctggagggagacacggggcagcggcgcacaatggacgggttataaactgcgcggggggaggggagcggagacgagccacccggcctccacttcctcctctgccctccccaaagtggcggccgcagggtgggcggagagggggcgagttgggagaggaaatcgcgcccctccctggccccggcgcggctccttcggggaatcccgcagggcagccgggagccccagaggcaatcccctggagggagaattgagacccccggcctatccgtaagttaggtttgcccacaaagcatcacagttgcaacctcgccccccaaaagtaaagggaaagtaaaaccagcctccagtcccctagattttcattaaagaaggcttcgggacacttccaggattcccccttggcacctgggtggtaagggagcccctgctccccggctaccccacctgctgcttttgtctccgcagtctccccccaaacccactcatggcatttaatgcaacgctctcccccaccccgcatcagccctggacccccgttcggccccagctcaggggtgccgacctcgggctctagttagccgaatccctacggcggactgcccccggcgacgggggaagagcccgaagaaagctggaccccagccccaaacacctgctcgcacagacacgaaaaataaaaactttaatggtgcccaactctctcccagcccccttgccggccgtgcggcccggccggtctccgattcgactgcaaagtgtccagggccgccgccagctccccggcgtccctgcgctctcccctgtctgcttttttttttttttttaattgattttgaacaatgggatctctgtctgtctccgattaaaccacgtggatccgccttccttcctctttttattccttcaatcacccagcccccctcccccaggtttttttttaaccttttctctttaaaaaaaggaaaaaaaaaaaaactttcccagaccccacaaactgatcactgtcgattttcagaccctacctggttggagtgatgagaaaccggagagaaaaaaggaagagaagcaactaaaagacggatcggagggcttttttttttccggcccagacgagggctccagcccactcaccagatacacttaaaatgtaaatacgagcttccagaacaaatgctacaacacaaaacagaaacacatgtgcggccgcgcggcaagcgagcgcgcggcggggcgggaggcgcggggcgcggggcgcgcgcgccccctgccggccggcggacccgttgccggcgcccccgccccgcccggcctggccctgccctgcccacccgagcctgcgccgcgcgccgcgcgcctcgccgcccgcctcggctccgctgctcctgcgcctttcgcgggcccgcgagcgcgctttgggccttccacgcagtgcggcctgcgcgtcagggacttctttgcggcttaggaggatgttggattgtttttcctgggcacgtctagacaggtcacatgaggacactcgctggaaaatagttacttcgctcacgcagcagccaacaagggacgtgccctaattgagtgattggaatgaaagatgaatacaatttgaataattttttcctgtgcagagagaagctgagttttatttgcctgtggatgtgtcctcagtatgtaacaaggtgctgtgacacggaagaatcacataaaggtttgctgtattagtgaattaattcataattaatttgagggccgtggaggcactggaagctggctttgaggggaactttttcattttttgccaaatatttactgagcccccggtacatgcaagacccacagtgcccggggctgcagagccagtgaacaaggtttccaccccagtggaacgcacagcctaacggaaagacagatcagtaaacaagtaattacaacagtggtaagctttacaaagtgatgcctgtgtaggaacattatggcgaggggatttatcctagtccagggccagggaaggcattcaggtggaaagttatgctgaacaacttaaaggatgaataagacccgatgaaagggggcaggaaaagtattccaggccaggtggagtgaacgggacgctccacatttcgagatcttgagagacacctcctgggagggaagctgtctggtggggctggggtgagaagagccaagaggctgggttctgaggaggtaggcaggggtgcgagggcctgcatagaccctagtgaaccgcagtgaggcttgatctcgttcgcgtgtcctgggacgggtgaaaaaagccttgcttgcttcctaccggtctccaccctccacctctccaccccacttccattacgatctcaccgtcacttgctctcctctcaaagcttttctcctgcttcttttttcctgaggcgtaccgcacaaggaagttccttcttcaggcaacttcttgaaaacgcataaagttctaggatttttgtgattcattcattcattgttagtgcaagaaacaggactgggaagcatcaagtgtcctgtaaaggaagacagagaaaccaagaggcccaaatctaaggtatttgatcaaagtcaaaagtctgtgtgtcaagagagctgagagtgcttatgtaaaagaactttggaaatgagaaatcaactggtacgtttcagagattttcagaaaagtcaagatggaatagaagcaccctttgaaagcctattcttaatagacctgcatttaaaaagattttttagaggttaaactttgacgctttgatataaagcataagtagaaccaaccagaaaagaatttcgcctaaatatgccatcaagtccccttcaggaaatggcatgctgatgcttgtcagccgaggcgggtggctgggtgtttatcctctaaacaccctgtgtggccaattaggaacaccactgacagtacctttagatttcagtctgcaagtcttttccttttttctcctgcccctttataatgctttttgccagcttaaaagactcatgcctcagacacactgatgcaatgagacgctaatatcatattgcatcatctgatcctaggtgtggtgctcctgaaactggtttttcttgaggttatgctgcagtagaaaagcactttgggtataacaccctggaactggccctacttgtcagaagacaaaagtaatttttgcaactccatgcctcaattccacaccactattctcccagggaaagcctgc

SEQ ID NO: 1823 - DNA, 4001 bp, Homo sapiens
actcattacttttcatcctcctcacttgggacaggaggaagagctgctatctgaaatccaaatggttggtaaatatcattttgcattgtcttaatggggagaggaggaacaaaaaaacacgcctctgtatcctaataattaaacattgtttctctccaagaaaatacaagtaagctctttaatatctaacatagaaatccaatgtctgacacaaacgcaatattatgggcactgggcaaaaattgacaaactgtaaggaggaaaaaaaaaggtgggtccctttcaaagtctgtccaaagccttaactgagaagggtctcaggcagggtggggagaaggaaacgcgctccactccgagaggctccagcaagggcgcctccatatgcggaactctcgcccaatccctgcacaggctgaaatctcgtgaccgccggggagcctgtttggagaaaagtagacagggagcccgcaagctgggttggcagaggacgctggaacctggctggtcggggagaaaatgtctccttggcagctgcagccactgtcctgtggtctaacttcccagagctggctggcgagcgaggtgtgcctgccgctggcgtctccccacccccttcccccacccctttctctccgcggctcctgcactccgcagagctgccgcgaccaaagctacaccacctagccaaaaagaaagaaaagagacaatcccggctgcgcacaggtcggcagggctcgcccttggcttccccggccggtgacagccgccctggcctctgccacccgcccgacagagcgcggccctcggcgccggggcgagcgaggtggcaattgacatttgcacggttcgtccatacagtccgcacgcctgctcctccagcccgcggcctcggaccctggactccgccaagggccgtctccctctgctcaccccgaccctgccccaggctcaagggctaggaaggcgatgcccccagcgggcaagtggcctccgaagggaaccatgttaaccttgcagtgcacacatctgcccacacgcccagtgtcacagcccggccaagcctgacagcctccccgccacggatgcctgcccagcccaaccccgcatcccctcccggccccatgcccggactcctagcccgtccaccccaaaccaagcccaggaaaggggatatgagattttgcttaagcaaatatatctacctggatcaaattcagggatccgagcttggtattcggctccgactctcatcccaacatctgcaaagcaatgccaaaaaatatatataaaaaataaaaaagaagaaaagaaagaaaaaggaagagacacttaaaaaataaaaatcgctagatggaggaaagaagcggcgggtggatgggaagatatcaactcggggcactccgggagatggcagcggattgggggcggggagcgggggggggcaaaggcggaggattggtcgagggcggagggacggggggtcgcgggggtgctgctgcactgcaccgggagttcgaggctaccgcagcgcccaggctctgaggggagggagggcgggagagcggcgaggggagggggctgggggaggggaagagggaggggggcaggcgggctggcggggaggagttcgaggctaccaccgtgctcgtcgtcgctgctgcagccgctctcgggctctgagtagtgcagcccgccgttggtggacgaggcgccgctgccgccgccgcctgccgggctcttggcgctgccgttggccgatcggttcttccccagtaactcgggccctttctccatcatgccgggcatggtagaacaggggagggggaaaggtgaggggaagaggcaggcgtcagggtgaaggcggagatggcttagagcgcgggcgggagggaaaggaggaggaggaggagacggcggcggcggcggaggaggaggaggctgttaatatggagccgccataaccgccccgctccggcagtagcgcagtcgcctcacaacaacccgccccggccccgcctctctcccctcctccctccgccgccgcccgccccgcgcagtcccgggcgcccctcggccgcaccgcgctctacgccgccgccggtatcactccgctccgcagggaggttccggccgcctggggggaggggaaggggggaggggcggggaaaccccgctcgcaggcagccgggccaccccaaccaagcgctaataaaatcgccaccgaggcgtggccgccgctcgggctttcttcctagggggcgctccggagcgcgggcgggagatgcacacgagggagcgggactctttgccctctctgggcggaaggaacgcggtcaccctgagaaaggaccggcgcgacccgactgggcgaccggggggagcggccccccccctctgcggaccgggctgcaggcacgggcctgagcgcggcgttcctcagatgtctggacccgcaggccgctcagtttcccggtgtccgctggcagcctcgagctaggggcgcgctctggcccgcggtgcagtcgcgcagtatagcagggcggccttggggctctgaggcccaaccggcgaaagaagtagactcggccctaaccatctcgacgctacaatttttgtttctggatctctgaagtagggcccagttcccgagagagagtctggggatgacgggatgagtttccggggctgagcgatgcaactgttttttgctgaagcccctctccccgatcctaaccctactgtcttattcttaccatctttctttccttttttttcttctctgttttaatagctggggagtgagtgctgtggagtgagggggaaataagataaacatgagacctggcccagtagacgcgttttcagttcttgctgacctgcggtctccgcttggagcgctgggggagagggcggagtcccccggcagaggtgaagcgagagctgctttctggcagcgtttccagcctggaaggagttgtgctctgtaatgcttttctgaattgcattcggcgaaaggagtaggaaactgcgtttattccttcaccagatttgagggcatctgctgcgtgccaggctgcctggcattgggggctgtttatgattttcttttcctctttttctgatttcttcccccccactgacgaataagtagaaataagtgaggatttaactgtgagcctctagtatgcagatgtatgctgagcggtattggggttcagcagatactctccaaacacttgaaaatactgtcttgtaataattctattatgggtcaatccagagtggatcaaaccagaaatgaacgtctctggccagagcaaaccttactgagagaaataatatatctaactcaggaattgagccaagaaaaccctgggaagtaaatatttctgaagtgaaaagtctcctgtgtgtgtacaaaactatctggttctagtagtagagatagtctcatctctctattaaagcttaatgtgattccattaaatatttgaatcataaaactggaccttttattctgttccttttctcaataaatgcagttctgaatattattttaattcccgtatagttttcctacaaggagagaatgccctggccaaatgaaatgaatagccattttccttgacagtcgttatttttcattacaaattaatacactggtatgttggtctttatgcagcagtttctaatgaacatgattcagcttctttggtcctgtaacacaaaagctagaccctgtcaaatgctcctcactctgaggcctctgagccagccagctttctaacacccaatgttgtggcactccatgcagtttcctgcagaagggaatctgcatatagatcaggaaccaaaacgttggaaagatttagggacctttgtaacttctgtttattagtaaaaccagtaaagtgagaagattccattcgagcacagcacaaaagggcagacgcagagaagactgcattccacagttaggagaagaacctgggcgaggggag

SEQ ID NO: 1824 - DNA, 4001 bp, Homo sapiens
attcagttttttttttttttttttgagatggagtctcactctgttgcccaggctggagtgcaatggcgtgatctcggctcactgcaacctccgcctcccgggttcaagcaatgattctcctgcctcagcctcccgagtagctgggtttacaggtgcgtgccaccacgatcggctaattttttgtatttttagtagagacggggtttcaccgtgttagccaggatggtcttgatctcccgacctcgtgatccacccgcctcagcctcccaaagtgctgggattacaggcgtgagccaccgcgcctggcgtgaattcagtctcttaaagccaaaatgtgctctttccaaatgtcaagtaaacccaaagggagcagagtggtgtgaaagtgccattcacctactagcaacatcaataaagaaaattagtttcataaaacatttaaaattatttgaagcccatcagtatacacactgatagtctttgaataaaatgtattcccagccagtcatttagaaggcaacccaaatctagtgaacactcttgcatcactgttttcacctattaaaaatgagactgtcccgactcattacttttcatcctcctcacttgggacaggaggaagagctgctatctgaaatccaaatggttggtaaatatcattttgcattgtcttaatggggagaggaggaacaaaaaaacacgcctctgtatcctaataattaaacattgtttctctccaagaaaatacaagtaagctctttaatatctaacatagaaatccaatgtctgacacaaacgcaatattatgggcactgggcaaaaattgacaaactgtaaggaggaaaaaaaaaggtgggtccctttcaaagtctgtccaaagccttaactgagaagggtctcaggcagggtggggagaaggaaacgcgctccactccgagaggctccagcaagggcgcctccatatgcggaactctcgcccaatccctgcacaggctgaaatctcgtgaccgccggggagcctgtttggagaaaagtagacagggagcccgcaagctgggttggcagaggacgctggaacctggctggtcggggagaaaatgtctccttggcagctgcagccactgtcctgtggtctaacttcccagagctggctggcgagcgaggtgtgcctgccgctggcgtctccccacccccttcccccacccctttctctccgcggctcctgcactccgcagagctgccgcgaccaaagctacaccacctagccaaaaagaaagaaaagagacaatcccggctgcgcacaggtcggcagggctcgcccttggcttccccggccggtgacagccgccctggcctctgccacccgcccgacagagcgcggccctcggcgccggggcgagcgaggtggcaattgacatttgcacggttcgtccatacagtccgcacgcctgctcctccagcccgcggcctcggaccctggactccgccaagggccgtctccctctgctcaccccgaccctgccccaggctcaagggctaggaaggcgatgcccccagcgggcaagtggcctccgaagggaaccatgttaaccttgcagtgcacacatctgcccacacgcccagtgtcacagcccggccaagcctgacagcctccccgccacggatgcctgcccagcccaaccccgcatcccctcccggccccatgcccggactcctagcccgtccaccccaaaccaagcccaggaaaggggatatgagattttgcttaagcaaatatatctacctggatcaaattcagggatccgagcttggtattcggctccgactctcatcccaacatctgcaaagcaatgccaaaaaatatatataaaaaataaaaaagaagaaaagaaagaaaaaggaagagacacttaaaaaataaaaatcgctagatggaggaaagaagcggcgggtggatgggaagatatcaactcggggcactccgggagatggcagcggattgggggcggggagcgggggggggcaaaggcggaggattggtcgagggcggagggacggggggtcgcgggggtgctgctgcactgcaccgggagttcgaggctaccgcagcgcccaggctctgaggggagggagggcgggagagcggcgaggggagggggctgggggaggggaagagggaggggggcaggcgggctggcggggaggagttcgaggctaccaccgtgctcgtcgtcgctgctgcagccgctctcgggctctgagtagtgcagcccgccgttggtggacgaggcgccgctgccgccgccgcctgccgggctcttggcgctgccgttggccgatcggttcttccccagtaactcgggccctttctccatcatgccgggcatggtagaacaggggagggggaaaggtgaggggaagaggcaggcgtcagggtgaaggcggagatggcttagagcgcgggcgggagggaaaggaggaggaggaggagacggcggcggcggcggaggaggaggaggctgttaatatggagccgccataaccgccccgctccggcagtagcgcagtcgcctcacaacaacccgccccggccccgcctctctcccctcctccctccgccgccgcccgccccgcgcagtcccgggcgcccctcggccgcaccgcgctctacgccgccgccggtatcactccgctccgcagggaggttccggccgcctggggggaggggaaggggggaggggcggggaaaccccgctcgcaggcagccgggccaccccaaccaagcgctaataaaatcgccaccgaggcgtggccgccgctcgggctttcttcctagggggcgctccggagcgcgggcgggagatgcacacgagggagcgggactctttgccctctctgggcggaaggaacgcggtcaccctgagaaaggaccggcgcgacccgactgggcgaccggggggagcggccccccccctctgcggaccgggctgcaggcacgggcctgagcgcggcgttcctcagatgtctggacccgcaggccgctcagtttcccggtgtccgctggcagcctcgagctaggggcgcgctctggcccgcggtgcagtcgcgcagtatagcagggcggccttggggctctgaggcccaaccggcgaaagaagtagactcggccctaaccatctcgacgctacaatttttgtttctggatctctgaagtagggcccagttcccgagagagagtctggggatgacgggatgagtttccggggctgagcgatgcaactgttttttgctgaagcccctctccccgatcctaaccctactgtcttattcttaccatctttctttccttttttttcttctctgttttaatagctggggagtgagtgctgtggagtgagggggaaataagataaacatgagacctggcccagtagacgcgttttcagttcttgctgacctgcggtctccgcttggagcgctgggggagagggcggagtcccccggcagaggtgaagcgagagctgctttctggcagcgtttccagcctggaaggagttgtgctctgtaatgcttttctgaattgcattcggcgaaaggagtaggaaactgcgtttattccttcaccagatttgagggcatctgctgcgtgccaggctgcctggcattgggggctgtttatgattttcttttcctctttttctgatttcttcccccccactgacgaataagtagaaataagtgaggatttaactgtgagcctctagtatgcagatgtatgctgagcggtattggggttcagcagatactctccaaacacttgaaaatactgtcttgtaataattctattatgggtcaatccagagtggatcaaaccagaaatgaacgtctctggccagagcaaaccttactgagagaaataatatatctaactcaggaattgagccaagaaaaccctgggaagtaaatatttctgaagtgaaaagtctcctgtgtgtgtacaa

SEQ ID NO: 1825 - DNA, 4001 bp, Homo sapiens
aagagggaagccacttctaaaacaatttcttaaggagacttcacccaacccaagaagctgggtgttgcctgggccatttccctcctctgccctgaagcagtggccagctcagagagaaccctgttgttttgtgtttgtgtgatctttgggtggatgtgtgcacaccacctgctgagcttcgctgtgtgcgtgcctcaccgccagccctaatctgccagagcttcctggccttgcaaatgtttctgtggagggtccatattagactccagtggttcttgcagtctataaagtctccttgaaggtgattccctgttccttgaagacaactggctgggctggatgcctgaatatagctccctgacttctctaaaggacaaacttattgcccctttagagaagtcatgaagctttgccggcaagcacagagtctagcttagaaaacacaaccagggccaggagtggtgtggctcatgcctgcaaatccagcactttgggaggccaaggcttagaggatcacttgagcccaggagttcaagaccagcatgggtaatatagtgagaacttgtctctacaaaaaattttaaaactagccaggcatggtggtacacactggtagtcccagccacttgggaggctgaggtgggaggatcctttgagcctgggaggcagaggttgcagtgagctgagattgtgccactgcactccagcctgggtaacagaatgagaccctgtctcaaaagaaaaaaataaaaagaccaccagggcccaggcacagagcctggagcggggaagagatagcggagttaactgtgaatcctgattgcactgaccacagtctagtgagcaacacatgtttccttttgaatatgagtgggaatcacctttaaaactatataacatttgcatcttctcaaaagccccaggtcctactaagattgacttagggctacatatcaggtctcattttcaaggaggaaacacagggaagcctcaagatgtgcagaagagagggatgtggggaatacacccaaccactcctctgctgaggttggaacagaacaaggaaagtccccggacctcctctcagcaggcagagaagtgcggggcctccctctggcaaagcctgcagatgtggccagcatacctccatacacacagcttcagaggcaagggtgtccaagggagtcttaagttttatcagaaataatgtcattcgactgaccagtaaggggagctttcagaaagttatggaagaagatgcgacagacacaggaaggacttcagaagcaagaagacaactggactctctaaaatgccactccgaaagcgaaaagggaagcccacagacccacgaagacgtgctggcctcgtgttgccagttctgtttctctttcaatacccatctcttcagattgaagggcttctgccttcttgcagtttttgctgacacgtttacccatttacaaaccttggctgcacctaacttttttttttttttttttttttttttttttttagcatttaagttcctagccaaaatacccgggcctctaggaaagcccttttctctccctctgagatctttccttaccaaccccagcctcccaacccgggtgtcctaggtgggaccagggacgatccttcggagttggtcaaggaggcgtcggaacagcaggcatttgcccttctagttggcagcagcgatgagccgcgtgctccatgctcagggcaggggcagccgcccggggaaggggcgcccgatacaccgctcaccgctcagccccgcgtctccctccggggtcctttacctccatgtccttcaggtgccgactctgcggcagacgcacccgctcgcccgggccggagctcacgatccccgctgtcccctccgctcccggccgtggccagtttcgggctgcggcgggcacagggcgagtgggcggtggcgcgcgcccggctgcgctcggctgcgggactgccccggccgcgggggccctgcgcgagagaacgaggaaggaggaggagggagggagggaggaaggggaggggaggggagggtggggagcggggagggaggccgacgatcagggtttaaatttagacgcaaatctaaacagatactgtccctcccagggcaggactcaagagcgggagccacgactccatgtgcccaaacatggggatgggcagccaccgggcccctctgtctcgcgaagtttctcaggaccctgggctttgccacggtctcagtccttctcaacgtctccctcccttaatgcgccttctttctttttcctgtcccttcaagaattagagtggtcctttaattctttttgtttcctctcttttcgatttccttcttttgtgtccatccttcctgctttccttcttcctctccctctttttaaaattgcattactgtcatacctggtttccctgcagttcttgggtggagttcgaggaccctccctggtggaaggcgtttgtgttctaccaaaagaggagcccttctgaccgaggcttcagagctcagcgtggcgccgacgggaccacctttcccttctcacctcttttcctctccaccttccaggaaaccactatctatccatctatccatctatcttctgtatacgagtagaaggaggaggaggaggaggaaaatcaggaatccacgcaaagttttccaagctccctgaagtggtaaatcttttcttcaaaccttgctttgactgatgcattcggttttgtgggaattttggctcccacaagctgcttgctaaagggcctcgtctccattcctgttaaatatagcaaagggcaagatgctcaacatctgattcccatagggcccagcatagcaaccttcctttagggccatcccggctgggcagcagagaccgcatgggagggattcggggactggaatctgcaccagggtcactccctgctacccggatcccggcccccttcagacccttcggcagagagaaacaggaaaatgccttgagagacctgtgagtgccagggtattggctgggtatatgacgcctctgggttatcccacagcattctcacccgcccaaccccagctcaaccaggggaggggagccccatcagaggtgggcaatgggacaggtgatggtgagcactgtgaagagacatgtggagaaacagtagagaaaaaaggctgagagtctgctcctgctacaaagactaccctgattctggttatcccggcaccatctttgcactttcaggcacttagattgctgctttgggtaccagtcttagaaatatggcctccttcctgtcctagaactttctaaggcccaactttctaaaacactggcagccctaatgccagagtggcttctagttctttagcttagctaagcatagaggaagacgcctggttttaggaacagacagattgagggctgaattccagctctgctactttctagttgtattttttagacaagtcacttaactgctctgattctcattttcctcacctatacaatgtagtaggcactctgcaaaaagtggctgtttttatcatgcttagccccatgtacaagcttcagatgaataagagcctgatatttcttttatttagagacaggcactcggggacccagtgaaaagagccctcactcccaggaattaatagtgaggcccctcccagtccagccacatggctgctcaggtgaagactcgagagcagagtcggcagtaaggaagggtatttactggtaacctgcaaggcacacttttgctcgtgcttctttcctttctttttaaaggtgcaggacgtagtgatgactgcatagtctactatcaggtcttctaactctgctccacagggccttttcctttctccctctacctagtcctcctttgtgctcagaatggggctgccccagcacaggtttctggcttcacaaacaggagggcggaagtgcttacccagaggaaaccgttaggcctagataacatca

SEQ ID NO: 1826 - DNA, 4001 bp, Homo sapiens
atttatctcttccccacctagctatgaattctgcaagggcgagaggaatgtgggttgaatctgctgcacatggtagcacttgataagcggttcctgaatgaatgagtgaatggcagccagtccttcccattctgaggcagaggtgcagccaggagagggcgtgtacacaggtctgactgaccacagtgggaggggactgaccctcatcccttggtcgcagctggactttccttctaggcccgatctccctggcgccccaccctgcacccatctgcctgggcccactctcctgggcatgttatcagggatgcacagactgctccatgttcgaggggactgaggcacatccatcaccctcgtgccctgggtgctgctgcatccccagagcctgactctgtgccttggacttagtagatgctcgaatcacagttcgcaaacccatgcaagagtctctgatttgggtttcgctttccttccccctgcctgtgtccactctataaaggcagaaaggaacctgctggagctgggtcctccccgagaggcttgcagttccagaacaggcaaaaacaatggcttcccacaggtttacaaaacaaggagcaggctatagccccgaggaagctgcaggaccctcatcggttccaactcctgtggaactgatgaggactaaaggggccttcctgtggccatctgggtcccggaggtgggcggctttctaggctccccagcctgccacaccccttgaggccaccccacccagcttcaagcctcagccctaacttccaaaggtgcagctgtgccagggtgcgggtggggaagacactgtctcctggggagacctccatcttacctctgaggtcagcctctgctcaggtgcagcgtcacagcagggggcctgcgttctgcttcccagtctgggagaagagagtgtctggatattttcaggaaaaaaaaagaaagttgagcagccacagcagggcagggcagtctacatcctcaagtctccctcagcttctctgctgctgccggctggcctcaaattttgcctctctttggttctctgagaagttttaccaagagaagagacaggaggagagatccagcctggactattgtttgtggggtgtgtaggtgtgtgtgtgtgtgtgtgtgtgtgtgtgtgtgtgtgtgtgtgtatgcgtgtatgtatcccgcgaggctggagccacagcttccctgatgaaccatggaggcgggccagctcctgagctgcggttgccctggagacccacctaagcctctttgcctggagcagcattatctgtagagggagtggctgatctgacacaaaagcctgaggcgacccaggcccaggcagtgagggagcacttgtgtccagatggcattctgtccgcttcctcctccagccggtgctcagtgtggcacaaactgggcaagaccattctcacccaaccctctgctgagccctaggtgtacctgctgttggcaaatgtttccagctgcctggtgggtggctcctggatggagatcccctctttctatcagctccctcctacagggaaggggtgattctgggtgctgaggacagggacctgtgaagatacatctccgcctttgccccaccacatcccttgcctgtcttcctctctgcttatctaaattatttccttccctcaaggcaagctcaagagcagacagttctgactttcagaaggaggggctgtccagggagaagaggaacatggaacagaaagcattgacgttgaggtatttgagataacatttggggatagcagaagcatcctgttgctgttctgcagcatcccacactcatgtctgggcctccttcctgtctctgctctctggtcacgctgtcacttgtagactgttctgcctagaagccatgtgtgggccagcttgcacctaacagacattaggtagcactaaaacagatgcacactgccctgtgaggggcatgggaatactgtaatgggcatgaagctgcattataatagatcttaggtaatcctgtgctgggtgatagcgtgacttttgcacacatctggttttgattgtgttggaaataaagcagaaagtacaaccaagaataaattaaacaatggctgatgaaatggactcaggttgcccacctgcctgcctgcatgatttcgtccctgggtgatttgtcacttcgtgcttgctctgtggctggttccactcagctggttccatccgccttccctcttcatccatcaagcaggcaagattcttgagtcaggagttggatcatatacttctcttgaccagttcacagcacgacagccccaaagattgagtgggtcacttggggatggaagatccccacatttgagggagctgaagctgacttcctctgacccacagttcccaggcggcctccacctcagggccagctaaggccagagtcacccaaagcaggtaactgggagtccccacctctgagcaccccaccactatcctggcactttcccaaggggcgtggcttggaggtccaagggcagaaattcccaggcatttccacactgtagggaagggagcagggggatgacaagactttaccttccctttaggaaagttgctggaggcaatgaggagaggagggcatggactaagtcacatgctcatctgtgcagcacgtatttctaaagcaccattctacaggggcaccaagctaggagctggctgagcctggctctcctctctgcacacatcccagccaagcctgtgtgtgctggattgctggatcagatgaggaggaggtggaagtctggcaggcaggtggggagcagggacagcattagggcccagagttaaagacttttatctccaagtagtacaaccttgggtctgctactgaccattctgtgtttgaataaaaacaattcatcccttttctatagccatgcttttgtattaatatctccccttctaatgcacacacaatgaatgtaaatgagatcatagaggccaatgtcttgagccatcagaaagattttgtcgcagcagctgccagatgagcttcaggactcctgaccctgggatgccagggaacaagcacacagacgacttatagcagtctccctggcagacgcagctggcccctctcctgcatttttcaaatggtgcctgtgattagaagagggaggcactccctaacccacgaccctccctgacagctgccttgataccgtaactcacaggccttggtgggtgtgttgactcctcatttattctgatttgttcacctgtggaggatttgtgattatccttgctgagtgtgaatttgctctggggagaaaaggtggcggttgtttttctcttgtttggcgtggatggaagttgctgaagcatagatattcagcaaccatcaaatgcagaaacaccggtggggcccgcaacattgcctcatagatggcatttgattaataaattggaaatgtggagttatgaggcgattacatgcaaggctggattaaaatccgcatggagattagagataagccccggctctgcgtgtgtgtgtgtgtgtgtgtgtgtgtgtgtgcacgcgcgcgctccgttctctcctccctggagtctttccaggctatttcaaaccatttctaaccactcagtcatgcgttgggttttccaaatcctgcagaaggtctgtgtagccctaatcccaaagaagttgaattaaatggacagaatattcataggtacagaccagatttgcagttacttagacctcttctctctgggcatccctctttctattcctgtggtcacatttcctctccaggtgctacggactgaatgttgtgtcctccccaaaattcaatcttgaatctcccaaggtgatggttaggaggtgggacctttcggatgtgattaggtcgtaagaggggagccctcaggaatgagattactgcccttgtgaaatggtctcagggagctttttggcccttctaccacgtgag

SEQ ID NO: 1827 - DNA, 4001 bp, Homo sapiens
aaaataagatcatatagtcctatagcctggttttgtttctcagaaacagattaattgtaatacattgtcttgcactcacataactttcatgcattttttattttttctttagtataaattctcatatatagggttgtggcatcacacaacatgcacattgtcattttaataccctttgttaaaatgtatgggctgtgatatttacctcattaatagggcactaaaaggattggttccctaagctcccagagaatgcttaattttgtcaagtttttggctaattttggtatattaaagaagaaccttagtgttttaaaatattttataattactaatgaagttgaacatctttttatataatgatttgcttttagtatttggtgaattttcattttacagttttgcacatttttctatttcattgtttgtgagatcttttttgtatgtttatttgtgagatcttttttgtatgtttattgcctttcacgtgttactaatagtatttctcagtttgtatttttctcttacttattataatttttgccattctgaaattttcaaaaatattgttattttttatgtttttaaaaataatttttaaatttatatcaaaagactggccattactgtcacataaggttaaaatatttatcactgttctattttcatctgtctgggctttgttttaacataagtatgaaactgagttctggatttccctcccaaataattcttaaaatgagttaattcattgaattcacatttaatcatactttatgattaaaaaatctgaatatacaatctaactctcaaataatggattgcttaaagagaataatgtaaatgatgacttttctggaaaatcaattctggggtccatctgaacactttaaggcaacattaactgagaatgagacaaagcttggagagtgtggatgtgaccttccccaccccttacttctttttaaatcattgcgtgaaccttgcactttgctaaactttccttccaaaagtaatagtgtattttcaatgtcctcaaacccctttaaaacgcaaacagaatttctctgtcaaggtgaccatctgggggaagggagaggcagcatcttttttactaatctgtgaataatttttagtgaactgatattcattgaatgtctgcatgtcatgttcataagtaagctgcactgggccgggtgtggtggctcatggctgaaatcccagcactttgagaggctgaggcaggtggatcacctgaggtcaggagttcaagaccagcctggccaacatggcacaaccctgtctctattaaaaaatacaaaaattagctgggcgtggtggcaagtgcctgtaatcacagctactcaggaggctgaggcaggagaatcacttgaacctgggaggcagaagttgcagtgagccaagattgcaccattgctctccagcctgggagacagagcaagactccataaaaaaacaaaaacaaaaacaaaaacagaaacaaaaacaaaaaacctgcactgtagatctcatgaatgcatgttacaaatgaagacactgacacttatgattgagtaacttttctaaagtttcccagctaccagactgcagagccaagatttaacccaacagcttgacaccaaagccaatgctctttgcagtgaaggaagaaaagaaggtaaataatttaaatcaaacaacacagcaacagaaagcctgacaagcctcactagaaatacaatttgtcatttctggcctggctaatagctgacagaggaaaacagatgtttaaagaaagtcccccatcatcaaccgcgaggaggattacctgtttggcaaccaagactctaagggcccctgccttcttcagtgtctccagtggtcccagtcaacgtttctggagcttttatatcttcttgcctcaggaattaataatctttactttagtcacaaagcgataatattatttgagaaaaacaatccatccataaaagtcttatctacagtgaaaaaaatgaatcatataagagacggcttcagaatgtacgtaaggtgtgctttgactagccaggaaaagaacctctccctgtgtgcaaacagaatcttttcttcacatcacgttattaaaactgacaacatcctgtaatctgttataagcccatcttcctctccccttatgttactttttcatggctgtctttttatgccttggtatggtggatttcctttatttctcttttatttctagaaggattttctgtcagggtcaggaataggttatgacccatgcggtgagacttgagacccacacacagattttccttcctaaagcaccgactccactccttcaacatgcgtgagtttcctcagagatctactatttgagcttctcccgcagaacatggatgatcatgtcaaaatagcttacatcaacagagtgtgttacaataacgggttttcagtgaagtcatcaaataagatgccaacaaaatccttgtgagcagcataggacacatatccccattacacactcaagaaacccaaccttaagagagattagaaaccttccgaggttcacaacactggtcagcagtggacctggacactgaaccttgtccttctgactccaaatataggtgtttgccaaaatacagttctactgaaaaataggctatttgaaaagagtaacaagattttcttttccagtatagatggcaaagggttaggttgtaggtgccagagatgactcaactttaaactacagatttaagtctgtaaaggacctttatgtctggaaactttaagtctggaagggaccatagtagttatcaaatcttactcttttgttctactggtgaggaaattgaggcctagagaaacattgtgactagtttaatgcacagacagttgtgggtgaagctgatatcagaagccagcttccttgctcccagctcactgttgtttggaaaatgctactcaacctttgttattagatttttgcatcagttgtgtaaattcatggtaggacatgagaaagtaatgctttcatggttcacaaagaacattttaaagaatctctcccatcagaatgtttgacacaaacctctttctctttaggcagctggatgggaatcatcattgcttcatggcacaatggcgtacaaagatgttaactccaagcctttcaatttcagaagtcctggtccagatgtaagacagaaaagttttaacaaaatgggtgattagatagatctcctgtgtttccagcagccatcccaacccttagtctgctatccccatgccattatccagatttaaagacttgagatgagagagaagagagtagaacagattagaaaacaagatgttcataggacttttaagaggtctcttactgaaccctcacattgactagctccaaattaaggcattgataggactcacataaacctttgagatgtaagaatgtaaaggaccagaaaattgtctgaatcaaaaaggtccactgaatagtaagtttatttaaaaaaaaaaagtctacatataaacacctcatacatgaaatggtcaaagtgagaatcctaaaagccccaaatcagcaatgatcaccttcaaagtgacaaggatggggatggcaccataatggagagataaagtggaagccaggcagctttcgaatagtagctttatttatttatttattatttttaatttcaataggtttttggggaacaggtggtgtttggttacatgataagttctttagcggtgatttctgagattttggggcacccatcatccaagcggtgtatactatacccaacgtgtagccttttatctcctgccaccccccaccctttcgcccgagtccccaaagtccagtggatcgttcttgtgcctttgcatcctcataactcccacatatgactgaaaacatcagtgtttggttttccattcctgagttacttcacttagaataatagtctccaattccatccagg

SEQ ID NO: 1828 - DNA, 4001 bp, Homo sapiens
ctcatctgcaaagtgggaatgctgagttgttgggggcatgacttgagatgagacatgtgaaaagatcctgtgacaccctaagcattttataggcttagcaactattaccattattaaagtgtgcctccctaccttcaggactgctggtcatatctgctgtccccagattgaaaacccctttctctgtgaggccttttctcaaatgctgtctcttccccttcttcagtcttttttttttttttttttttttttacataaggtctggctctatcacccaggctagagcacagtgggtcagtctctgctcactgcagcctccacctcccaggctgaagtgatgctcccacctcagcctcccgagtagctgggactacagatttgcaccaccacacctagctaatttttgtatttgtacagacaaggtttcaccatgttgcctaggctggtcttgaactcgtgagctcaagcgatctgcccacctcagcctctcaaagtgctggaattacaagcatgagccgcgtgcccagcttccttctacagtcttaatgaatcacttgttcccacaaggcctggcacctaggggatgctaaggttttctccttctaattgtgggctacctaaagccttgtttttttctttcttttttttttttagactgagttttgctcttgttgaccaggctggagtgcaatggcgctatgtcggctcactgcaacctcagcctcccaggttcaagcgattctcctgcctcagcctcccaagtagctggaattacaggcatgtgccaccacgcccggctaattttgtatttttagtagagacagggtttctccatgttggtcaggctggtcttgaactcctgacctcgggtgatctgcccccctcggcctcccaaagtgttgggattataggcgtgagccactgctcccggccaaaccttgcttttgatatttgtaagaatctatcctgtagtactaacagtagctgggctcttacaacgtgcccagctttctatgccttatctcctaaaatccccaaagcagccccatcaagtaggtactgttattatcatacctgtttaaaatgataaactgagacttggagaggttaaataacttgcccatgattccagacctagtttgttctgctagtgaagcaaaatttaaatgaaggcaatctaactctataagccttgcatttaaccacgatatcaagctgcttccctggtacagttaactgtacccatgccccgacccccgtcttttttttttttgagatggagtcttgttctgtcactcaggctggagtgcagtggcacgatcttggctcagcaatctccaccttccgggctcaaacgattctcctgcctcagcttcccgagtagctggggattacaagtgcctgccaccatgcccggctaatttttgtatttttagtagagatggggtttccccatgttggccaggctggtctcaaactcctgacctcaagtgatccgtctcagcctcccaaagtgctgggattacaggcaggagccaccgcgcccaaccacccatgcccttcttaatattcaggctgtgagctcctcaagtgcaaggggcatgtcctaatacttctgagttctctacagtgcttagttagcatggtgctctgggcaggaagcaaaagtcacagcttctagacctgactactagtgtcatttattgggcaagtcacttgacctctctgaacaggtccatacttccctgtccagctgatcgtaaggactgaatgacaccgcatgtggaaaagccagggtgttgggaaggtgggaaccctgcacccctcccaccccttctctgcctgagttaccaattaccgtttaaaggtggtggtgtctgtcgggagaccaaaggtacaggagccccagagcagcagcagcagtccccagcgaggcatccttctccatccatccatgcttccctcagtctggggctctctctgagatccactgaggttctgtggctcccttagcccttccccttttatacactccatgcatggggtgattgcaattctgctctgccctgatttattaccctggggtagatggcagggcagtcagcaataaatctcactgcgggacagagctaggtgggtgaagggtacccaggtttccggatggggagcagaggggctggaggaaggacagctgtgggaaagcaatcttgtgtccagtgacgctagcagccctctatctggcttggccctgtgacccctggagcaggcagaggctgatgagaaacagcactgctcagggctaacatcaaaactgggacaagcgtaaaacctaggtttccagctccctagcccagacccaacccctataccctggaagctccattctctatattaactttggctttgtccctgactggcctctcccaggctacagcccagttttcccatctagaacatgggtgaatcttcatgactggtttcttggcaggaaaagcaacagctggtttaattataagagtagaggggccaggcatggtggctcacacctgtcccagcactttgggaggccaaggtgggtagatcacctgaggtcaggagttccagaccagcctgaccaacaatggtgaaaccccatctccactaaactacaaaaattagctgggtgtggtgatggacacctgtaatctcagctactcaggaggctgaggcaagagaattgcttgaacccaggaggcggaggttgcagtgagctgagatcatgccactgcactccggcctgggcaataagagtgaaattccatctcaaaaaagaaagagagtggagggagacttagcatgactgactccattttgcctctgacccccaggggtattatcctttaggctaaaagcttctgcttagctctgtacatagaccagctaattataggagtttagcttgcagttcaactttaaaaaaaatggtaacagttcctttccccaaactaacccccaaggagataaggaaatatacagacaaataacaatgttatgttaaagatgtataggaacattgtgacctgacctagaaaaaagaagttttacaacgtcctcagacccttgctggcacccaggtgtctgtggtcatcagtcacctcttgatcccaatccccttcttcttccccttcccttaacataaagaagagcctaacgttcatgctgacttcagatggttctttatgatgctggtccaccatcttcttggttttctggttctctgaataaggtagctttccttgccacaataccttgtctctagacttattggctgttgtgtggcaagtgatacgagcttggactcagctactcatagccttgaacagtctttctgtgtctgattacattcaagtattgttttcatcaggtttgacttacaggttatctaaatgggcttcccataagaagaagcaatcacactacagaaagtttttctttgcgtttttggtagctggcctaagaaacaattattttaggctgggaaacagtggctcatgcctgtaatcctagtgctttgggaggatgaggtaggaggctcacgctcacttgaagctcgttcaagaccagccagggcaatatagcaagaccccatctctgaaaaaaattagctgggtgtggtggtgcgtgcctgtagtcttagctactggggaggctgaggcgggaggatcacttgagtccaggagttcaaggctgtagtgagctatgattgtgccactgcactttagcctggatgacagagtgagaccctgtctcaaaaaataaaaggaaagattttacattttctcaagataattcctcattcttgttatctttatcaggtttttgattacttaggaaaactgagctttagaaaggttaagtctttatattcatgtaactttctgtattgctattaaagtcttttaattatcacttttgtgaaatgaataattattattttacaaagaccggcggttctgttttga

SEQ ID NO: 1829 - DNA, 4001 bp, Homo sapiens
caggaatagcctgaggcagggcggcaggagcaagaacgtgaactttggactccaacagcctgctttcagatcctggctctaccactctctgccagtgtgactaggacaggctattccaggatgcctcaggttccagtctgtgaaatgggacaacagcacctctcatgccttctccacaaggctctcgtgaggaatcagtgggcagcccgtggagcacccttggagccgggcaaggcagtgccagccctgttcctggatcagggccagccctcacaccagctgccccctctgcagtcctcttctctgctcagtttgaagcccacctcctcttcacaggcctccgttaccgcccacactgacccccagtcccttacatcacatcaccctatttttattttgtgtacaactgtttcctgatacctttctggtttacttctcaattttctcctgctagaatgaagctccttgaggggtcccttgtctggttcggggctgggccctgccacctggaagtccattacatagtagacagcccatcaattacctgttgaaggtgactgctttatgcctggtcacaaacaaaacagaaagggagataaaaccagtccaagcagagaccatgaggacgtgccagaaagtgtaagactctctatgtgccttgttccaggcccgtcacattcatccacatctgtggtccatcactctgcacgtggaaaggatgaagtcctctgcctggcgtccgggagcattgacagtctggctcccacctttctcttcacgtccccatccccaattcctccgggactaagaaagcccccggctgccgtgcaccaagcttcacgcctctggtgttgttcagtcctctgaaatgccctcccagaccccgtctcttcctccttcccaaggccacattccagcctgggctccccgctcctctgggcctgaccatcttatatctccacctggctctgacacactgttaccgccgtcgccgtcacctcaggcatacggcagaagccatgtgagagtctgaattactgagaaccctttatccacttacggggataactgcatcttcctgggaaatgtcaactcaactaaaaataaagtgcttccaggactagcggccagtctctactcttcataaagggaaaagggcaaaagcccactgaaggtacttaggctgaaagcagccctctgtgctgtgagacacctggcagagaaacgaacgatacctttatcagtggggccacagaccagtactaagtcagcctggagaatttatgattttattgcctatttagaatacgatcaaaaccgatgtaactagtttcccttcagcccgtcagtaacgccttcaccccagagcttaacactaaatcctacagataagcgctgacctggacgcaggatggggacagggcacattactctggaatacagcccaactcgcagcgctgtgggggccgcgactgcccgcttcccccagatgccaagcaggggatgcggacgagatgcggcccgggtggctcgagggctgcagcccccgcccggcccctctcccgctcccccgaccctcgcaggccccagggctccgccgcaccccccagcaccccgtcccgggcccgaccccgaggcgcgacccgtacccctcagggccgcgggtcgggaacacggtccccgcggccacccgggccccgacggccctccccgcccggccctcagcgcggccccgcccgcccgcggccttgacagcccggaagaagcggaggcggcgctgcccggccgttcccgcgccacgcagcccttcctggcacctcgcagctccgctacggccgagccgcggtctccctcacggccgcgggaaggaggacggcggggcacgggcggccgcaggcgctgcgctccggctccgggaagctgcagcgagcacttccgctccgtcctccgcggcgccgcctccagggcccccaagatggcgcgagggcggggccaagggctccaaccatttccgcttccggcgcagacgcgcaggccgttggcgggcgggcctcccggcggaagagacgacagcggcggaaacgcgcacaggcgcagctgcgtcctctggctccgggcccggctagcttcgctccagagattgcgcgggctcagggactaggcccgtggccacacccccccttgcgacaaagaccaatggaagcgggcgttgctggtcgctaagagaaccctcggcggcaagatggcagcggcgggcgagggcaccccgagctcccgcgggccgcgtcgggacccgcctaggcggccgccccggaacggtaacgactgcgggccacgggacaggtcgctggctgccctgggctccattcagggtgcgatcgctctacgccctcgacccccaaatgctcacctcggaaagtagaggtccaggtgccgcggcggagccagggccgcccccgcgtcccccactcccacaggactcgccgtgcgcctcgggctcggctcgcacccttccccgagccctcctcccgcagcaggccaagccctgcagggggtcgccccccgcgggctcctagccgggaagaccgggttccggccgcagcctcacagccagcgggacctggggttgccatggggatcccgaagcccaggacttggggcgagggcaggcgcaggagcagcaccaagcctcctgacttcctggccggtgctgtccagaaacgctaggacgcgtttcaaaagcagtttttgcctgtacttccagcactttgggaggccgaggcgggtggatcacctgaggtcaggagttcgagaccagtgtggccaacatggcgaaacccggtctctactaaaaaatacaaaaattggcccggggtggtgcctcctgtagttccagctactcgggaggctgaggcaggagaatcgcttgaacccaggaagcggaggttgcagagagccgagatcgcgccgctgcaccccagcctgggcgacagagcaagactcagtctcaaaaaaaaaaaaaagagcaggttttgataggaactgtttctagaatcaaataaacgggtctggaatgaactcagagctaacactactatcttcaggtagaacctgaccctgatttgggacagatacagtagcctgtagtaaccccctgccctcctccccgacattttcccataaaccctgcccacaaaatgtgcctgaggagctggtagggagggagccctgcccattcctggaactgcaggagttggcgggtggcacacccagcaactaggaggagatgaagccggccaggccatccttgggtatgagtgtggattttctccccagcgataggaggccactgaagggccacggcaggggatgggagagtctgctcctcccctgtgtgcctcactgacactgccgctctgccttcccctggctcactcatctcctgcaacaaggctcccaacctgctcctcaccacctcccgagcacctctggtctctcaaggacctgcagttgtttcaagccagccctcctcttactgggcctgtcttctctgcaccaagtaggtcctcatccttgtcacataaacaaatgagcaaatgaatggcccaacagtcgacaggagagctcatgagccccacaggtcgcctctggtctgctgaaggtgacgtgtaccaaccccttgaaggccctcaagggagctgcactccctccttcagcactggagagcatccctcatctctgtgtctgtgcttacctgtgtgtgtcttctcaatactcaggttatggtgtctacgtatacccaaattccttctttcgatatgaaggagaatggaaagcagggaggaagcacggtgagaagcatctgtggtctcttcttgcagctgctgccccacagctgacgaaaccagtttctccccgggaggttgggtgggcaagtggcatttcctgtagctttcgagcccattgtaccctggtgcttccctggctgctcagggtaaggc

SEQ ID NO: 1830 - DNA, 4001 bp, Homo sapiens
agaggaaatcagtaaacaacatccaattaaaaaattaagccaaaaaacccaaattatccgcatacttttatagtagatattcttgcatccatctcccacctccactccctaaaaaagcagctcaatgtctaggcagattaaacatggatcactcctcccaaagtcctgaagagtgtttctggttaatgagtcctcccttcgccttcagacagtggagtggctgctccaactccatcccatctgccctatcccgtggcctagccagagggaagactctctccccatctgcctctacaccaccagggaaggagatgaggagggaggcaaccacagggaaatgagaatgaatcccttccccgcattctcttcatataatttcactctgtattttcctcagcaaatccttctacctcacgtttatcgggcacatttgtcagctctgacccccagctttgtgaaatactaagtagttttttgtaaagctccatttaagcaatttataagatccccttgtacatctgtccagtggaaagtgcaaactctcagggatagaatattaaagagttaaaactcctcttcaaaacagagcaacattgaaaaatggaaaaaatcccccagaactcaaagtataataagccacaaacctctggtttggttgatgatttctgccaattaccaaattcaaactagtgataaaatgctatttcctattccagccactatgtttaaaatttgatgttaactctccaacaatccttcccccacaactaaccctctgttcccaaagacctttctgttctcagagttacaacagaagtctatgttctccaggcggataagcataatctgtcactttactatctaaaaattatgaactcaaattaaaagtcaagggagtaaaacggagagaattctggaggccagcccgagtctgagcacagcgcagggttaaaggaaaccatttcataagatcaaatgtggagaggcagcaggagcaaagaggaaaaaatcaagttacataaagtccaattgtactcactgtttccttattgggaagcagctcctttctaattctgaagaagttcttcccgtactgcctgagtcccttaacgaagcgtttctgtgataaaaagaaacaaatgggatgtaaaaaccaaaaacaaaacaggatgtcagcaaagcaaagatatctacaatcagcagaataacaaccacaaaaaaagtctcggctagggaatactgccgaggctcggagagtatgtcagcagctcagctgggacccactggccagggcaggccccagctaccttcatcagaaccccaatcccacccaccacgcagggcagcgcgtttaagagaaggacgtcctgcgtctgaggctaagaagcaatctgtccccctcttccaccaggcacacattctggtgcacgaaggtataaatatgctccatgttttaataaaacacaactgctttcccacctgagaaccaagcttcccagaagtgtcgagcagaaaggggaaacagaaccaaacccggtgactcttctccagaagggaaccctagggggttaaaaggccgctttccttaatccaaagaatttgccaggaggcaccggaaggcaccagtatcacagaagcccaccgggaacacgaaagccagcgggcctgccccaccgtccgtcattaaaagccactccgagacaccagagaataaccagcaccccttccgccctcccgacgccactcgccgcccccatccattttcgcagcagactcgtccctaaccccagcccggagactttcactttgtcccatgcctcccgagcacccctccccgccccggtgggggcagctcctggctccgagcccccacctcggggctcccagcctggtcccgggcggccgaccccagcagccacaggtaagcgcccggggtccggggcggcaagaggccgtcgcctgtcactgggctccggctccacaaagcgcagggcggaggcggccgcgggtggctcggcgtgtgaccgcggcggggccgcgcggcgcggggcccggggggcgcggggctggggccgccgctgacgggggaggaggcaggagcgcggcgcgcagagcccggcgcggccgcgggcggctgcaaaaggcggcctggattgccgccgccctcctgtccgccagccggggccccgcgccccggccccggccccgcccccggcccgacccccaccccgaggccggagcctccagggcacccggcgctggaatctgtgtcctccttccggacaggagaacatcaaggcggtaaagcacagaaacttcctccctaccgcagcaagcgtggggagagggcgcccacagggctggggcccttcccaggctgctgggtctccagcccacgttccggatggacgaagtcggctgcgccccggccgcacgccctccgccccaaccccgcctcagctgcgaaacggggggctggccccgacgccccccgcggtcccttccggcccgcgattgtgggcggcctctccctggcggcccaggcattagcctgcacttccccggccgccgcttcacaactaaatcaccgcggaagcttcccagccaataaatcacctgcccaccgggcagagggtccctcccactccctgtgtttgagacccgccaggcggattcagtgaagggccagacttagccttttaagaccagtctgcaacctcctactccagtagtggaggctttgcgtttttgaatttcacccttgctgagatatgactcatcattgtcaattttcaatataattcatacagttcgaagggaaaatctctcaaggcacaagaaagcagcaagctctcctctagtgtgaggagtgacctttgttacttgacaaaagtatcgtttatatgatcaacaggcatcctacgctgtgtgcacacagcatatcaccgggagagacggcacggaaagatggccctgccctcaaggagctgcagtctgcccaggaaggcagacaggtaaacaaaccagtcctagggcctgcaagaaaagcagcagaggaacaaagggtggtgggtgaagctaggaagaggaagcaacttactctgcttgctgatgtcttagaggaagtgacaaggaagagtgtgagcctgccaggtgggctccagcagggcttccagcagaagtcagccaggaaaaggcacagggaacattctgggaactgcaaggaggacagggtgtgcagaatggagtgccagcagataagacgaaagaggcaggcaaggatccggttgcagagagcccttcaggccgcacggaagagttcctaattgtaggctggcagaaaggctgaagctggagctttccatgaaaagactggatgaggactgtgccagtggcagtgtggcctaagtgtagattagggacagaccagttaaagaggctgctgacacagttcaggtatgagatgaggacctcaactactggcacactccacctcagtaatcagaattcctgccgcttaatccattcttcaagtattcaggtatttactgagcacctagctgagaggggtctaggaagataataaaggttgccatggacctttactgaactgtgattcatttttgcacgtaagataagtatgtgtgaagtcattacagaacattctgagatgtcatctggccaagcataaagaagtgaggtgcagctcatcagtgcagcaagggacccaagaaggctagactgcagtggtctgtagtagttcagaatgccttcgccaaggcagtgacatcagcgagatcacaaggggtgggcaactattgcaggggtgggaggtggcttggtgaccgggccctccgtgaaggtcagaggtggagaatgggaggtgggttacaggggacagtctacacagacttggggcgggcaatctggagtgagccaggctgtggaacgccaggaccatgcaatcggaacgtgggcttgataccaagtgacatctaaca

SEQ ID NO: 1831 - DNA, 4001 bp, Homo sapiens
caaggttgcaaaaacggccaggcatgagatgggtggaagaaagctgtaacagaaaagcaccctcccttcccccatcttctctcttctctcccaaaaagagctgtgtttgtctgtgcaaacctagtcccaaatatgggagagagagaatgaatgtgtgtatggaagaacaatgagccctcagcttggtattgtgtgtgtgtgtatgtgtgtgtgtgtgtgtgtatatgtgtgtctgtctgcctctgcctcttttcccttcgacctcaacaacaacagggagagctggaagccagctttccacccatcccaggccatcaaaatcaaaactggttgataatttacagtagtattaactcagcaagcaaatccatggaacaaaatatcaacccaaagatgattttattattgtacagatccagcttctctcccctcccccaacagactgagactaaaaagaccagtgtacactagacaaaaaggtctctctttaaatggaaagcaattatgaaaactgtttcaaatcttagatgcatcaattcctgctatattaaaatgtctattttgtaattcaccaagttcaccctcttactagttatctttttttgcgtttaaaaattcgctgtgaagaaggctatttcacgattcatacaaaactactttctaaatgtaccttaaaaaagcaacagatactgaaacatttaaagcacccagtttctcaaggacccattttacttaaatcaatgtttgaagtctgtaatccagaaaaattgtaagcaaaccttggaaaagagacagaggaaaatgacaattcaacaatgaatcattctgttttcctttcaacaacttctcaagcaaccagtttcaaaggaagcctgcaacacttttcccccctcctagcagacacacatacacacgtgtatgtaaaactacgaatctttccatcatcttaaaaattagtaataaatagaagccaccctccttcagagagcagaactaaaacaggatagtaagaattctattctgctgcaagtgactttgggtttcataattttctaatcacatacagctgagaactagagattgggagcacaaagaggaaatcttcccccaatgagaaaatgatactttaataataaagtcctccccccagcaccccgaaatccacaaacattcaagaaatttacagtttcagtccttgacttccttcccttccagtttcagccaataatgtagtcacatgaaatagtttaacctcaaacaagtagaacaagagcatgaataagaggccaagagagagcaggggtcagaaggcacgcaggaacggtcacctggcccggacaggaccaaagaagtgccctgccctcgcccgactcccctcgacttcggcttcgaccccagccttttcttcctgcctccccccgggcgagtgactgctttcacggccgaccctctctgaccaccaggacgaggggccaaaaaagaaagcacacgacccggcgcgggcaagttggacacttaccttcccctaaagcgctacaccatcaatagtgaggtgttcgcggcccagctccggggaaagtggcggggatggggcgggaggccgcgcggaggctgcggggccgcggggcgcagggccgagaggggcggcccgcggggaggcgacgcggaggggctgagggggcttccctgccgtgacctttcctgcgacttgaacctaggctccctcctcctcggtcgggcagatctttcagaagcaggagcccaggatcatgtctggttttgttttccgagggcgagggggctccctgaggatgatggtgatttttttttttttttaatcctcaactaggagagaaaatgaggcagagacaatgtggggagcgagagaggggaaaaggacgggggaggaggcggggaccgaggcccagcggggcgagcgtctcggggtgtgcgggaggctgaggaggctccggagcgcggagggttgctcgcgagcgtctgtgggaacagcggcacctccgcgatggtggcggagccgcggcggagctgctgcaccgacccgccgcccactccccgctcgggcccggcccacctcgcagtatcgcgcccctccattggtacagcgcggtgtgacgcggccgggggcccggccaatgggaggcggaggaggcgggatctctttttccttttttttttttttttttttttttttttaatctttttaataaaatgagcagagaagaaggcggagagaggccgagccttgacaacgccgcggcccggggctcgagggctcgcgctgcaggcggcggccagaggcggtgggctgggctcccgccgcgggcgcgtctttgtgagagtgcgaggccggccctcctccgccgcccgccgcgctccagtaccgccccccgcgccccccgggctgggccgggctggcggcgcgggcaggtcccgggtggggtggggggaagtccggttgatcttgctgttacccgggtcttaattggccttttcagtcattaggacgcggatccatgttgctgcgggctacagagtgggtgtaaaccattctcatatggactctttcgaaattctgatgagcggcttgtaatatttttcaaatagtgtacatgacaaaagatgaattacagaaagaaaaataaaagtgataagtcgcactgcttatttgaaaagaataaaaagtgtcatgaaggcataaaggagagactgtacaggtacagaagggattttagaaagagcagtgtacaactctataaggtacgtgtgaaaaaaaatctaaaaagaggaaaagaccaaacatcacctctttttctttgaagaatgaagtattgtgtcccacttcccgaaagcctgataatcacagggtctatcatgctgtaaagggagtaggggcaggccaaatgatcatattctagttcatataatttatgggattgaggggtttggaaatttcaattatgattagcagtttttgaaatgcacatcatgtttattgagttctttcacagagcctggcacgaatccagggtgaatcatcaacctattgttggtttgttaatattctgtaaatgcttattggtgtccttataccatacactcttcccgaaggagttaaggtccgtataaaataaggggtagaaaacgtagcacaaaataattcactcatctgtttcaaaagaagtgataattttctccttggaaaatctattcagattataatttccacattgaattattcattttttttttttttctgagagggagtttcactcttgttgcccaggctggagtgcaatggcgcgatctcggctcaccgccacctccgcctcctcagttcaagcgattctcctgcctcagcttcccgagtagctgagattacaggcatgcgccaccacacccagctaattttgtatttttagtagagatggggtttctccatgttggtcaggctggtctcgaactcctgacctcaggtgatccgcccgcctcagcctcccaaagtgctggaattacaggcgtgagccaccgcacccggcccacattcaattattctttaaagaataatttggactaacagatactattggaccatgacccaagagatcttaaaaaaaaaaaaaaaagccatagatccttgccatcacatttctgagtaactttcagcaagaaaaatcctctttgctggagttatgaaatggggaaactagttaatatctctttatatatctgataatgtgagaactgaattttaaaacctaataaattcaataaactgcttccaacattctagatatggataggactatctgacttcctgtttggaaatgatgagggataaagtatatcagttagatggcttcactttccatcaaaatctctatctacaggagcattctttcttttttttcttttttttttttttgagacagagtctcgctctgttgcccaggctggagtgcagtggcacgatctcagctcac

SEQ ID NO: 1832 - DNA, 4001 bp, Homo sapiens
caaacacttctcagccccaaccataaactgcttatttataaataacaatcatattacagcccaaatgttcaatgaaaaacagattaattctgataaagaataacgtacaaaaaagcagaaaggtgaataaagacatcatttttctgcaggaactagaaaccgtaagtctaatcaataactttcctaacagttccaacttctagctctatcttatttaataacaccaactcagaccatcttcaaccctgatctgaatcaacttccctcataatgactgtgcaagcagccaacttcctacatgcctaatatttgatcaacaatttcctcaaaaaggaaagtacgaaacactaccacttcttaagcagctagctaacagcaattacttctcataatcctaccaatatctaaaatccaataaaaattccaaaacactctcaagcaagacaatcaacaccacctttcacttcatatgactaacctctctatcccaaatgtcatgactaaatgttactctgtatcattcaagatgccaactatgacgacaaaatgtctatacctagcatttctcaagtcagaagttccagtatactctgttatccagtatagtacagttacatctgacacagggatgttatttaacaaacgtggttctctcttttcaagacacttggtggagaagtgaaaaatctgttaacagactttgactacagtcgtctcaacagccgattcctaagtggcccatcctttgaaatggaagaagatatttacacatacatacgataggtacttacattattataaaaagcatgtctttataagacatccatgcttatgtttacagcatcatctaccatacttcaaataaattttgaccaactccacccctctgcatccgaggaagcttagtcctctccatttgcaaatttcattcatctcaacaaggactcctgattgactgagtgttcaattcatcagagaggcaaaaattttaagactcaacctctctgccaactttgttatccaaaaccatttatttgaccttccacctcttccctcgtcattcgttaaactcccttcacttcctcctcagcaacacttacctacctctttattatccccaccctgcctcgctactccaacattccttcaccccaccaaccaggagctcgaatgcctgcaaacgctcgattccctctgcagacaccaccacagcaccagtatcccaagctctccaacaagccacccccacaccagaccccccgcccccaagcctaagcggcagaaactcataatttagggacaaggagggagtgctcttcaaacccaccatacgaagtcgttgcttttgtcctcgtaggagttgatgagcccgttgcagaggggggcgaggagaggtcgcttcctgctgccgctgcctaggctggagctgctgcctcctacgccggcgctgggcctggccgcgcagctgtgccgggacaggcccgtggacaccgccccgccgccgctacccgatacggcgggcgccaccaacacaggccgcaccgggcccccgaggccgcccgagccggcggcctgggccaccccgccggacaccagcgctgccgccgaaaccgccacggaaggcggcgacggggaagaggataaagacgaggaggcggaagtcaccgaggaggccgccgaggacccggggcttgtcccagcggagcccgacccggcctggcggctaccagacatcgtgactccctcccctccagccgggcgctcggaggagagggaccgcgacctcgaccctccgccgcctcccctcccctcagcctcagtgcatcctgaggacgcccgccgagccggaggtggggctgaggaacaataaagttgcgtttttttttaaggcagccacacaacagcgtcccacgggagggggcggaggaaactaaaaaagcggagtagaaggcactaccgctgtcgaggccgccgccgccaccgcggtccctgtagcagccaaccccggcgcgccgtggccggccgtgcgcgcgcgcgcgagcggcggaagaggcgggcgtggcgggggatacaactggggacgcagcggggctgcgctcagacgctcagggcgcgccctcggggtcggggctccctggcgaagggagtctgtctgtcccaagccgctttcgttccagaaaacgtgccagagggcaggccgtcttaatacagtgaaagaattgaggagactggaatgaatggtataggtggtggggtggtttgaaagacgggaacgtagcgggcggaaactctcgaaaagcgactgcgcaggcgcgcgccgggcgcggacgctcacgggtcacccagggtatccgccccaagcggagaatatcggcgcaagcgcggagtagccgtgtcacgcatgcgtgcgaacgcaccacattccggaacgggaagaaggagctgtctctctcttctgaggggtaggcaggtgcttccgaatcgcggaatgtaggtgctcataagctggagacccacggaaagaacctagaagctccgagcggttgcagacagcactgcattgagccaacgactcctgctctactgatggtgattccacagctttgtgaggaataagttaagatgaagtcagtgaagttttctgcgaattgcaaacattgtagcaagtgttaccaattttattagttcgaccacgacttcactcctatattttgaaaagctgtttgccaaattgaacataacaataatgggaaaacagattttgctcaatcagacccagctcagtcggaacctaggtttattgtggatctgatataattctagcacaaaacaaggaaacctagcatttaataccaccagaaaatatacaatttctggtaggcttttttagaatattgaaaattgattataggcgggcgcggtggctcatgcctgtcatcgcagcaccttgggaggcctagggggtcggatcacctgagcctggaggtgaggatcaggctgaacctgaggttagagaccagcctgggcaagatagcgaaaccccgtctctacaaaaagtacaaaaaattagctgggcatggtggcagcaggcctgtagtcccagctactcgggaggctgacatgggaggattgcttgagctggggaggttgaggctgtagggagcggagatccctacactccagcctgtgagacagagaccctgtctcaaaaaaaaaaatttttttcatttgccgcattctaaggggtgggagttagaaacaactgtgtgattttatccttttcaattctatcattctatgattcttatatatttatttgggaataaagtgtgaaaatactcatgacttagtaaactacgtgcgtattcaaggaggtaaaggaaggcaaaggtttttaaaatttaaaaaaaaatgagaattacataattgtttttaaaccgttatccttggctacgaagatcaataacaaggtgacaccagtcggaaactggacaggaagttgctgggcagatgtttttgcggaagtattttttgtgtaagattgtggcttttggccaggtgcggtggctgaggcccataattccaacactttgggaggccaaggcgagtggatcacctgaggtcaggagttcgagaccagcctggccaacatgacgaaaccctgtccctactaaaaatacaaaaattaaccgggtgtggtggcatgcacctgtaatcccaactactcgagagtgtgaggcaggagaatcgcttgaacccagaaagcggaggttggagtgagccaaggtcgtgccactgtgctccagcctgggcaacagagcaagactccatctcaaaaaaaaaaaaaagattgtggcttttgcaggtttttgtgatagtttttgtcatcaggtgtgcaagcatgagaccccttctcttcatgacctctgaatctatttttcagtgttttaaaaaatatattagtgactacctcccacccccttttgtttaagagatggggc

SEQ ID NO: 1833 - DNA, 4001 bp, Homo sapiens
agactgaaaaaggaccttagaaattatttgacaaggccgggcacggtggctcacgcctacaatcccagcactttggaaggccaaggcaggctgatcacaaggtcaggagatcgagaccatcctggctaacatggtgaaaccccgtttctactaaaaatacaaaaaaaaattagctgggtgtggtgacgggcgcctgtagtcccagctacttgggaggctgaggcaggagaatggcgtgaacctgggaggcggagcttgcagtgagccgagattgcgccactgcactccagcctaggcgacagagtgagactccatctcaaaaaaaaaaaaaaaaaagaaagaaattatttgatgctaggtgctctgaggagccctataggctaccatggagaggagggaagtagaggggatcagctctgacttcatctctgctgggcttctatgcaagtgctcacagagatcaagtgagaggcacaaagtcaaactggcagcaagtttgcaaagccaactatcttctgacaaggcagaggaccctacctctcccacatcaatgttttgttgatgcccatcatcctcacatcctcctccctcagcatttccatccctctcttgccctcttccccaacacacttaccaggatcccctctactttgttctgcacggccttgctgtggggaagaggagaaagctggaggtcacacacaagattttccctgtctctttatctgactgctagggagggaaaaggactgaaatgcccagcaggtgctcaagaattgctaccatggccaaaaatctccctctgctcccatgcccttgctgagaggcagttcatctacagccaaagtgaagtgctgcagggatctatactcaggtcttggacaggacttggagatgtgatgagtacttacgaaatggtacctcggagcctctgaagaagggtggtaggttccccagcctcagcaccacctgggggggcccttcccccagtcttggggctcttagcatcaggctcatcttctgccatcccggcatgagggctagaattgagagggacaggcataaagatgtaactcacactggccttcccttccccagaaggccccagggcactcctcatctctttacccagaaaggcagagaaacagaaacaaagcctccgaatttccccggtggtctttttctcaccacttgccttctccgaaaattagaaattattccattacttcgccaggcccatatatgcccaaagagatctttgccatctccattctatctgccccacctttctgaagtctcctaaatctggaaaactgtaaaggaagagatagggggattgggaatccatgttagcaagaaattttcatttctgcctctgaccccatactgccctcctccccctcaaaaacaacaataacagccacaaaacaaagttctctaattctcaaaaatactcctcaccattgcatatgcctgggaggtcagaaaggatacgaacatattctgcccttctaggcttggaaaaaaaactgggcccaagttctcattacttaatctcgccacgacttcccccgctgctccccctccccacgtcgccggcccctacgtcatctcccacaacagcccatcctgaggcgcgcccccacctccttcccttccccctccattcaatccccggtttctgcaaagtggagcgggggtggggcggggtagcggaactcatgcgctgggcgtcagaaacccggcaggggaatggggtcccagattccgggcacgtgcacatgggtgaagaagctgttgaaaatacagctacaatctttttctgctctcctcccaactcatcttgcccctccctacctctgaacagtcgccttccaacacaagcaacaataaaggtaagggagaaagagaaactacctcgtagccaccttcactccagcccagccccaaggtcctggcccagccggctcgtgcgttgctttattttcctttttctgaatggttgtaacagccgcgatctgcctagatacacgggcggcctgctctgtcattggtcactgctgccacccggagacagaaggcgccgggctcgtaccggcggccgctgaagtctgcctggtaacagaatctgattggtcaataggggagggaaaatccaaagttggtcttatttgagtcaagagggggaagtccgggttgggtttcggttaaaactggggtcggttgggactgcaggtcccaagaggttcttctcttaaagggaccgcaggatgaaagaacgggcgctcggctccctttggaactgtcttttcttttgccctccccttttgtgtttcagtttagtctacggtcctcagagctgccggaagagaagaatcaatggatgataaaataactagacaatgatgggtaggagtgatggaagttcactgtaagctcctataaccccccatcaccatcaccacatgcctaatacaacctgcagacacacttactcgcaacagacctgcaatctgggctctcttttccttcttgatggaggcctcaaaacctcagcagttgtacccattaaactaaaatgctttttccctcttagtatttcttggtttcccgtgtgtactttacttccaaagagttgcaaatgcatttgcatccccatagttctgcagtcggtgaaccctggaattttgatggactcccacgggggtgctggatgccacaggaactttttacactcagggaacattgtactgaataggtcatgggttcttaaccctcttacttaagacattttaaggttatgaatcagacaaaagcaatggaccctctaccatgaaaaatgcacacagagaccaagttttgcatctaatttcagagaggtcatggactccaggttgaaagcctcttacatggatgtattttgttttgcgcagcggtcatgttacaaccaaaactgtatttgccatcctgacatctaatatgttctccaggctcatcattaatgtgcttttgtaaagaagacagtagtgctgcctgagctcatcaccattgccctttacagcctacctttccctattatcagcttctatgagtgctgggggaacccaggagattgtggagttggggcaataaggatatattggcaagaggttttcttttttctttctttctttcttttttttttttctttgagacggagtctcgctctgttgcccaggctggagtgcaatggcacgatcttggctcactgcaacctccgcctcctgggttcaagcgattctcctgcctcaccctcccgagtaactgggtttacagacgtgcatcaccacgcccagataatttttgtgtttttagtagagacggagtttcaccatgttggtcaggctggtctcaaactcctgacttcaggtgatccacctgccttggcctcccaaagtgctgggattacaggtgtgagccactgcacctggccaggttttctaataacagctaaaatttatttggtgtttattaggccaggcgcggtggctcacgcctgtaatcccaaaactttgggaggctgaggtgggcggatcacctaaggttgggagttcgagaccagcttgaccaacatgaagaaaccccgtctctactaaaaatacaagattagccgggcgtggtggcgcatgcctgtaatcccagctactcgggaggctgaggcaggagaatcacttgaactggggaggcggaggattgtgccattacactacagcctggcaacaagagcgaaactccgtctcaaacaaaaacaaacaaaaatttatttggtgtttattaggtatcagacaccataccaaatgctaaacacctcgtgtaatgctcacagcaactctctgaagtaggtactgttactgtctccattttacagatgaggaaaccaatgtggagaggtgaagggacttgtccttagtcatatatgtagaaagtgctagaatcaggatccaaaggcaggcagtctgcct

SEQ ID NO: 1834 - DNA, 4001 bp, Homo sapiens
agtcctgtttacagaagcagcatttttccaaaggcccaccactctacacacaaagtagtgggtactaagcatccatttgcctcctcccaagatatagaaaagagatcacaataggaaatctaccacccctcaaaggatgcagacttggaatgctctgtctcctgagcaatctgggtacctcctagagatataggagcaaggcagacgctgacagcatcaattgggggagggcagagagagacaagggtggcttctgggcaaagctgcttatggctcttgtctaagagagtgctgctctctgggcctgtattctgtgtgtcattttctgccactccacccccaatctatttgccaaagacctcaagatgtttctaagaggttctgaattattgacaaacctagggaagatgcttttgaaaacattaaatacaaaaagagacctgttcagctagtgcaaacacttggtcattagcattttcctttttaaagcgaaaagaggaaaaaaaaaaaagcctgcctctgttaaataataatgatattcacagaacgacagacactgaaattccaaagttcaccatctcgccagctttactcacccctagccatcttgctcctttattggcagcctgttgaatctggactcttttgagggtgacatggtaaacagctccttcctctacctcttcaccccagtcctgaatcgagctctgccagggacgggataaagagaaagaaaaagagtatttttttcctctctgctaaccacaatctatcccagctgccttgctgcttacaacagcactcagggcacaagatgggctgttcaaaataaatattacaatccgcaatacaagacacattttgatagagggaatgctgagattttcttggcttgcagtcccttcctgtggtatcaggatcccctgacttttccatttagttatttctcctagacttgctcacatatcttaaatagttttgttttgaagtctttctttttctttacaaagaaactagattagtcctgattaacttgtcccccttaagtgaaaggaaaaataattctttgtaaaaaaaaaaaaaaaaaaaaaaaaaaaaaaaaaaaaaaaagaaaagaaaagaaaaagaaaaagaaaaaaagaaaagaataagtctgtactttttagagtggctcggtcattgaagaaaccagattttaaactcagacacaaacaagtgtttaaaacgccaagagtcctcactcctttggaagtgaagtggtttgcttgtcttttctcctcattgttttggagcccacaaagttagcgggggtggaaagtttttatttccgtaaaataatctggcaagtgcagaaaaagcaacacatcatcaggcagcttctactaaaatctgtgcagcgaccccctggatttccatgtccccagctaaacctgaggtttgtgttaaagagccgctgggacgcagaagcgctccgcggttcacccacactaacagttctttttccttcaaagttctcccctcctgacatgcatctgccccagacacaccacaggcaattgctgagaaagtaggtacggttgaaagggagaagacacgcagagagagaggaatacaaagcggagtgagagagctttagctcacaagtatggaatcggattgctccgttcactccgagggagtccaaaacacgcccagcgaaagcgggagaagattccccaccagagaagcctcgggagaaggcagagagctctcgttaccattttagcttgccaaagcaatttcattctcagttttctctccggtgcgcgaacgctgcatgatgcgccctgctcggaggccaacgcaatgtctgctgggctcagccccgcggcgcctcgccccggtcccggtcccgagcgaccgcagcgcacagacacgcgccgcgctgcccccgccgccgccggtgcgcgcgactcgggccacaaagggagcgcggcgagcgagcgagcaagcgaggagcagactcctccccacgccactccgtgatgtaaggctttcctgtttgtgcttgtgagcacactctccctttcttcagtcccatggataaagtcagcatgaaagcgtttctccagttctgaaggtgattgggaaacaacactttcaagtttatcaggttttcctgacggtcaccaggtgccaaaatagaactgagtgtgggatggaggatttgtgtgtgtcttcttccttcgctaaaacaatggaaggagaaagtccaaaaaacttccattatctgcctattatctattttgattttagaataattaagtcagaatgaccccagtgagagccgcaatactagacgccaggaagtttttcattaggacagaggataaggtcagaggacacccgggtattccaaaaccatgcccaggggctataccctctcctgcatcagcacactgccaacaggaaatcgcgctgggcttttcaccaccccaattacccagtaactggccattgggggtgggaagggaacaaagcagggtaaggttttgctaggactgacagtgtcctggaggttctgtgagtctttgtgagtagccaccatgggttgagttgcctgtactgtagggacacagtaggatcatagccacagggaaaagttcttcatcagatgactaccagcaggagttttatcataatggaaagatctgctatagggataaaagattattacatttttttagatccagttttaacaagtcaacagcaagagataccagataatgcagtcaaacttgacacctgccagaattccatgcaaattgcaaatacctttagggctcatgtctttcatactattcaccctaaatgaatttaatcaccttcaaataaaaaaaaaaataggtctcccactaattgccatactatgacataagcctgggttttggttaatggtaaatatatcatgagctgacaatttagcaaatcaagtgtactgatgttcccaggagagcagaataaatgacagcaagggcacattaagcaaaaacaaaaggatctgtggacacttgagaacatctacaagtcattcagccaggttatccccatacaaccagaacctaagggcaccatcactgtatagagaggagatgcccttttagcaagctgaagtggttgttctataatttaaaaaacaaacgaacgaaaaacacatagactaaatccttctatgatgatcagggcagaatgttgctgggaaccagaggaaaatcatgtgaaggccctacctccctgcttgttaagccatcctcaggaacccaggcccacctctagaggacctattaggtgatcttggacaccacgaaatgcaactgaggacagttaaacaacctgtaagattaacttcaccactactttaacctgatttttggctacacatttggcagtaactgaaatatttccatttcagggatattaagcagtttcttcaacctcactctcccaggaaaccttcctggacagggcggcttaaattcacaaggccccactcaggtttcagagctactcacctttctctgtactccaattccctggctggccacctagtgtgtaaagggaaaagaactagcttcaagccaagtggatacagcttcacatccagccttgcagtgagtgaacctgaatgctactaccctgagccttaatttcctcatctgcaaaatgggacaaccatctacctgaaagagtttgaaagagatcaaatgaaataatgcatgcaaatcatcaagcacatggtaagtgatccaaaaaaattccactgcctccttattgtacttcctcccaaaccatatttatccagactcagtgaaaagcgtgttatgtatgcaacactaggaaatctgaaatgatgtcttctcatggaattactttaaaatttcagagaggttttccaagaataactatttgtatttacacctcacaatgtatgtaattttgtacaaatgctgttctgcaaaaaa

SEQ ID NO: 1835 - DNA, 4001 bp, Homo sapiens
tgtcaatagtgcctctaatgttcgattttctcttcaaagaaaaatcttgatttaaaagaagaaaaagtacaatcacctttaacagctaaagtatactgattagcatctactaaagttagcaaagactgaaactgaaaaaaaattgtaaaatctttattctaagttatataacgccattcaccatagtaatgattttatactttggtatatggctttttaaaataaatattgccaacaggtaaaaatttttcctttgctgtcttaaggcattcctaagagaatttttaccagtgtgtgttcataacttgaatgttaatttaaacaatgttacttctatcacctaaatgatatacttatagaagagtggtttaattgggaacagaaaaacaccacattgcttcttcccaagaaaaagggatgtattccattctcgaggtctctctcccactctctatttatatataatatactgcatagataaatatacacacattatatatgtatttttttgaacttaaagaagactggacatatgtatttacatgtatatatccaacaaatatttaattttgagatctctctccctcttctgatttattattctcagtatgattctcaaactgtacggtctttcacatttcattcattcatcaagcatgtatcgagtcccttctgcatgcttagctttttgtcatatggaaggaagatacaaaagaaaaactgtttctgcccttcagaatctttccatctcttctaggaaggagataaaacaccatatatcattaagaaatttataagactagtcccaaaaccaatggtacaagcaacatgcattttacatttatgtagaattttagagcttggaaacactttcgtgatatataatcctaagaacaatcttgtaaagtgcacattattagctccatttcagtgatgaggaatctgagacagaattttaagtgacatgtctcgttcaaacattatgagtggaagagtcaacacttaagcctgagttttctgattctaagcctagtgctcttttcaacacagcactggaaaccaaagattgtggtacacaacagggcaacagccagtcttctgctcgaggtccaactaaactggacccataccgagcagtgtccagccaaatgtccaaattaattttatcctgcaaatatttgttcttcagtgtaatacacacagcacaactaccatttccttcgtcttagtgcctttatctcctacattccagaaatggggatgtcaaatatttttttaaatctggcctagatggaatcatataaatctcaaatcataatataaatcttaaaggtctggtttccaccaatccttccacattttgttttcccccagcactagagagcctaacctaccctcacccctttcgagcattcttgctccaaacgaccacctattttaagatgtcaatgaccctttcccaaattctacaaattcaccccagttttgccacccgaccccagcgcctgcccggacacgttcccctccctcccaatagatttgataccgagttcaggttctgcagatcccgttgcgatgctgtcacacagcactgacagataagatttgacctttcgactccgtccttggggacttcccgctggccaagaagggtagttccaatcccaggaaacgggcttcctgctcaggaacgcagcctctagcagcgcacagtctgaggcaatgtctccggcaattagaacgatgctgggcgcccgggtgtgcatcactctgcctcatactcctaccaactgcagggcactcggtccggcagccagtccatcccacccacagccaagtcccagccagccggaccttacgcaggaccccgatgataggtcgttgacggctgcagcaaaagccaaggccacctgccgctgctgcccatccccgccaatctgagaccccctagactggaccgcagaaaagcgtttctatgggaacccccccaccgagaatcacgtgacgcaatcggacgaccaatcgcttcttacctctgcccgcggtccagcttttggccctccctctcgcccccgcctccttcgcccagccccgccccttgcctgcggagagcccgcgcctgcgcgctgtgtcctgcgcgctccttccctcgcgcgcgctctccgtggaagagcaggggcagcgtgggaggcgccaagggagcgcgaacctgaggaggaagaaacggggctagcgcgcaggcccagaacggtccgagccgcggcagtcggcgacgcctcagagcggaagagggaagtgaatcaggcgccgggtagtgggttgctgggctgggcttgctgaggtagaggcagcgccaagaagaggcctttgccgctggtcgggattgggatgtcgaagaacacagtgtcgtcggcccgcttccggaaggtggacgtggatgaatatgacgagaacaagttcgtggacgaagaagatgggggcgacggccaggccgggcccgacgagggcgaggtggactcctgcctgcggcaatatccttgcattcaccgccctccccaccccagcccagcccagcccgcccttctcctgggacccgggagcctgcaggatccgcggggcaccggcgcggagctgccctctcaacctgcggcttaacctgtctctttgggatcgcccgctctgagagggcaagggggaagcccccgtttcctacccagtcggcaggagacgcgagggtcccactcttggaagcctgccctcccccgcgcgccttccacgcccccagattcctcaggttgcacccgagtgcctgcctgcctcgggaactggtcccgccggccgcgccctcgcggcgctggggaaggcggccccggctggtggggaaggctggtgccgagcgccttagtttttcttcctagaactctgatttcctggggtcacattagctccagaaatttctgattgtggggaacctgcatctttccttagtggttttgttttttgttgtgtttttgttattggtagcgttaaggtagtttattccttaccggggggcggggggagatgggactgttcgaaaattgagggtccctgtgctttcagcccattggcctttttaaaaaaaaaaaaaaaagaagaagaagaaggggatttggcaaaatatacattgtacagaatttgttaactgggggaggggaatgaatacaaaaaatacaaaactcctagaaggaagcttggagccttttacctgctaagaaaaggacaatagaaaaaacaacggggaatgcgtgtggagaatccttggaaatatttaaaataaaccccaatgaataagatagaagatgagtcattcgtataaagcagaatcatttttgtaatcctaaaattgtttccattttagttaaaatatggcagtcagttcccggtttctgtttttgcatatttgaatattcataactttggcttcgcatttgcattacatcttttttagaaaaatgtaaatgttgcaaaaaaaccgaagctgtagttttagaaaatctcagacactgaatttgtatgcatttctaattcttgggtgtattcataaggaagactctcaacaatgtcctgttatagtggggaaatatgagagtgaaaatatttaatggcaacaatatccttttttaaaggcacctaaatagagcattagacatttatcaatatatagatagtgctttgccacaactttcacaattaattagctgttgctcttttgcattatttaaatacttaagtgcttggagttataaaaaatgagctaatctacatcaggcatgcttctctagaaatccctgcagccttgaaaataacagcttgtcaaccagagattttgtgtaagaactttttctttagaaaataaatggtgaacatgcttcctaaaaacattatttgtgatggatagatggtgttttatgaaaccccagtgtattttaggtaatttgtggtgacttttaaatggtact

SEQ ID NO: 1836 - DNA, 4001 bp, Homo sapiens
agcattcactgagacttttatatggcaccatttatggtccatatctataccatttatttgtttagctgaattataaacaaagtcagctgagctagagtgaacaatgtgattcccaagtaaagctccttagggtgtctgtggggagaaaagaataatctcactctttagagatagagaccacactgctcatctacacctctgaaaaaggtcctaatctcagtagaattgtaatgcccaagacaaggggatggcaagctgatttcattctttaccttctctcatcagaaaatctccacaagactatatgtgcttaaaaatccttctatcatatttatgtcataaaaactatcatgttataataatgcaattatttatgttatgtatctcaaccaccttcaaggcagtaagagactgtctttgattttgaatccttggtacctctacaatgtcctctacataagggtgagatgaatgatgaatgtatgaaagataatttaattaattgaatgaatgaatcatacttgttacatccaagtgtagaaaaatacattctttaggcagatttcaaaatggcaatgtacatattaaaatatttggcttacttttaaaatttttacatatcagaatcccagcacaatgtttaattttatctccataatgatctatgaaaatacctaattgtcttggcaaatttgtctaaaaggagttggcagaattgagtgctaagtcagcattattaagaggcatactatgctgaagttatcagtaactacagacaaactagaatacaaccttttgcatactatcctacccagaatactatatttagtgaagccattcaattttttagagtatttagctgaacccagaaacattcaatagttatacttactttggttggcaagaagtttttccagagattgagaccattgcattacttcagcagcagaaagtctgcaggggacaaaatgtacatacattagtcaatttttaaaatgtaagcacaaatgaaataagaatggctgttacactttgataacttcacaaactgaaactgtagttctaataaatatgttaaaatttattcacaaaatgcaaaacttcccttagagttactatagttatgaaaaaaaaaacctgccaataaaatttgaaaaaatccaaatagataaagtccaatatgtgtgtgtacacatttgtattcaatttacattggtactgatagtctaattttatttggcatgttacttaaaagaaatgaagtctactgtgcgcagtatttatcccttgctgggatatagagataatgcataggcttctcttgtaaatgataatgatagtttagtgtattagtgtacttacacatccttggacttggaagatttcattccagattccagatgtgggatcatagatctcaggtatgctttcatatccattccactacaaaagacataaaagtgaatattcatatttcttcagaattcattttatttgtaaaaagacatagaataaatttctctaaggaataaggcaatactaaaaatggttgatacaacattttgctatagaacccatttttatgagcctgtgtagagaaaaactcctacccaatttaatgccatatcaagatttattttttaatgcagctgaatattacttattactcacaacaggcaattaactcctctgatctggctaaactaaatgctcacactctcttccattcattctcaatccttctgccattaaagataacttgttaaaattcacaaagtgagactctgaacaaacttacaaagtctttggcctccttttttgcattttgtcgtctagaagtgaatgagtggttcctttcaattcctttgggttagcagagaagaacattcctggcattttgtctaactttggagtggagatggctgctgcgcgcatggtgctcttagcaaatatgcgctagtcaacgtctctgctgctttatatagtagaatgcagacaggcacttgctgtttaaaggagtctgtttatcaagtgatgttaccacagacactggaagttccccttttcttggtgtgctgtgacgtgtatcttgaaaaaaaaaaagcatacagtggtgtcttgtggttgaaacttaaccaaacgagaacaggtcacttgattagaaagaaagaaaattaaacatacagaggtacacacacatatgtcacatgtctaaagcattaacagcatcagtctttggttctggaggatgtttgtttattttaaaaaagttgcatgtttcaataaactgtttcatttggcgtattaatttatcatatagaaactcacatagaaattcatcacatagagttgtatcttactccatgctttggatagtccttgactataaaattcatctgatcaaaatattttaagagttctcttcttttctgcaggaagcagggcaaagtaaacaaataatttttgtttaattattttgcacatatctgataggagggaaagttataagaggctatcttcacattttcccactccaattctcatcccttatttccatggcaggaaatttccatgttaatattttccaaggtgtgtgctagacatcgactggcaatacataggatgattttaaggggtgcatggtttttaatattattttcatatttattaagaatataactagtatatcaaactttgatttttgcatattttgcatattaggaaaaaataaagtttaattaaaaccaatcataaataaataaatgtttaattgtatacaaatatgacataatttgtaaacatactgataccaaggtcacagtatcagaggaaaaactgctcaaggtaaaataaaagtctatttggatagaccaataatgtgtacttcttaggtaatgatctttcacattttggcagtatctctggagagataacagttttagctttaattgagattaaagtttaaaacacaaacaaaactcaaggaactagatgactaatcatttataaggatagagaagttagtaaaatataagctttcaaaagtttatataacaagtgtggcttatttatagagtacccagtttaacttaagcctccttggattttacccctggaaggacaatactttcctttaaaaggacaaaaaagcatttacttagtgaagcttctgatggtattaggtaaagctgataaaagggaggggagtattaatttttctgttctggttctatcgtcaggataaagaatatttgaagaaaacacatttacaatattataaaattcacttatacacagtcattaatttcattataatgagctcattatattgtatgtaacaagcatcattttatgttgggaagataacataaggcattaagaaagataactggtgagatgagctggccactttggaagtgaccctaatgagaccgatgaaactcaaagacagatgacataaaggcatttggttgtatacttcctgtggttcagtccatacttaatttcctgttaaaatcttcaacattgctcatgtttgttgatctagtatcctctcactcctctaaataattgtgagtaagttatgttagagtaaaatgatttaaaaattatttttaacagcccactagtattatcatccaaatatactgacagtttccaaagaacaagagcagcagcaaaaattatggggccaagtaagtttgggaaatgttggactcctaacttgttaaagaactaaaccctctttagatagggaaaatagttttttgaaataatgtgtttttttgacactatgttaagaaactctggtctgagatcaaaataagtttttgcctgtagtgtatttaggaactgctctgatgctcccaacattttgctacccctatcccaatatacattttgaagcgcaagcatttacaactgcatgcttccacacttgaatagaaatataaactcttgaaagagggagtcctttcaaaattcctgtatcacaattggct

SEQ ID NO: 1837 - DNA, 4001 bp, Homo sapiens
acagtctgaggacaaagaatttgcaaaataaccattggtttaaaaagaagtatctacaatcctacattcaacaatatttatcattaaataatacatctcaatcgacagtttaatagcaccaatatagagtggcagaatgaaatcctctcacatttacaattgagaacttctaagaaatatccttggtaattccataaagggaatgttctaattttttacaaaagtaaagttctttaggataaggatttgattaaaacatcctattgataaatttattttgttagttaaatccaaccaagggcatctttagttgtacccttaaaattagagttcaagtagtcaatatggataaaaataaaaaataactttaaatattttatagaactacaaatctactttggcaaaaagagaattcccagtgaaacagtgatctaaattggcatgacgtagaactgatttaaattgtggataaactcaccaagcttcaaataaacaatgatcatttttttctcatgttggtggtataatatgtggaaacattccattgacctaaaaataaaataataacaaaaccaaacaaaaacaaaaagattattgtgtgcttcctggagaatgcatatttggcaaagattactgtaaatgctcttaagttttaagtaaatactttttccacctcggaaatgctggattatggttattcccatttttatttattaactctttatctaaaattgtgttaatatcatggcttattataaaaatttctttactgttttaatttgtaattttccattactttttatttaaataatctatatttatcttaatattgtgtattaatttgctttccttttttgtttttcaataccctcttggtaaaactagtgtgtacttttacaatcgaaacatagagtgtttagaacaagtttaggtctccacgatgattttgcctccactgttttctcctgataattatttgaaagaaatacatttcaccgatagaatctaattctcagagtgattataaatgcattggtaatggattgagttgtattagtagtatgccagaattagatttgtttcctccattatttaaatgaaatcttaaagtattatgaaaataaataaattttcttaaagcaattctgtctgtttacatatatctgcatttaaatatgtttctttattttatgatatagcatgttacataaaatttagtaaaatttggagcaatttatattttagtgagcttttgttgaccacagcacacaaatttcttgtcctttaaaaaattcaagaaatttgtgcatagttgtgcttaagcataacataaaagaataaaaaaattctacaaaatcaagattaacaatgtttcagataaaccttataataatccacacctggcttcagtacagttaacaaaggatggaactaataatttggtaatgcatgatttttgaaacaaataattcagctatgtctgattttataatatgtttttatctaaacatataaaatgaaaaacatttaaaatgaaaatatacacaaaaacataaaatgaaataatatactttaaaactgtagcatttcctctgttgcccaacttagaagatttatttatataaggagtgactctaagttttgttttaaatatagaaagccaggcaaaagaatatgtgtttgttagtttgtctttttttcttagaaaaacctctgttaacactcccagaagttctaccattgaaatcagcatctgctagtgatttatagcaagccaatagtcttgtatttatcaactattttatagaatctcatacttacaaatatatcctgtcgagcagtccaccatgctaaatttgatctcctctttgttatgatccgtttgaaatcaggttctgaaattttgtgagacacccagcattttatttttcccagagtaaaaggattttactgtctctataattaccttcgatggcactctggcctcagtatgaatgttctgtttttacacacacgtatctatgcaaagagaggttttgttgaatatggaaagtagtgctgtaggactccagtgcattactgataaagaggttttatctaacattatcagaccatctgaagtgatcagatgattggaagcagcagcttcatgaaatcttcaaagtaatactcaaatctttttctccaaaataatttttctagttttagaaaatgtatagtctaaagtaaaattcccttttaaaaaagacagagaactgagtacaaacacataggacatcactgcaaacacatgttagcaaatggttgagaactattaaaatcaatctgtttgtaatagattactagggacttttaacaactgaaggatctaaaaaagtatcttttctagttatacctctctagttccttcaactggtcctctacagcagttctggactccgttgttctacagtttgttaacatgccttcaaaatctgaattgaacacagtgcttaagataaggtctaatgaatacagaatatggtaagattgtgaatgcccttgtcctggatttactccaattgtgtgtgtgtgtggggaggggtgggggagttggggggtttggggggagagagagagagagaaacagagaggtaggagtaaagaaatgctagaataaaacagcagtaaagaagatcaaaatgtggttgatggagtgtttcttaaaatatttaggggcccaatgagatagaagattaaccttacttgtcttttataattttgagattcaaacccaagaaaattgaatttctcaaacctgagagataagtttgggactagaaaaggaaaggaaactttggaaagtcagaagctgcgtagatgtagcaataatgtaggaagtgaagggcaggttagcctcagcttgggaggatctgggttgtttgtggatagcactcattttctctgggtgctaggtgtgcgatttcctccccactcaggacattttggatgctggatctcttcaggaaatcttcagtgtcatagtcaagacttttcctcaccccaaataattcatttttttgggatttggaatgtttgctctttctcatggtgtggatgcaaggagctggcaggaagattctggaagtaacaccctgtgcgagtgtcagtttcaaagcttgtttaatggagtcaaacatgagaatctccctacagagtaaaacttaagtatcgacagggactgaaaaacaaataaatcatagagtgaagagtaacagcacgagtaggtggaaattcctggaggaattcaagagcaatgtgtagatatttgtggcagatttctaaacatggttttgtttctctgaaaaagtgtagttcaagttcagtttatgaaatcatagcaatataatgctttgtacggcacataggtggatcagactaattcagagctgtcaggttagggcaggtaacaggattatgctttcgttggtgcagcttgggaatgccctttccattgaaaggctgtccttctgatgaactgatctgcttactctagagcacttttactatatttcaatttcagccaatgtaagtccaaagtaacacaagttcaaatgtgcacaattaaaaatctttaatatttttatgttgaaagttcaaaatgaactttacaagagcagaaaaatgaagtattagaaattataaattcagaatttgccatttatgtcttctacaaaaagtggagaaatataattactggttaatgttcgtgatgacagcttaagaaataagcctactattttcagtgcatcctatttatactatatagtgtttgccatttgttcagagggtggctcttttcaatatattctagaagcaagataaactcttggacactggggtgaattgtctggtgaaatgtatccagtaggcagtggtttgtgccagtgtttggaagaagactggcttctgctcctgctttccatggacgctgatctgtccctcttagcctttcaggtctg

SEQ ID NO: 1838 - DNA, 4001 bp, Homo sapiens
actcacttttactgctcagcagcaggtcgaacgactctctccaccccagcacatcttctgagaagtttctactaaaagacaaaaagaaaaaaaaagagtaagaaaaaaaatcaacaaaccaaagcatagtacaaattctagccagaactctgatggaaaactgcataaaattcacagaaaggcttgcttggtgattgctgaagctgacacctcaaactcttagttggacttagggtaagcagtagtgctttctagagcacaattcagcaaccagaaatcaaagccagggactctttagtcctcagtcaatatctctaagcctgtctcgtctctgtccaaaaattatttcaattcccctgactctcaaagatttgttttgtacaccttcccaaggaaataaggtcctcataaatagagattacatctacacataactccagagtttggtacagttgatagccaatatgaaagagtttctaggcaaggtgcatactagaaaacttcaagtggtcttggattctgtcctagccctggatgcacgtgcaatgaatcccgaggtgggagagtctgggaactaggcattcatgccctgtgtgccctcatccgtggatggacttggagccctggagccacctacccactcacccatgagccaagtagtcataacagaccagcaacaagtcccactaaaatctctagggaggtgttgccaaggtccacttagcgtgtcctggcttctccctgtatttccctcctcatgactcccttcccactcccttccctctcggagccctgagctggtcagcaacacttacttctctttgctgtgtttactgccccactcgaacttgccagtactcccagtatcgcagcccagctctgatttgtgaagaaagatccccagacgtgtcttgaactctttggctctgaaaaacaaatcaggaacatgaaagcattctctcatttgctcagccagtgtggagaggtttatgggtcccagaagagctctgggtggtgccacccaaactttagcctcaagagttcctggaaactcttggctgtccccaggccaagagtgcttctcttatcagcatcatcaaccccaaagcaacaaaagcaatgtttgagctatgctgtggtaggtcttacactttctgggtaatacacacgctgcatatatgggcttttccctaaagtcacactgatctctcttcgtgcctgttgattcagaaaagaactcagcattcttttcagaagtatttctgaactgtgtgggaaactgattcctgccttcatctttactttttccttcccagccagtaaggattggaagctgttgagtagctctctggaatatggacacaccctcaacagtgggagcccccacccccacacaccccaccaaaaaaaaaaaaatctccctgtcttccaggggcagaggaggcaatgcccctagctctggtctgaggaatgaaaaacaaatgcttaagaaatgggcaggctcagtgctgcctggaaatgtcaacgtggccttcccgcagccgggtcttcagcaggtcacctgagcacgactgcagtttgtcagaggatggggatggcagcaagccgcgggcccttgcttcccttccccttgctttctccctgctcctggaatctgagcacgtggcatcaagtgcgcttctacctctctactcaagcctctagcgccccatccccgcgcccacccaggtccccaggcctgccgctccactccctaagagttggtgggacttcccccaagcagttggacaacctccccttacctctccaggcaggtggtggggaaggcggccagggtgcggcacatggctgcgggcgcagggcagcacgtagtaggcaggatggtggcaggctccaggaggctccgcgtgcgccaggaagcaaaggcgcggtagcaggtgctagtcaactgcggttgggtttagcagcctgcaagcgcccagactgagcggccgctgctttaaatcccctcggaggagcggggcggggctgggcactgctgaccaatcggagggtggggctgggcgctgagaaggcggaggcggggcccgcagccagactgggccgggtgcaactttcgcggcagctggagcacgcggagctgcaccctccgcccagaggacgccgcgtgtggaaggaaaagcggcaagagaattggcacggggatgagacgtgcacacccagtttcctagggaaaagtacctgccgacctctagtaacagcaggaaagtcacgcagcggtgtcgtgttgagagagtttgcacgggggtggtgggtctgggaggcacacagggctttctttgatcgcaggcaagtctgagcctgctgggtcctgaggacaggcgcacagggtgcaaacctgggcaaaacagcatctgattatactgataagtaccctttacgaggctcttaccatgatggacacggggctaagtaagctcttcatcatcatctccattttatagatgaagaaatcgagaatcagaaagctaaataaacttgtccaagatcacagttggagatgacagaaaagtggaatagggatgagtagtttattgaacacctactatgtgctaggcacataagtaagacttgctcaaagtcttagttattaaataacttgctcaaagatgtgcagctagtaagtgttggctccaaaattcaaatgtgaatttgccattctttttccattgcacacacacacacacacacacacacacacaccacacacacacacaaaggttagtacccggtcacggctatacctgtggacgatcctgggtttaagcagttaataccttattgtctccatctctgacataaaggtaataaatgcccttcctctcacctcatcttcccataaaggcattgggattgctattaagaggctgtatgtgaggttaaaagtacagggtctagagttagattttcaggtttcaagtcatggctctgccaggtgacctgctgaagacccagctgcaggaaggccacgttcactgttaactggctactgatgggagacgaggcaaactgcttaacctttctatgcctccatttccttgtctctacgaagagaacaacttatttcataaggtggttgtgagaactaaataaattaattcttagtttgagttcctaggaactagactcgggtagacacttgcatgcaggaggtttactggggagagttatcagaattaagagggagtaaagaaagcaggtctgggcagagggaggagttgaaggccatgccatttcaacagagaccccagctggttccaaggaatgcccggaagctcagctggccctttggaactgtccactgaagcaagaggacaaggccctggtaaccccataaagaccattcattgcatacagctgcccaagaagacagcctaatcttaaggcagtgccctttgtcaagagcaattcctggagagagactaacaccctgggaaatgatgatcacagtccccaagacgggatctgggtggcaccgcacagcatccgtgacaacatataaggtgcttatatgacagtgctcaacatgtagtcagcagtcaataaatgttataatagctttcagttttacttaatagggatactgggattgctagcaataaggaaaattagtgagtcttttgtgcctcttggaatacagtataggcagtgtatactgaggcactcttagttaagtacacctgaggcactcttagttaagtgtactggaacaggaaatagctggaaattggatcctatctcccaattcctgagctagtactttctcctgctctgataaagaaagcaaaataaacggtgccaggagcagtggctcacgcctgtaatcccagaactttgggaggctgaggcgggcagatcacctgaggtcaggagttcgagaccagcctggccaacatggcgaaacccagtcgctactaaaaatacaaaaacatacccaggca

SEQ ID NO: 1839 - DNA, 4001 bp, Homo sapiens
tatttggtgaaagtaccactaacctctatgggaaagcagtttgtcaaatgattcaccccatttcactgcctcttcaggggagactctgtacaagaaacaaaatgttttataatggagtgtgcagaaagtctgtttatgaatctgttctaacatatgctattttactgctcttttcaattatatttcacagtttctcctttgattataatataatgaaaattgcatttacattagaaactttgaaaacattgttcaattttcttttggaatttgtctgttgaataatgtgttgaaataacattattttttttctcatggatatgtgagttttattttttaattaaaaattaatccttttttaggttaaagggcacagataacaaatataaagaaatcaggtcaactatctgtttaaattcagcaagtagaaaaaaactaaactcacagtatctttcagttaaaaaaaaattatactgcaatttccttgaagctgtaaccacactaggctgcaaattttttttttaaacggatacaggaagtttgactaataaagtttcaaagggataagaaatataagatattttaatagaaaaaatattctagagatgttggtaatgtggagaattgaatatattttctcggatcttttttattatactctaatttggaagaatttgtatgaaactagtatataaggtttttgcattttctttttgaattaaataaatgctaagtattaaaagacattatttgtgctttacttgctataatgcgtgtgttttttcaaactactgaagaaagagatgaatatctctctgctatgacaatattgcattgtgaaaactcttaaattaatgagcattttatcaggttataaggagtaaaacatgtcatttaaaactgacaggtatataattttaaaagagcagctttaagtgttcacgtgattattcaattcaagcgatttaattcaagtgatttaattttatgaaatatttctagtctcttcaaatgaaatttctaactttccttatattgctgtgtaattttcaataaatcagaaatccctaactgcatttttcttaaatctttaatgatagaatcagcaaaatcttcctcaaaatactgaaaatttattcaccttgtttctttggccaagtgcccagatctactggagcgggtgtcttcatgaaactcaggtttctgcacaagaagacttagtctatttcttttttccttagctctgtaataaaaaggccttcatgtcaggacaatttagatgacagttaaaatctctcctgctgactaccagaaaattttgtagttggtaaaaacccacgcccacccatacccacacactcatgaatcccatttaaatattgtatttgtggaggaattagggtaacatacgaaaatgtttctccttttgctcaccgacaatcaagtatttgagattatatttcaataaagattgcactagttcctctatgtggctaacattattacactttttttttaatgagaacactttagatttcagtttgttgtttaaacctaagaaataaaaaggtgtttttttttcccaaattatagcaatacaaacaatatattttccacccaatagttcaaaaacaagaggtaatgaatcttcaacctcaattatgcttttaaaagtataaggctgacttaaaattgtacaattttacctgattttggcttctttgcttgtttcttcttttcctgaaccatgtattaacttgaaaaaagttttttcttttgattcacacatatttatttgagaaaagaaaagcaatgttgtttccatcttctctctaaaatgaagagatgtctaatttattacatccttccctagttcatttattaatactattccatacatatacatagtagaataaaaagttatcacaactcttacagtaatgtttacaaaaaagaagtcaagagctgcgtttctttctgtctctgcagaaatgcagaactgaggaaatgaagtacaatttggtcctaagttgtttagggaaatgataccacaaatttgcaaaatgactcttggtctctaagataaagactagtcttaccacagtgcaacttctcgttcaagtttgcgcaaccagaatgatgctttaatagactcaaataacactgtcatttcccacaggaacttttcaaaaagtttttaaatgtgtggactgtgtgttaaaatgtgttatggcaaagtattatatcaaacattaggagatattttctccagttcttaaaaaagtatttttcttattgttattacatgagttaagtaaatcacatttaactgacataagattatgtaatgttaattacattggcttaacatattgtaacaaaataagacaatagatcagaattttatggttaaaaaaagattgtagaaagcatttaatttaacagttttgggctgggcacagtaactcatgcctgtaatctggaggctaaggtgggcagattacctgagctcaggagttcaagaccagcctgggcaacatggtgagaccccatctctactaaaaatacaaaaaattacccaggcacggtggtgtgcacctacagtcccagctactcaggaggcagagccaggagaatcccttgaacctgggagtcggaggttgcagtgagctgagatcatgccggctacttcacttcagcctgggcaacggagcaagactctgtctcaaataaataaataaagttttaagcacatatctatagaatgattttagacatttttgaaatttttatcagtctgtgatgaaatggaaaaaaatatgaaaagttttttttcttaaagctttattttaattcctttgatataaaggacttgctattttgaatttgctctcctgactcttttgttgttaaaatgttctttataatgtaaaaatgttctttataatgacatggattaagtagagatggtagtttttatattttaatgcctttattaaaaaaaatgttgacaactccaattggtttagcctccacttctttcactgttttatagaatacaaaagtcttacaaatgcagttctagtccataattcaaattttattgaaaaataaaccaaagttcacaggcattaggtaatttaatcctacaaagtttcagagacaggccagtggaaaatctggaattatcagagcctttgatcacctactatgtgctttagtccttccaagaatctttgatctccagtagtgaatgctttaatctaaaatggtatatattgaaagctgagttatacaaacctaaaagaaaattttattttcagtctttttgaattatttttttaccaagacaatttatcagggataccagctaaaagctcaaaacatttatctatatgaaattaaagactttctagtatatatttatacatataccccctgattccatgacttgtactttgaacatattttaaatctctcaccttggctgagaattgaaaaatattatgtatgatggcattttgcattgagcttctgctggaaatggatactgataatgcagattatgcttccaccctgctgtcccctagtaatgattagtatccactgtgtttatatcagtttaatcctatgaaggtgaatgagcacaagagaaaatcataggagcatggacatcatccagtcactaggactataacttaactgttaactcagagaagttaaagacataaaatcaatatattatttttcataagatatgttaaatttatgtgtgaagtgtgctatacacaatgctgatagaaccgtggaaaaagaaattgtgaaaatacgggcacaagttgccgggcacggtggctcatacctgtaatcccagcactttgggaggctgaggcaggtggatcatgaggtcagaagttcaagaccagcctggccaagatggtgaaaccccatctctactaaaaatacaaaaattatccaggcgtggaggcaggtgcctgtaa

SEQ ID NO: 1840 - DNA, 4001 bp, Homo sapiens
ttcaatattttcttcacagaattccgactttaaaaaagccctgaatgcagcaagaccatctgaaggggggagaaaagagagcatgcagaatgtgaagaactgagagaccaaatgattccttatgtttctcctatccctcacattttaattatttctaaatgaattttctagatttcgctcaaacctgtaattctcaaaatttagctttttaaagactaagataccagtaggcaaaaggcttatgttggcactctgctgcaaaaatataagtactttgctgtcaatgcaaagtaaatatttataggggagccataaattctctgggaactaagcctcttgaaaacattgtatgcaatggaaaaactgactcaaccttaactataagcaactgccactttaatttgtttaggctgattttcttccccacctggagagaatatatgcatttatttgttaaaccctgggaaataaaggaaagaaaaacaggctttatcctatagtgactgcagtctaatccccctcaggcaagctgctcttttgttaggtggacgcagcctttccaggcttttgcgatgttagcaatggctcaagctcaagagttaacttacatttgctggctagcagctcgtcaaatgcttctgaccacagctgtgcttcctcaggagaaggcctgcaagagaggttctgtatgttagcttacgcacatcagagttccccttttcagttcagcagctaactattgatatttgcaagcacaggattctcaacttacttgatgaaagcttgctgtttgctttttttgccggttttgggcttcccaggagtagaggaattttgtaagaagtagctcaaacgggtcttccaatcttttaaactaaaacaaaaaattaaaaagataattactaactagcaacacttgaatatgctactgcagctgaacgcatttttaccaaataaagtcacccagtaactagagacaaaccgcataaggcaaagcaagaactcttcaaataagtcttatccacctaacatttaaacctcatgtactgagcagtttcgtccattaatctgaccgtatctactagttttacaactaagggcagggctacctataatcactagggtattttaaagaattgttaatgaatttagttcaaaaggcagacactatttctggctcacaaagggcatcagtttgtttgcaaggttaattacaattccgagacgttttgcactttaatgaaaaggacagacatggaactgtctggagccggcccacgcttctctctttagagcaggaggttctggaccacgccagagactgtacaaagaggtgggtgactgattcccctgcgctcttccttccccacctacgacacttcttttaagcagacgctgcataacaattatttgttccacattcggactgggtgagatctgctctataattaaaaaacaaaaatggattttaaacgagtatattcagaaccagcaagagcatcaccttccagtagctgtgtaagctgatgagaactcatcatgcaacgtatgaatgctggggacgcgcttcagccgcaggattctgatgtcattttgaatgcaggaggacaaaaagccaacccgcaatttcttagcgcatcaaccaccgccctcatatcaactgtctccctcggttcttaaactgtacccgagcatcacccagatttaaccttacttaacaaattgaccttttcgattttttttccctgcataggctcaggctagtttcctaacgtcaaaggcgagcccgaaagtaccgcgtttgcagcttgcagtgtggggcagggggtggcgggagagggaagaaagccatactcacagggtccgtttcatcttttctcgcttctcctcgctcttgtggccactgcctgcgctcttgtccatgggtctgcagtcgtgttgaacagccaagaacatagcactttgcattatcgttctcccgctggagccccggctgtttgcggctgggcgtgcgtcgcagcatttatgaggcctcggcttgggggcggggcctcgcggctccggccccgcctcaagaggacgcggattggtcggctgcagactggcacggggatgggtcagcgcccgccggcggcagtcacggctgctgccgaagggtctcgaagccggggcgctgctgacgtctgcggccccggcttcttgcgcactcgggccacatagcagcggccagctggggcaggtgtgggagcagatggagagtcttcagtgtgggccgctgcgcacgaccttttgctgaagcgtggcggccgggcgggctcgagggctttgcgacggagggagggagccgaagttggcggcggcccggcgggggcgccggcgctccctcacccaccctgacgggctccccagcccgaggccagagcggcgattccctggcaggaggaggtcgcccgccacgaggccggagtgcagtggcctgatttcgaatgaagagtgggatttttcttccttttttgagcgcgttccctgaccccgcgcctcatttcttgtttgctgtcctgctgtaggactcattcgacaccccctggtctgtgaactgaggcaatggggagaccctcgcccgtttctctctgccacttaacttaaggaaggagtaacctgaaacgttgattgcccaggggcagggtgggatctgctctgcagcttgctggggcgtcttggaacactttgagaatgaacattagggattgaacaagagaaagtgactttatcagaagacagtgctttaattgggtttgcatttttgatcactactaggcacgtggctgggtctgtctatagggtcattcctcaggagtccttggtcacatctcctgccaaaatagaaatcacagatttccttatggtgggagagaaagctgcagacatagagatttcatagctgtaatgcaccagaatcagtgagttcaaggagtcaggatttcctcatgagtcattcttgttgagttaggatttaccagaacatttaataactggcaaaaagtaggggggagaatgagttaacagtttccttgattaagttttatttgttaattcttcaagtatcatctctactcctgaaggttttaaaacgacttgattggtaaagacaaatagattacctcaaccacaaaatgagttgatttcggataatattaccagaactagccagtgaaatgtttaagcggctttgcaaccaagctgcagatattctctctactttgtattcgacttcttaaaaggaaattggaaataattaatatattcttacggtgagctgccagtagttggagctccaagtttgacttggagggcaaaacctgcagttattatttaagacaacagttgtggactttattgtggaaaggaaaatcgtgtagatttcagtaatagatactttgaaacatgcttgttaactctaggaatgccattttttcttaagcatatgctcttcctctcctatgctttgcataatagtcctacatctattttcactttctgatgactcaatacgtatttatcagctgtctgtaatacgcagacacttgctttttctcaccactgtaaacctcaatatattttatacttagaaccttagatgttagaatttactcatagacagttaaattcgctggcaggccaggagttctgacaaagaggcagcagagagagagagctggacttctgtcaggagacccagttagagcctgggcttatccagtaaatgctaagtaactgttgggacactagcttcacacctctttgagtcccagtttctcatctgtaataagagtaacatgtattttcttgccagcctcataggatattatgtgactcttacatgaaaggtcttttctaagctctaaagtactgtacggaagtttattactgatttgcatatgtgtggcaaaaggaaatgttcaaatcatagctgttcaagatggaaaaaatcgtacgaggat

SEQ ID NO: 1841 - DNA, 4001 bp, Homo sapiens
ctccccaagtgctagaactacaggcatgagccactctacccactcttgaactcttaaaatggattttattctgcccttctttttgtttattgatttacagatagacaccgtgactacataaaattattcccatctttcatttatatctaagtaaaaattaccagctggtttttatggtgacaatgacatggatcagcaatagttcttggaagtgttatttttcaaaaaattgttgaatagaaagggttttttattctttcaataaactttttttcctccaagcttgagcaatgatgagtatgaagattaatcaatatcattttaagtactagaatggctcctgaatgataaaacccatcaataaagacagactaagccaaaattaagaagtaaatgatatctgacctaggaatttctcctttagatacgacattctccctgttcttctgctggaagataaatcttgggcgaggacaacatcgcataaaggcctgaacagagagtttagctcagcgtaaaacttctggcagattttgctgttctgggagggatagagtctagccccaaggagggggaatgttagaggcagtctgatggggtgagatcctgtgatgtccttcaaatcaaaccagaggagattgctttacttctttcccaattgcacagaggcaattagcagaagtaattaatagtgttacttcgagaatgctgtggctgcttgatttattttcaaatcaaatagaaaattatagtgtccccttaacaaattcacaggtgtacttgacatttctaagtttaatgactaggttttttttagataatgcaatattttgacattgtctaaaaataacaggatattgatttcttaaaaaggcaattatacgatgaatatattaatatttactaatattttagactataatacattttagaaagcaggagaaagagttgccagcatttggtgtcataagttttagggcatggtacaaaccactaatatgttatacatatactataatacatgtactagtaaatgccaaaacaaagtaacaaccatttcatcttgagttgtgaatgcacatgttgactaaaaattttatgaaattacaaactaaaattatataaactaattttaaagaacttaatataagttataagttaataagactttacttagagtgacatgaagatgcatttttcaaaattattttaaaaataaaatttgaagaatagtgaaagtactaactgaaatatatctttaaaactgtaaacattgttgaagtagtgcttttatcctatcaagttctactcaagtcatttaaccatatataagtaaagacataaaaatagtaatattatatttaatgtgcttttctatgctgtatgtaacatctttctcacattttctttatttatataattcattactttcaggtatggtaattggccacctgctgtgtgtccttgagaaagatgttattattacttgttctagttgcttttccaaaaggatataagaaaagtatgagatagattttttttttttacatttcttctagctttaaaattctatgggttctataatcctatctcttgtctttttctctcccctcccgtggagtctgatatcctttgttcatcttttttacaaatttgaagcagactagttggcaaagtgtcagttctttgacaatctgtgataatatattattttctgcaaatgttaccaaatgaatagctagtaaaattttttctttttatgattccaaactcgctgagtttgatgaaaagaatctaatagttggcatttttatctctaaatgtcatcagtttaatctttgtaacaagttcatttatataataaaccttaaatctctttatactcacacaaatgcaatgcaggggaaatcactgtccttgctctcttgattccttctttgttgacaggatagatgagaaaatctgtgcttctttcagatgaattgttttccaagtggtaacttttctatattaacatactctctaccatatgtttttcttttctacacaatcttcatataaccacattatttttgaggttaagtttaatatctaaacaccattgaatccattccataatcaagatatttagattgtagttagttttaatttgaagaattttggtggtgtttctattaaatacataataaatgtaacagtaactccgactatctgagtctctttttttaatgacctggtacctatttgtgtcagtgtcctaaaatcttcacattgtgaagtcacatacatgtggtatggaaattattttttcagtcaaaaatatgtaaatctttactttgcaattgtactctgataaagtagctcagtttgagggaaaaaaataaaacaagcctttgtttttcttctgaaggcagtatttgcatggctttcatatggtatacatgtttgcataggaaatttgtctttagtttcgcatctgcccagattatagcctttagtttcaatgattcaaagcttatgtggaagacacttaaaatacttaaaagctacatactattattttatgatttcagctaatcaaggcgcaacttttaatgtatgaacaacatctttatcaagtcaagcagataatgaagggaaattatcaaactatgctctcttttttaaagtaatgggcctaaaattggacagatatacttgaagtggcgaaggaggaaaatattatacaaccacttcatctgtccagattatttgagcctttcctgtatcaatgaaacatcagctgttgcggtgagagcattttaatgcacatcctattttacgatctagatgcattaatgattaatttattgaatatgttttgttttctatgctgtaacactggcatatcaaaaacttcaatagattgtcacattttaactctggacctttgggttttagtgcaaataattaactctttactactcacatagcctcaaatgtgtttaagtattattacagggagaaatatattgctttactaagtagttttacttgatattttactaaactccgttaaatatatgctatgtatgtagtatttgaaatgtgatacatctataaaggaaaatatttagcataattgttagctttacccaaacaattttgaaagttaggttatttattttctttttgtctcagtgtgtatacttaatgtccctcttgtgctacacacaatgactgaagaaatgtaagcttcatgagaagaaacattcacatagaaatcttgatcaatttctcagaattaataaatcaaagggaaatgctgatactgtgtaataaatttggccatatgtaacagactagctttcactaatacagatctgtgccttctaatgatgttacagtcaataatgaaccacatagatgatgatgatcctgtaagattatagtcctttccaatcttactatgccttttctatgtttagatatacaagtacttgcctacagtattcaggacagtagcatggtgtacaggcttacagcctaggagcaataggctatgccacttaggtttgtaagttcattctatgatgttcatacattgaaatcacctaatgacatatttatcagaatgtatcccttttgttaattgatacatgactgtataagtatgccatttcattaagcaaaacaaaacaaaaacaaaatggggcactagatagctcagggaaaaaaatagaaaacaaatcctctatagaataatagctcttacctcttaagttctctgtaatgattttgatttcattttgaaatgcatattgaacgtaatgaattattttaattctgattagaggtaatgacttacttttaagtctgatttatttttaacctatgagtagtggtagtctcatccaagtaaacaaattttatactacttttttaactctcaatttacggtaattgtttagagaaaatgtttagagaaatgacaaatggggatgtgctttggctactttagt

SEQ ID NO: 1842 - DNA, 4001 bp, Homo sapiens
ggtcagaggaacttatttcatagatactctctgccagaccctcctgcttcattttaaagaagccatcgatacttccatactcctgaatgacagaatatttggaaagtaaatgttttaatagtacataaaaaattatgttttctgagattatttccaaaataaaatttgtggtaatttctatttgcagtgcgataagaaagcaggtagtatacctttaggttgactttttacctttgactgcaagattaagtaatgtaatatgcactcattttgtgtttaattttcaactggctaatatatgatctttctctgaatgcatttctttataccttttttgaacaaaccaaaaacaaatgaatagctgtatgtctgtaaggtcttttaaaaaaatcaagggagtatattaacaaaacaatgtctttaagatgagatcttctacaaaactattaactgatttgtaatgatcaatatttctcaaccaaactcatatgagacacttcaagaactagagatggggcagagagataaggaagatctggctttaaaactcatatctcattgtaacatttgcttataagaacatagagagtgaaagttactgcaccaccacacggaaagcatagtgcctttctgatgatggagccaaacctcattctggggtacctttcctgaaacaagttgtagcatacaatcagaaagcccagagccaggcttctatgtactccagggatgctcaaatagcagtagtaatcacagatggagatattacagatcactgtacatagcctcaaacctcatctcgcttcttaattaaaactagctttcttagacctggcttaaagaatagaacagttctcaaaactgaggtcacacaaaacaacacataagggctgaaatttggggagcacatgtcttaagtcacaatatctagctagtcttggaggaaagttagaaagtcgtgctctcctgaccacactgtttctaattgcacagaactaggttagtaagtacaacatgtaaataactgagaaagtctagccaaaagtttaatatggttaatggctgaaagcaatcttacctcctcaagcaagaagccggcagacctgcaagccctttgcacatcttatttaacagcttggaattcgcaagcaggaaagaaatgcggcaggaggagctgtggcttcggctttgagcgtactttgcctcttctccggtaaagatattgtcagaatcctctgagcgtcttcctgctaagcctgtaggggtctcttttatagcccagctacgaccgtccagccaatcagacgaccgctctgcagtaccagctcctctgtctccctctgcctctccagcccctgaaagagatgaggaagaaaagactgacgcatcagcaatgttaagtgaacgagcagagaaaatccttctgaaaagtagggatatgggaaaaaatgtactcaatgtctccaccaatgtcagaggtttagaatttctagaaaaggaaaaaaagtgtacaatgctgcaaaatatagtttttattcatatgcctgtaaaaaaaaaatatcaaggaagttgcttcctggaaggaaaagtaccagcaggaattctggagcttacttaggagctgactcccaatgcctttcctcttttggattagaagcatcatattatacatggtccaagatctgatcctcacgatttccaaaagggagctggcaggatcatcgtctccacgcagtgatttgcggaagttgccttggttgttatgcaaacaagaaggtggagagaaatagctggatgacagacagttataagcccggcagcatacagaaactaccctaggaaaaatagatttgctatatctgtaatcaacctgactgaggaatacttttctagaaatcttggtaacaacagaattcagcctagcactgacagtttctccttcacatgcctgcgtcctgtaaaaagtctaaaccggcagctcgaggaccaaaggagggagtagatgagcaaatatacacagcaattcttatatcaaatgggtttatgtcttatgtaattctaagtctccaaactgatatttcaaaagataaagaaagagagatgtagagagaaagagagagagcaggcagaaaaatatgtagtttgctttgcgtatcaccagccttcaaactgattgtaagaatattaagccctataggtgtttctgaacacctagacaatcagtatcttttacatacaatatcatgaactgaaatgcctgcatggacagaatcattcaggtgtttcacatcttatagccataaaccaaatacctacaccagagttacagaggaaagctataagtggaagaagggaattaattgctagatctgaccaaaacagctttcatttagaaagcagataggttcctgatcataggctacagtgagctatactttatatataagaaacagaggcatcaaatagtttaggtggaagagatgaaaaatagttgggttccagtgagatgcaaaataccaaaaatatagaaagaatggcacaaagcaatgcccatatgtggccctacccaatacgtgcccttgaacatcccacactgcccccactaccaacacgttccatgactagcagagcaaggagacagcagacaaatgtaaagtggtggagggaccataatctacagaagatgcatttaaattataggaaaaagtctctagccgcccataagagggcatttattggattagctactgggcaacttttccttgaattataacatagaacaaatgaatgttgacagccatccttgatggtggtgtggaaggaactgaagtgcaatatgaaactaggaaggccctcagaccaaggaagatggaccagggaaatgaatcagtcagaactgacattaaagaggtcagactaattaaaagggaaagaaggtcactcaaagaaagaccatggccttctttgtttacctgggcacctaaaagagtgatcactcaaatagattgatttcaggaacataagtgagtacccaaaaagatttactgatgcctgaaattccacaataaaagttttatgtcttgcacttagaataagagaagcctgatttgtcatgagttaaatataaatcactgcaatagatgggactttaaagacaaaatgggacttcaaaggcaatctagcctaacactctcatttcaccaaaaaggaaatagagacccagaaagagaaagtgacttgctgaggttacagcttcttactaacagagctgggtccagatacaggtgtctcgatactcagttatgtggattgtccaccatgctatcccatcactcaacagtcttatcaaataaggtaaactgtgtaaatagagatatttctaaactacaaagtgctagtcaaataatttttatcattctattatacacagtatagaacataacccaaaattaattttacacattttattcaaggagtgttcacttgcccaatttgttcttgctccttgaaagcaggagctgctgctttcaagacatattaactaacatgtctctaactttgtgcttagctcattactctgttcaggcatttcatgtttactcacttctttgactattaaatcttgctttcttaggagttttaagacttttaaaaaagtgtttgtaaaacgcttcacatgagttaacttactttttcactgtgggacttgcagattgtgtttgaggaggcgaggactggtacatcatgataccttgacaaccttccaccttctttctctgatatgcacaaagcatcaaattctgttattctatgatttgtcattcctgaatgactctggtagtgtggaagagctttactctcaaaagatctactttttatttgttcatttgtttaagaaatatcttttgaccacctactctgtatcaggtgctgtttgaagcagtacctgatacaagcagataaaatctccgctctagtagagttttcatctcagtagaagg

SEQ ID NO: 1843 - DNA, 4001 bp, Homo sapiens
gttactggagtcaggaattctagatttggtcctaactcacccaccacctatgtgaccttgagaaggcaatggctcctctggagcctcaggcactggtggtaaagatgttggactagatgatttgcaatttattgaggaggaaagggaagagcagttcatcctgctgacatagagtttacctccttagattagctgcttaactctttgaggacagagctctagtattatcttttatctgttttgcaaaatatttaccagagcataactttctcctgacactcttgtatttttgtacggttcatttcatatgcaagttaagtgaagcttgaagtaatttgctccactccattcagaaaattaagcgtgaaggtcagaggaacttatttcatagatactctctgccagaccctcctgcttcattttaaagaagccatcgatacttccatactcctgaatgacagaatatttggaaagtaaatgttttaatagtacataaaaaattatgttttctgagattatttccaaaataaaatttgtggtaatttctatttgcagtgcgataagaaagcaggtagtatacctttaggttgactttttacctttgactgcaagattaagtaatgtaatatgcactcattttgtgtttaattttcaactggctaatatatgatctttctctgaatgcatttctttataccttttttgaacaaaccaaaaacaaatgaatagctgtatgtctgtaaggtcttttaaaaaaatcaagggagtatattaacaaaacaatgtctttaagatgagatcttctacaaaactattaactgatttgtaatgatcaatatttctcaaccaaactcatatgagacacttcaagaactagagatggggcagagagataaggaagatctggctttaaaactcatatctcattgtaacatttgcttataagaacatagagagtgaaagttactgcaccaccacacggaaagcatagtgcctttctgatgatggagccaaacctcattctggggtacctttcctgaaacaagttgtagcatacaatcagaaagcccagagccaggcttctatgtactccagggatgctcaaatagcagtagtaatcacagatggagatattacagatcactgtacatagcctcaaacctcatctcgcttcttaattaaaactagctttcttagacctggcttaaagaatagaacagttctcaaaactgaggtcacacaaaacaacacataagggctgaaatttggggagcacatgtcttaagtcacaatatctagctagtcttggaggaaagttagaaagtcgtgctctcctgaccacactgtttctaattgcacagaactaggttagtaagtacaacatgtaaataactgagaaagtctagccaaaagtttaatatggttaatggctgaaagcaatcttacctcctcaagcaagaagccggcagacctgcaagccctttgcacatcttatttaacagcttggaattcgcaagcaggaaagaaatgcggcaggaggagctgtggcttcggctttgagcgtactttgcctcttctccggtaaagatattgtcagaatcctctgagcgtcttcctgctaagcctgtaggggtctcttttatagcccagctacgaccgtccagccaatcagacgaccgctctgcagtaccagctcctctgtctccctctgcctctccagcccctgaaagagatgaggaagaaaagactgacgcatcagcaatgttaagtgaacgagcagagaaaatccttctgaaaagtagggatatgggaaaaaatgtactcaatgtctccaccaatgtcagaggtttagaatttctagaaaaggaaaaaaagtgtacaatgctgcaaaatatagtttttattcatatgcctgtaaaaaaaaaatatcaaggaagttgcttcctggaaggaaaagtaccagcaggaattctggagcttacttaggagctgactcccaatgcctttcctcttttggattagaagcatcatattatacatggtccaagatctgatcctcacgatttccaaaagggagctggcaggatcatcgtctccacgcagtgatttgcggaagttgccttggttgttatgcaaacaagaaggtggagagaaatagctggatgacagacagttataagcccggcagcatacagaaactaccctaggaaaaatagatttgctatatctgtaatcaacctgactgaggaatacttttctagaaatcttggtaacaacagaattcagcctagcactgacagtttctccttcacatgcctgcgtcctgtaaaaagtctaaaccggcagctcgaggaccaaaggagggagtagatgagcaaatatacacagcaattcttatatcaaatgggtttatgtcttatgtaattctaagtctccaaactgatatttcaaaagataaagaaagagagatgtagagagaaagagagagagcaggcagaaaaatatgtagtttgctttgcgtatcaccagccttcaaactgattgtaagaatattaagccctataggtgtttctgaacacctagacaatcagtatcttttacatacaatatcatgaactgaaatgcctgcatggacagaatcattcaggtgtttcacatcttatagccataaaccaaatacctacaccagagttacagaggaaagctataagtggaagaagggaattaattgctagatctgaccaaaacagctttcatttagaaagcagataggttcctgatcataggctacagtgagctatactttatatataagaaacagaggcatcaaatagtttaggtggaagagatgaaaaatagttgggttccagtgagatgcaaaataccaaaaatatagaaagaatggcacaaagcaatgcccatatgtggccctacccaatacgtgcccttgaacatcccacactgcccccactaccaacacgttccatgactagcagagcaaggagacagcagacaaatgtaaagtggtggagggaccataatctacagaagatgcatttaaattataggaaaaagtctctagccgcccataagagggcatttattggattagctactgggcaacttttccttgaattataacatagaacaaatgaatgttgacagccatccttgatggtggtgtggaaggaactgaagtgcaatatgaaactaggaaggccctcagaccaaggaagatggaccagggaaatgaatcagtcagaactgacattaaagaggtcagactaattaaaagggaaagaaggtcactcaaagaaagaccatggccttctttgtttacctgggcacctaaaagagtgatcactcaaatagattgatttcaggaacataagtgagtacccaaaaagatttactgatgcctgaaattccacaataaaagttttatgtcttgcacttagaataagagaagcctgatttgtcatgagttaaatataaatcactgcaatagatgggactttaaagacaaaatgggacttcaaaggcaatctagcctaacactctcatttcaccaaaaaggaaatagagacccagaaagagaaagtgacttgctgaggttacagcttcttactaacagagctgggtccagatacaggtgtctcgatactcagttatgtggattgtccaccatgctatcccatcactcaacagtcttatcaaataaggtaaactgtgtaaatagagatatttctaaactacaaagtgctagtcaaataatttttatcattctattatacacagtatagaacataacccaaaattaattttacacattttattcaaggagtgttcacttgcccaatttgttcttgctccttgaaagcaggagctgctgctttcaagacatattaactaacatgtctctaactttgtgcttagctcattactctgttcaggcatttcatgtttactcacttctttgactattaaatcttgctttctta

SEQ ID NO: 1844 - DNA, 4001 bp, Homo sapiens
tcctcgcaagattactttccctcctctgcttccctgactgatgactgttcaggggatgcaacatcctttttgattataacaagatacaatcctgaatgttagggtgattccaaggtgataatgtaaatatatcatgaagtccaaatagaaacgaattcatatttctatgtgctggatccacctgagatcctagagttattaatcaatgcagggggtaagtgtgcttagcaagtattcttataataaaaccataaaaataaaaaacaaaatgacttcagaagttactggagtcaggaattctagatttggtcctaactcacccaccacctatgtgaccttgagaaggcaatggctcctctggagcctcaggcactggtggtaaagatgttggactagatgatttgcaatttattgaggaggaaagggaagagcagttcatcctgctgacatagagtttacctccttagattagctgcttaactctttgaggacagagctctagtattatcttttatctgttttgcaaaatatttaccagagcataactttctcctgacactcttgtatttttgtacggttcatttcatatgcaagttaagtgaagcttgaagtaatttgctccactccattcagaaaattaagcgtgaaggtcagaggaacttatttcatagatactctctgccagaccctcctgcttcattttaaagaagccatcgatacttccatactcctgaatgacagaatatttggaaagtaaatgttttaatagtacataaaaaattatgttttctgagattatttccaaaataaaatttgtggtaatttctatttgcagtgcgataagaaagcaggtagtatacctttaggttgactttttacctttgactgcaagattaagtaatgtaatatgcactcattttgtgtttaattttcaactggctaatatatgatctttctctgaatgcatttctttataccttttttgaacaaaccaaaaacaaatgaatagctgtatgtctgtaaggtcttttaaaaaaatcaagggagtatattaacaaaacaatgtctttaagatgagatcttctacaaaactattaactgatttgtaatgatcaatatttctcaaccaaactcatatgagacacttcaagaactagagatggggcagagagataaggaagatctggctttaaaactcatatctcattgtaacatttgcttataagaacatagagagtgaaagttactgcaccaccacacggaaagcatagtgcctttctgatgatggagccaaacctcattctggggtacctttcctgaaacaagttgtagcatacaatcagaaagcccagagccaggcttctatgtactccagggatgctcaaatagcagtagtaatcacagatggagatattacagatcactgtacatagcctcaaacctcatctcgcttcttaattaaaactagctttcttagacctggcttaaagaatagaacagttctcaaaactgaggtcacacaaaacaacacataagggctgaaatttggggagcacatgtcttaagtcacaatatctagctagtcttggaggaaagttagaaagtcgtgctctcctgaccacactgtttctaattgcacagaactaggttagtaagtacaacatgtaaataactgagaaagtctagccaaaagtttaatatggttaatggctgaaagcaatcttacctcctcaagcaagaagccggcagacctgcaagccctttgcacatcttatttaacagcttggaattcgcaagcaggaaagaaatgcggcaggaggagctgtggcttcggctttgagcgtactttgcctcttctccggtaaagatattgtcagaatcctctgagcgtcttcctgctaagcctgtaggggtctcttttatagcccagctacgaccgtccagccaatcagacgaccgctctgcagtaccagctcctctgtctccctctgcctctccagcccctgaaagagatgaggaagaaaagactgacgcatcagcaatgttaagtgaacgagcagagaaaatccttctgaaaagtagggatatgggaaaaaatgtactcaatgtctccaccaatgtcagaggtttagaatttctagaaaaggaaaaaaagtgtacaatgctgcaaaatatagtttttattcatatgcctgtaaaaaaaaaatatcaaggaagttgcttcctggaaggaaaagtaccagcaggaattctggagcttacttaggagctgactcccaatgcctttcctcttttggattagaagcatcatattatacatggtccaagatctgatcctcacgatttccaaaagggagctggcaggatcatcgtctccacgcagtgatttgcggaagttgccttggttgttatgcaaacaagaaggtggagagaaatagctggatgacagacagttataagcccggcagcatacagaaactaccctaggaaaaatagatttgctatatctgtaatcaacctgactgaggaatacttttctagaaatcttggtaacaacagaattcagcctagcactgacagtttctccttcacatgcctgcgtcctgtaaaaagtctaaaccggcagctcgaggaccaaaggagggagtagatgagcaaatatacacagcaattcttatatcaaatgggtttatgtcttatgtaattctaagtctccaaactgatatttcaaaagataaagaaagagagatgtagagagaaagagagagagcaggcagaaaaatatgtagtttgctttgcgtatcaccagccttcaaactgattgtaagaatattaagccctataggtgtttctgaacacctagacaatcagtatcttttacatacaatatcatgaactgaaatgcctgcatggacagaatcattcaggtgtttcacatcttatagccataaaccaaatacctacaccagagttacagaggaaagctataagtggaagaagggaattaattgctagatctgaccaaaacagctttcatttagaaagcagataggttcctgatcataggctacagtgagctatactttatatataagaaacagaggcatcaaatagtttaggtggaagagatgaaaaatagttgggttccagtgagatgcaaaataccaaaaatatagaaagaatggcacaaagcaatgcccatatgtggccctacccaatacgtgcccttgaacatcccacactgcccccactaccaacacgttccatgactagcagagcaaggagacagcagacaaatgtaaagtggtggagggaccataatctacagaagatgcatttaaattataggaaaaagtctctagccgcccataagagggcatttattggattagctactgggcaacttttccttgaattataacatagaacaaatgaatgttgacagccatccttgatggtggtgtggaaggaactgaagtgcaatatgaaactaggaaggccctcagaccaaggaagatggaccagggaaatgaatcagtcagaactgacattaaagaggtcagactaattaaaagggaaagaaggtcactcaaagaaagaccatggccttctttgtttacctgggcacctaaaagagtgatcactcaaatagattgatttcaggaacataagtgagtacccaaaaagatttactgatgcctgaaattccacaataaaagttttatgtcttgcacttagaataagagaagcctgatttgtcatgagttaaatataaatcactgcaatagatgggactttaaagacaaaatgggacttcaaaggcaatctagcctaacactctcatttcaccaaaaaggaaatagagacccagaaagagaaagtgacttgctgaggttacagcttcttactaacagagctgggtccagatacaggtgtctcgatactcagttatgtggattgtccaccatgctatcccatcactcaacagtcttatcaaataa

SEQ ID NO: 1845 - DNA, 4001 bp, Homo sapiens
tggctaatgggtagaaggaatagatagaaagttgggtagagggaataggttctagtgtttgatagcacattagggtgatatagttatcaatagtttattgtatattttaagatagctagaagaggagatttggaatgttctcaacacgtagaaataataaatgtttgagatatgtatatagcaattgccctgatttgattgttatcacattgtatgcatgtatcaaaatatcacacatactccataaatacgtacaatttttatgtatccataaaaaacctacctctttggttgcctggactgagatgaattcattatagatctttttggccttgggacttagtttagatggtgatttgattttcttgtactcttcacagctgatccagaagtcaatattctcctcactatattcagacttcaagaaagctttgaaagctgccagcccacctatgatacaggagaaaggaccacagttgtcatcacactggttggcctcttggatatgctatttcacataaagctgaggtacttgggggataaagcatggattcaagcaatccctttttcccctgcttttttcaagtcacctggagtcaggtaaccctaatctgtgtttgatatccagtggttcccagttctacctaatgattcttactcaagttggaagcctctttcaaggaagtattttgcttctgaaatgcctatgcagctatcaattaccaaggtcaatttgggaaagagaaactgagattgattttgcaagaaggtattgatatttatcattttttttctctcttccgtttttccttgtgatgagagagatggttttccacatggttcctgcataaacttttcattgtatatcacaaagctctagggcatattaaaattttaaacagactgaatttaagacctaaagagtctcctgagtctgaacatcagaaagaagccaggccttgctgcagtttctattagaccagcataatataacttgtcttatccagagtacctcatcccaggttgctgtcagacttacattcatgactaatcaggttttccagtgattcagcccatttcttgacttcctcttggctcactctagaaaaaatagagagaaacagaataattggaatgccatggtaaaaaaattggggcaagaaatctaagatcctgaatgaaggcaaagattttattttccatcgttatgacaaaatatgttattgatgagggcagtttttcactaaatgtatagaaatttcaaatgtagttatgatctccatgaaaatggaggctatcttgatccaaatctggcttaactaggagcacaagttccttctcacagaacatccccatcatcagatagttaatactaagtacatcttcaccaaggccttttctcttacctctggcaaataaccactttgtccttcttgttgtgggaagaattgtgttcacaggaatcagatttttgcagcaggaaacctagccgatgtttcatatcttttgcactgcacagaagagaaaaaaatgaataaatagtaataaccagctttctttaaaagatacctaatggtagagcttgaagagtccattactagtctatggctcagagacagtttagggaacgggagttggagttggcatgacctctgaggaaaacaagattcctcttggttccctatgacttgctacaaaaccttgaggcagtcataacaccatttccttcatccacaactggaattctgacccttcagtttacctcagaaacctgagaagcctttatatgcccgtcattttgaccaaccgaatatctttggtatcttcaacagaacctgaatcactgaacacatgagtgatctctgagtaatttttaggaatcagaaagcagtagcggcaaaagatgcacatccttgctgcacgccaccttctggcaggtgattgctatttccatctgttcccctgctggcagagggaactgtagaagcacctcgggaaagtaaaagtctattcagttccagccatgtatgttggggggggggggggggggcaagcagttcctgctgtgaggtatagagggagaatacactgaggtgcacagttccagcagagggaaatggagcatgggatggcgaaaacaaatgcccaagctgaaacctcagcttcttggggcttctttctagacaatatctgctgctgctgctttccttcttaatagctactttaaaggacatacacactctaaagggcatttgaggcttaacagctattaggagaagcaggctagagtcatcactgagcttccagtttattgccaccatttaataggtagccagggcacattagagctcctgactaactagaaaaagggggtcttttaataagccttaagctcaactctcttactttttattaaatatcctcttgcttgcatctctttttattaaaaaagtcaagaaatagtttaaaaagagaaataccattttaaaagaaatgaataactaaatgtgtctatttggagtagggaaaataaagcctcaaagatataaagacatttaggatggccactaatacatttatgtatgtaggttttcccagaaagtttgaattccattatgttctctgactgtcccttaaatagtattttctcttcctcgcaagattactttccctcctctgcttccctgactgatgactgttcaggggatgcaacatcctttttgattataacaagatacaatcctgaatgttagggtgattccaaggtgataatgtaaatatatcatgaagtccaaatagaaacgaattcatatttctatgtgctggatccacctgagatcctagagttattaatcaatgcagggggtaagtgtgcttagcaagtattcttataataaaaccataaaaataaaaaacaaaatgacttcagaagttactggagtcaggaattctagatttggtcctaactcacccaccacctatgtgaccttgagaaggcaatggctcctctggagcctcaggcactggtggtaaagatgttggactagatgatttgcaatttattgaggaggaaagggaagagcagttcatcctgctgacatagagtttacctccttagattagctgcttaactctttgaggacagagctctagtattatcttttatctgttttgcaaaatatttaccagagcataactttctcctgacactcttgtatttttgtacggttcatttcatatgcaagttaagtgaagcttgaagtaatttgctccactccattcagaaaattaagcgtgaaggtcagaggaacttatttcatagatactctctgccagaccctcctgcttcattttaaagaagccatcgatacttccatactcctgaatgacagaatatttggaaagtaaatgttttaatagtacataaaaaattatgttttctgagattatttccaaaataaaatttgtggtaatttctatttgcagtgcgataagaaagcaggtagtatacctttaggttgactttttacctttgactgcaagattaagtaatgtaatatgcactcattttgtgtttaattttcaactggctaatatatgatctttctctgaatgcatttctttataccttttttgaacaaaccaaaaacaaatgaatagctgtatgtctgtaaggtcttttaaaaaaatcaagggagtatattaacaaaacaatgtctttaagatgagatcttctacaaaactattaactgatttgtaatgatcaatatttctcaaccaaactcatatgagacacttcaagaactagagatggggcagagagataaggaagatctggctttaaaactcatatctcattgtaacatttgcttataagaacatagagagtgaaagttactgcaccaccacacggaaagcatagtgcctttctgatgatggagccaaacctcattctggggtacctttcctgaaacaagttgtagcatacaatcagaaagccc

SEQ ID NO: 1846 - DNA, 4001 bp, Homo sapiens
agtatgctaaaagcatccattaaagtcaagttgcaattctcatagttgcaaaaatggcaaaggaaataattatacattgtcccatattcaagttttctgtgcgtttctggaaaggcacagaaaactttccctatttcttaggctttctatatactaggtaagaggaaagaacaggctaatagcaataaatagtatccacctttaaaacctatcctcttccccagggttggtacaatagacaatattgatcccttatttacaatctaacttctacaacttaacagctacaagtttcttttatgtaaatttaaaaaacaataataatattctatgcttttatttaattatcaatatgtaagtatgcacaaggtcattaggtaaactatatttcttactatggatcataataaaaaaaagtttggaagccataattcagagagtaagtctccctggaggtttcatattcagttactagatagtattgttgggagaaaaaattatatgctacaatgttatctccttaaaaattatttttaggttatttctagagtggaaggcatcaaaaagaagacctgaacttgtaagagacagaagtcatagatggccctttaaacaataaaatcttccgagacaaacactgctaatgcctttagggctgaacatctgtgcaaggatcttctttatttactttaaataacgagggatcaaacccaatttaatcaaatccattctcaataaaaggagaaacatccctacttctctccatcagagaggatggttgggttaagttttctaacaagtaagatatttgttcttctatttgcttagcctagatacctaggattctctccagaatattgtccagcctacggacaaccagggagcctcaaagattttgatgcatttgtctgaaaaagaatgctagctaataaataacccctgtgtcccaagggctttttctctgtctagccatccagttacttctatctaatgaggtcagagaacaaagaacaatgggaaatttcctcttcctcactgcaaacttgcctccctctcccagtccctgtacattaataaaaattaacatttatacagtctactaggtgccagacatggttctgagtgcttcatatatattaattcattcagtcctcataaccagcctgtgaggtagagaactctcggtatctccattttacagataaggaaactgagctacatagaggttaaataaattgcccaaatagtacttacacaaatagtaagtagtagagccagggttctaatctagacagtttaatgttggaatctatatccttaaccatacagtttttactctaaataaggacttatagaataggcatctccttgaaggaaatgatgttctggatattaaatgatgtatgaaatactctatattgtattaatctcctagcttggatctttcaaaatctctatattgtttacagagaagagataatacccaatctacagtcaagcacctgtttcacctcagcttagccataaactacaatacctctgttaccactgggcagcctcccttgagtaaagattctccatatctgcatctcttaaacaaaaataacttggttctcacctttccaggcatgagtggggcaaagctgcaagtcctttgcacattttggcaggtggcttagctcctccgctttaagtacaacttcttaacagcagagccagtctttgaaaacttcaaaactgtctgggatgcctttcctcctgaggtatatatagaagctctttcccagccctctgttgctcttccagccaatccagagccttagaggaaactgcaggctggagagcagcagcagtgggccctgaggtggaggagggaatcctttctctgctacaggcactactgtggcataaggctttcatctgctcttatcacaacactctcttgctaaccggccagggcagggttaggccctaaactgtgcacaggtcattggttgtttgaactcctaatctcaggccaatcacaaggaagatgtgagcttcctgtgaagcaaagtgtcttggaccacttcagatcggtcaaagtcatagattcttaggactgtaagggctcctggagatcgtttagcccactttgtttcacagtgaaggaaactgaaatctagggaattcaaggaatgtgtatgtgaatacttaccaagtgccaggcactcagctggatgctaggaattcagagaagaaagagaaagctccctgccctcaagaccccaaaacacattataagtaagtgatggaggccgggctgggatgttgtgagccttcaggaagcaccaggcaaggttttctggagctgagagacaagattactgtttatataaatcaaaacaaatatgaataattactatatattctttatgaatccatatgtctgtgaaggtactaaaaaagtgatctaggagaccaaacaccaaaatcttagtagggattgagtataatgatattatctctgaactctgttaattctgtcagtggtcttctgattatactttgcttggatgactaatgctttgtaattctttgtacctccccaccatagccatccttgcctaggcttgtctttccttctccttcaaacttttcctgcttcctatcactcaaggaatatttaccaaaatttacctgaattgtgtcttatcttgtcggggcccaaggtgctgataagttaatctgtaaataaatgcctaaaaggtaggcatgagtccaagctttaaaaaaagtggcactgaataatccgtaagaaaagctctgaatttggaattgaacagtactctcataattttctctgttatctgaaattagttgttttaaatgactccctctttatataccctttttaggcaatggttgatcaacccctgttactggcttgtaaagtcaatgcagtgcattatgacctgatgtttttaatgtaataaatagaatagacaaatatccaagtgcatcggatgtaaaaagtattgttttctgaaattttgactttaattatcaatatgtaagtgtgcacagggtcatcaggtaaactatatttcttactatggatcataatcaaaaaagtttgaaagctgtggctctaaaccacacacacacacacacacacacacacacacacacagacacacacgtttttgagacagagtctagctctgttacccagaccagagactggagtgaagtggcatgattatagctcactgcatcatcaaactcctgggcacaagcgatcctcccaccttagcctcctaagtaactgggactaaagactcttgctaccatgcctagctagtttttaaattttttgaatacacagggtctagttttggtgtccaggctggtcttgaactctttgcttcaagcaatcctcctgcctcagccttccaaacactaagcacaatgtcaggcacatagacatctgtaaatactgaatgagttaaacaaactgtccaagttccgccatctattgactgagtaaacatcagcaaatcaattaattatcatttttgagacatgtggacactgttgttgactattaaatctaataaagggaatataaaacaagtagaagagactccttgggacaagagtctaaatcattatttgataccaaggggccttgaggagataataatatgaaaagaaaaaccccaagtttaacgtagagcaatggagggtgatgtcttggcgagggctaaaaatcaaagcatgtttctgactgtcccaaaggagttcatgtgatggactattcaagaataaaaattatctcaatttactaaaagatggactagaacccaaaatgtaaaattcaatagaaataatgttaaatccaacacttatttgtttttaaaactttgtaaggatgggatagccagaaagtatgtaaaagagtgtgctctagaggcagaaagtaaaatagtgattgctagaggttagaaatgggagaaatg

SEQ ID NO: 1847 - DNA, 4001 bp, Homo sapiens
tgctacaatcagaaagaatactaaagttttctgcaatagtctgtgtttttatgggtgataacaaaactcttagactaatgtctaggttgagaattctgatgttccaccttctaccttacactgaccagtatcaggcaactaaaagttttaaaaagtcagatttaaccttctaattaaggtaatttgaataaacactcattttttaaataaataatttacttctaatataactcaatttatcacatcaatagtaatattaacccccaaataaacaatatttattgttgatataacaaaatggttgtcttgctcttttcttcctttgcctcatttttctctttctccatggtccattctaatcttggctttcacataaatcgcttggttttttttctagattctcaacgacaatttagacatttgttgagcacttgccacttgcaaggtattttcctagggaccatgtataaataataatagtcaaaataacagctaatacttttcaagtactcacaattttgccaggcacttaattaagcactctacaggaactaattcacttaatcttcatgataccgtataaagcagatagaactgtcaccctattttaaagatgcagaaacgagctcagttaggttaaatagctcgcctaagtccacctaggtagtaaatggtgtgatcagggatttcaatccaactccctttgaccgtagagatgtgctctcagtcactacgctatggttcccttccctgcctctaaggacatataatttggtggaaattatgcatgtatcagtaatcaatttgatttggcaagtgtcaatgagacaggtctcttttttctgctttcctcactgactctaatatttttttaaaatctattttcttaatgtccttttgggtcttactagattccgactttgagacttacatcagtaaatagacattgaaaggaaagacaaaagccctgaactaatgatatgaaatgtatttttatttagaattggtatagacttcactatcaataggtttagttcttcaggacaggacaaagcagcggaatttgtgtctacattcaatacaacctttctagcacttttttcacataattcagttcaggttccccatccaacacacgactgtcaccagatgatgctctactctgtgaccagatacaagtcctattacgtcttctcctgtcccaaacctcaataaaacttaatggctttctcccctgacaaccaggcctgccatggcttcctaacttgtgttaaatgcagtgtttccactcttgccaaaacaaacaaacaaaataccatgtaaaaaaatacagatttcagggccccttatctgaagaatgcaactcactcaggaatgtgcaaatttggggaacagttcagaggtgaaaagcactgatcgaagagggagaagctaaaatcaggagacctggtttctactttacagtcccacttactgtataacttctaacaaatcacttctctctgagtccagttttcatatcggtgaaagcgagaggatttgaccagatgaactgttatgttccttccacctcttgaagtcgtgcttatgagcacagagtcagaggatgtgtgttcatatcccagctatgctacttgtgaactactgtgcgcagagaactgcattctctgattcagagccctcacctgaggggatgatagtatctctccactatcccttttctcccctttaatgaagtctaaatgagatgatgcttataagcatctaacaaaacccggcacataatcaatgttcaacaagttattattactctggaattctataaattacctctgtacttcctcccttgtcaccctgaacttagtgaagtttccttcacttggttttgctcttcaactcggaccccgaaaacgctctaaacgctggcggaagtcacgcagagatgggctagacgctcaaccccggtctcttccccgaaaccgcggtgctcccacttcctgcagtccgaggttccgactcgacgccagctccgcgagcaatggttccgccctgcgccctgccccttccatgacaactccagtcccacctgcctggcgtctcttgagcccaaccggcatccgtcgcggttggacgtgggcttggcggaatggggcgggacttccagtaggaggcggcaagtttgaaaagtgatgacggttgacgtttgctgatttttgactttgcttgtagctgctccccgaactcgccgtcttcctgtcggcggccggcactgtaggtgagcgcgagaggacggaggaaggaagcctgcagacagacgccttctccatcccaaggcgcgggcaggtgccgggacgctgggcctggcggtgttttcgtcgtgctcagcggtgggaggaggcggaagaaaccagagcctgggaggtgaggggcgggcccgtcgttactttttatttgatgttagtcccagaaacaaccagagctcagttcctactaaactaacgggtgttttctggtgcagcatagaccgaagaagacgagcttgagctgaaattgttcaagttaggcatacatttatgtgtgatttttggaaaggcggtggtaatgtggtttatttggctgcagatgcttgtcagctttttacacatctccgttgccaaacgtttcttaaccaaatccaaaaccatgaatgaaaaggtaaaaatatcacacctaatccaaaattcaaaggaaaagagcagcgcatatatagcactacgcatgcataacgccatcattgttccttttaaaagttcaaggaacgttttacttaattcattgaagttgggagccatttctgtttatttttgtttaatctctgcctcgtggaactgtgatgtccacaaatagtttattttaacaaaacgaagtgtgtaaaatttaacagagtacttttagtacctactcactctgctcagcatcgtggtgctgcaaataaatgagaaaccagatgagtaattataggttaatctttgctactcgttagacagagtattactgcatatatattaagtcatttatatactttatcccacctaggagctcaaactatgtagttggaaagtgtcttcatctctcgttaatgaataaattgtaactgaaattgtacttcgaaagaatgatagaatttggatattggaggaggttccaaaaggaaatactggaagtttgggaaagttaggagactaacttggagcagaaatttcattcaattattaaagggtttagaagcctagcagaaaaatttgaatttgatgtggtgggtaaggtgagtaattgaagtattttcatacaaatattatatgatgcgttaagtgtttttataaggattaatctgatagcagagtgccaaacattagagaagagaggaacaagtgataataattatgaagatactttacacctacgctttctattgcaatactctctaattcagatgcagcttttttggaaaagtgactttttctgaagtctttctttggtccagtccttttatgaacagtttttaaggctgtgacttagatgaaaatgtagaatgcatatttatgctgaagggaacatctaatatgtgatgcatcagaatctggattccaaaagatcccagctctgtggcctggcaaggtggcttatgcttgtatcccagcactttgggaggttgaggtgggaggatcacttgagcccagaagttcaagaccagactgggcaacatagtgagaccctatctccacacacacacaaattaacagggcgtggtagtgtgtgcctgctgtcgtcctggctacttgagaggctgaggcaggaggatagcttgagcctgggaggtcgaggctgcagtgagctgtgattgtgccacactgcactccagcctggatgacaaactgagaccctgcctcaaagaaaaaaaaatagacaaaacgtcctagctctaaaaggaaagcttgcaatcatgaaatttaatagtagaa

SEQ ID NO: 1848 - DNA, 4001 bp, Homo sapiens
aaattagtaaaccacatacatttacacagacacagtctctcttgccacaaaattgcaaagtggtctacttttatttctaaaatgtgatatgcttatatcattattataacctaaatgtttaaagggggtataagaaaaagcttctaaaattattacggatgctactaaatcatgtgtataacaaccaaaatatctggaatgcccaaacgtgctgtcattgctcaggacagaataatctattcaaaaccagcagggaacacgtgaggaggcctcatttacttcagtgtgtttccccacatatgcatcatttgagaatgtcagatcactttcacgtatatagtacataatcactgatgatctgggaaatccacaaggccacaaagttgatacatactctgatctagagggggaaaaaaatcgagaaagccggaagtttcccgttttccaagaaactgaagacattcttacctttctgtacaccagcatgttgggtgattcatcggccaccccgttgctggtctgcccataattattcccctgggccatgtcacccaaaacttggtccactctcaagatacaagaattatcagtgtgccctgcaaagggtcagagagacttcagtgagatcccagtgggactcccctgattcatcatcatcattcacagcacccaccccacatggcgcgttcttacaaactggggctggctggagaaagtgacacaggacatggattttttaaaaagtgagttgacacctacaataacctcaaggaattgtaagaaattacaatcttccaggtagaaatagccatttggttattgttttagctgacttcattttctggatactcattttgagaagtgtttgatgctcaccctaaaaactcgtgggtagcattttcctagtacagagttctcttctctcccaatacttgcatctgaacttggtgatgttttccccaaagggtggaaaggcaacacctgggggatgcggtgggggagtggggggcgggttagcacactttctcctaggtatctgtctagtgtccccacctgcagcccatcagagaggcccattcccggtgtcattctccagcgcacgggcttcctctctattcccccgggtctcccacacagagccggagtatatgcttcgcctactttcacctgcctgcgctgccagccaccggctgctctcctttctccccacttcgcttcggaagtccggaggtaatcctgcctaatttttgcaagaagacaccagaatatgtcccggcaacaagaactagtgggaggtcaagccttcaggccattttacccgggtcaccgtgggtaaaagcctaactgcagaagcctccagagcaaccagccaaagaggagaaaacaggcaagcccctgctccccttgctcgctctcacggcagcagcaaatggcaggcgagcctgtgccccgcgccgcggcggccgccggagccgggcagcagtttcagcaccgtggaccgcggggtgcgcgcggcgcccgtagcccagccccggcgcggggctcccgggggcggccgccctgcgcccgcggacgctcccgctgcgcagagcgagggctgggtgcgggccgggggccgggagggctctgggtggcgctgcctcctccccgcccgccttccctatttacctcctccgccaaggtcacggccccgcggcgtctcccctcccgggcgggctgggtgcaggcggtgtcagctggcggcaagcggagcagcgaggcagggtagcttcatcacactcgcggcggatgcggattccgcgccgccccggctctagctgctcaggcgaccgccaccctcgcctcgccgccgcccgtgcacaggcggctccggcagccgccactcgcgcccgctcccctgggccgcctcgctggctctctccctcctccgcttcttctcccggggactgggaccagccgagcgcgcgcgggagtcgagacgcccggcccgtgcgcgcgactgggaggagggaggaggggacagtcacgtgggacaggggcgtccgaaggtgccggctcggatgggctcggctcggccgccgccacaccgcccgggcctcccgggcctccccggcctcccgccctcgcgcccctcgggaggctgtagtcctgcccccggcgcggccagcccgcgctcccgcacaccccgcccgctcgcccgcgcgtgtgtacgtgcgccggaggcctggagagaccggagtttaacgcccagtgtaagccggaaagggaggaaggctgtgcgatgggtgggtgggtggtaggtgggtgggtggtctagtgaatggatggacagatggacggacggatgcacggatgaatggatggatggagccccgtgcaaaccaaggtttcatcacgtgcctaacgactccgctgaaagtcccagggaagcagatgatttattattattattattattattattattattattattattattattattatgcttaaataacagagtagagagatattgagacaccctaggaatgaaggaaatggccaggaccaaatgaatcattcatccccgtttgcctgcggttttcacagcttcttcctaagttggagaaatgggaaacgatttgaaagctgccaaccggaggtgaaaatcttgccacttgtgaaactgaaggaacatccccaaggcctggcttctccttttaacagaaggtgctcagaggaactttcctcttgcccactgccctcatcctctagcaattttcaaagagcttctgaggtgctgatcctcctagctatagtcttcgtactgctgccacaaattcttctgtaaggattagaatgacataaaggagacagatcacttttgtctcggtggtagtaaagcaacctgtgcctctggctttcagggggaagggctgggccgctgtaaatctagttttccttcctctcctgggccagctgtggaggagagggagggagagaaggagaagataatcaagatcagctgtaaatctagttttccttcctctactgggccaggtgtggaggagagggagggacagaaggagaagataatcaaggtcagcctttcctgaccccttggtctaagcagactagaccttattggagataacacttctactcaaacaggggtccatgtggaccaatgtattaccccagccccatgcaggtcttgtcaggtttctctcaaggaacaaatatttatctaacctagcccctgttccaagtactacaggagaaatatcattgtcccaaactacacacactctagtctgacctgtctcccactccaactccccacatctttccactgtagcctctggaacttagaatcttcttcagcaaaattctcttcgttttcgacttctcgaaatatttctttaacgtttttgctctcgctgaaatctacttatccctcctttaacccctctctcttccctcttgttcagtctgctcctgagaagttgatgtgacttgcatgacttggattaataaatttgcaaatacaactgggtatgctcactcagtttgaccattttcctcttaagagagaaccgcctgaaggaagcagtcttcctcctcctttgcatctctgggtaaagtttccatcctcataggaagctgtacccaagctctatatatagagagcctatatatatatatagctctatttatcatatatataattggctctatttaatttatatatataaattatacacacacataaacatacatatatataatatctcttgacaccctttccacttattgccaccctattttccttcttccctttatgccaaaatctttccattccatgttgaacctgttccactttggcaaatgacctccatggtgctaagctgatggtcaattctcaattgtcatatgaattgacttttcagcataaattaacccggacaccactctctattatttctctttctgcattactggctgctttttctcactct

SEQ ID NO: 1849 - DNA, 4001 bp, Homo sapiens
tttggggcacctaggcctcttgctgtgggatatggccccaggggaaggggaaactcatgcagggacctttattatcctagagccaagtggaaccagagacgactacccacctacattgcaggcaaggtcatttggggcaggggatcacccacccttctgtccccgccttgtctctcttcccattccactgccagcccacactggcttgcccatgctgttcagttgcctgtctctctccttcaaatccagcgctgcccaaattgctgctcagaccctccactacccatttgatgctctcaaccacagatgccaataaataagaatcagcaggacactctgacccagctgccttacccatcccagcacctcagggcttttatcccatttggccctggacttctgagagttaggagttacccaaagcccaggaagttcaaagatctgattgcccccacagtgcatgtgccctcataggtgggcatcaagtcacaggtgtgtctggggcagacaggatgagacataatgggaagacaggatactcaaagaaaaaatgaaagttaaaagcaaagaacaaagatttacaaagagggggagagaaactagagcctccgagggaagaaagcaatcaatatgcatgaagaggcaagttaattaaatatggataatgcaatcggtgcacacagacaccccggagaagaaagagaaaagcaaaggcaatactcactgtctttggccagtcctcatggcctgagggtctttgccaactggatggtcagagaggcttcgggttaaggtgttctggggaaaaagtagatctttcttttagcagtcaaatcctcggcgagtgaagggcatgtgtgcatgaacacataggggcacacacacacatatacacacacaggcatgcacaacacacctcccaccacttgagccaggcagcaagcggccccactgaaagctcttctctctgcttgtcacatccagtaaatactgaagcagcctacacccagcgggcggcggctcagctcccgggcacagtctgcacgcccatcctcattggcaggatgcagaaggtgcccctgagctgagctcagcctcactaacctgaagctcctctggctgcagctcagggagaagtccccacagcccacagctgcctccctctgcacccagaggctgtgcggggggcagcaaagaataggtattaactctttccagtcaccagtgagctaaaaatcaagtgtccaggggaccctcttctaatgagccccgctgctggctgaaggttggctgctgcaccgggagtggggagcgtaaagatcttgccccagacagctgctgacagcaggagccactccaaatcaaatctcctaatgagccaggaggaggggggctgtcttgctgggtgtgatgtgatgtgataaatgcagagagcaagaaagctacagggcaggtcacacatctaaattccaccccctttctctcaatttctattgtgctgcactaccaagccaaaccacacagccctgaaattagccctctctgccacatctcagctgtgccccttactctacagaggcatttctcccccagctcatctccactcccaccctaaccagtgccaaccacaccactccccacttcttaatgagaaatttccacctcctctgccttcccaaacatgcatatttccaactctgtgctcctgcctctcacctggtttttcctacagtagaaactcacctctctccctcatccatcacctagcaacttccccctacttgcatttgttatggagtgagacttttccttttgttctgcccgatctgcacatgatccctatttttctgtcttttccatttctttcttctttcaaacctccttacccacatgggtcttcacactgcctgcttcagttccagaaggaggactctcttcctgcttgccctagtgtagtggttctccaagcgtggtccctgaaccagcagtgtcagcatcacctgagaagtatcagaaatgcaaatgttcaggccccacccctagacctacagaatcagaaactctggggacagtaatcagccttccaggtgactgtgatgcatgctaaagtttgcaaaccgctgccctgggagaaagcttgtcttctcgttatgctctaggtccctaaggttgagtctacactcccactcaggaactagctccaaagacacatagcctttgctgcaaaccgtttctgaaacccagaaggcaggagaaatctcgacagaaagtgatggctttataataatggaaatgaattcgattttttaaacctttttaaatgtataaagcattttcatgtattgtcactcaacaatcctatgccacagtcagagagggtattattattcccatgttacagatgaaaaaactgaggccagaaaaggtgatgtacctttatcaaagcaacccaacatgccagaggaggcacaaggaccagaatttgagtcttatgactctaacagcagagctctttctactatatcataccaggacccagtctttctgggcagatctattggtgcataacctgaattctctcggtgaaatgattctgccacaactactcattgtctgttgataagatgaaataaaaattctgatgctgcctccacagtgactcattgtctctttctgatatcgtccacagtgcccctctattaaagaaagggaactttgtgttataaaataagatgcaaaagaaaagtttctcatttcttattacccctttcttgaaccctgttgctaattggggtttagaacttaagcagaaagagaacccttcatttctggacattttcttggtacacggcaccataagaaacttgtacacagataaactggtgaataaaagcccattgataagcactcccctaattcaagatatgtttatagaataaggtgaatccacatagctaatgtttaatgagcagttagtatgtgccagacactatgccaaacatcgtatttgagttatctatttaattttcagaacaaatttacaaagccaacacctttatcatctcccttttacagatggagaaacagagacgcgtcatttaaaagtggcagagctggtatctagcaccaaacctgatgcttccagcctctgctctactccttgctttaacacaaaggtagtgccatcataggacactttctaccagcactaaaacagcggaacaaaggcctcctccaaatctcacgctgccccggccagtgtccacggggtaaaggccccaaggaaagagagcagggctgcaaatgggcctgagtcgcaagtggaagctaatcaatattaaccaggcatcagaatcttcaattagcctttgggaaaataatatagtcacaagaagtcaataagtccaatgtttaaaaagagctatagtaaacaagaaaaatgtaaaagaaagaacaggaatataaagagcagagggacaaaagtgtgtggacatgaataacacaaggaaacggaacattaaaactagtccaagctttttttttctaatcaaaacactcctaaatgccaaaaagtaatcacagaggaccatagtttgagaagtacagacgtagtgcaggccccgcttacaagaggacaccagcataatcttccaaagaggccagggcataatttcagggaggagaattaagctgaacctaaagtaaagcattctagcatcgtcttctttcctgaaacaaataaacagaaaaggcaagcagagttaagtgctcgtgagaaaggaattcatcaccttggactctacattccccaggcttagagctctggcccaggaatgtagagctctgggttcttttccagctactgctcctgacttgctagctgcagttggcacaggacatctcaactggccacaactcacgtttcttacaggaacacagtgattgcaagccctgctcctgcctctgggctgtcctgcccgcctctgaacttcccagtctat

SEQ ID NO: 1850 - DNA, 4001 bp, Homo sapiens
attcccagtcccagttactggaattatcattcaataaattatctaatcctgaaaactgaggctcttctctctgtctctgtccctgtctctcactctcactctcactctcaatctctcttactcttgctcttactctcttgttctctctctctcccctccatgtccctacatgcaatgggggatcatgctgtatggtttctctttgtacctatctctggaatctgtcttctcctttccatccataaagttactcttccattacaggcctctatgctctctcacctagacttctgcatcagcttcttaaatggtctccctagctcccacctcttgcccttccaaccaccctacacgtactgccaccataatctgttgatattattattgttaaagtctttcaaaatctccttgatgtcctagaaggtaaagtccaaactctctagtatagtatctgaggctttaccccatctggcttttgagtttcctcccagtctcatttcctgcctctctgcgcactctgcctcctgtttgcaagctaagccaaggcattgctgtttcctgcatgtgctaggtactctcacttgaaacctccatgtctttgttcccatattcccattgcttcaaatgttttcttaagcacagtcagctcacaaattaatagtcatccattaagaactggtttacatataatcttggtgagccaagaaaggtagaatctactgcaatggtagaattcatcactatctccctataccatcacgtatatcctccattattacaattaacaagtctgactgtttttatccatcgatatatctgtcttcctcatcagactgagcgtgtgagaggagggactttgttttttcacctttcttcctctaggctctaaaagtgtttgcacaatgtctaagttctgtaaatgtggaataaattgttctttcaaaagataatcttcaatctttttttttttttttttttgccaaagtctcactccgtcacccaggctggaatgcagtggcaagatctcaactcactgcagactctgcctcccagattcaagtgattcttgtgtctcaacctctccagtagctgggattacagtgcatgccaccacacctggctaatttctgtattttcagtagagatggggttttaccatgttggccaggctggtcttgaactcctgacctcaggtaatccacctgcctcagcctcccaaagtactaggattacaagggtgagccaacgctcccagccaatgattttcaatcttttggacttttgtttgtttatcattcatagagtctaacatggatttgttgaatgagtatattactgagcccatctgaatacagaaaagtggggtttggcagaaattccctagtgattgttgttcacagctacacacaccgctggtggcaaggggcctgactatgctagggcttgccattgccaaaacagtcttaaggagatatagagacaaggctctgtacatccttcccttcctcatcctctcatttctccattcttgtttttccttcttacctgttctgccttcaaacttcctaataatttgagaaggcttttagcacccattccacgccataataatattgacttggcaacaaatgaaatcactgcataatctcaaaccccataccagtcttctctctggaggagaggtggcccaatccacattttacttcctccctcttgccttagttgtcttatgaataaggccctgtactatcctcaaagatctggtggcagaaggtaggaggaaggggaagaaggagaaagagaaggaaaacaaaggcatgaataacacaaaagtcacccatggtgcccctgaatggctcagatctattaacaattgggaagatgaatggtttgccttatttgagagactcaaggccttggagacatccctggcagagactcaccagcactgctcatgttgccatgctcttcctgacacagtaatttgttaggggcagaattaccccccagtcaatagaactatatccattgtgaacacgtaatgacaccttctctaaggggttccagattctatctggcagtgatctacttacctctggtgtaggccttaatctgaagataagtctttatcttacctaatctgctgaatccccttggacatacaagactcctcctatacttaagcctttagttcatactattttatttgacaagttctttataattgtgcccaagatctcttgtctgctccaacctctcccatgctagggtgacttttgcattgctaaactcagctcctaagggtcttgtaaacggttacatttgatgtaattttaataagcagtaactcctggatattctgcccatttaaaacatcaacctccattgcttcagcccaggaattcaaggctgctgtgagctgtgatcacaccactgaacttcagcttgggcaacagagtgaaacctcatctttaaaaaattaaaattaaaacatcagcttccaagaggtttgaactcccttcctctgaagactcttcaggctcttggttttctcattaaacaactcttcatttctcctgttcttccctaataggaagtaaatattaagatgagagaccaaaagccctataatccttcaaactttagccaagaattactgagaatagaattcttcagtgtcacacccagagagggcttttaagtcttgggattgtagggaagcttatataatgtccaaaaggctttcctatggggggtggagggaaaactgaaaactggaaggattattgttaataatgaatcgtcaatacaatatcacttacatttgaaaaagtgctgtactttctttagaatatataaagaccaaatactgcattttaaagtgattttagtgagaagagattcttgctttacatcttgatgttctatgtattgcaagatgagattgtagcttaccatacttcttcaatctgttatcaattaccttattcaccttattaattagtcagtttaacatgcacacatcttaagagagttcagtgtgaagcactgcatgattctacaatatcatattattccttgaattatcacctcttttgcaaaataaatagagtcaaggtctcctcctaaaataatggcatatacagtagtaatatatgctcacattccttaagatggaatgctttcagactgttttcaatcaagctgtgtgcacctacccttgagtcctaattgctgccccaccgtctttcccacagttcaaaaaggctgactgttggagccattaacaaccaaatagggtcactctaaaaacagtaaagatgaaaagccagtatcactggctaaatcttgaaatgcataatggttagatccctgaccctttcatgaccttctagttcccaaaagaaaagggcaccagatgtctcccaaatgtgtggtaataagaattaccttattgacagggttgttgttaaaaacctaaattgccgggaccgtcccctggcaattctgatttagaaggggtggggctcaggagtctgtatattttccaagtgcccccagataattattatcatcaggtaaatatagaaaatattggggccagatgcagtggctcacgtctgtaatcccagcactttgggaggccaaggtgggtggatcacttgaggacaggagttagagaccagactggccaacatggggaaaccccttctctactaaaaatacaaaaaaattatccagatgtggtgttgcgcacctgtaatcccagctactcagaagtctgaggcacaagaattgcttgaatctgggaggcagattttgcagtgagctgagatcgtgccattccaccccagcccgggcaacagaatgagactctgtctcaaaaacaaacaaacaaacaaacaaacaaacaaacaaacaaataaattggtttctaaatgaaatagagctgcattcacatctcagatctgacatttactagatctgatctggtttgcaaa

SEQ ID NO: 1851 - DNA, 4001 bp, Homo sapiens
tcccaccttggcctcctaaagtgctgggattactacggctggcgtgagccaccgtgccaggacttcttttttttttgagacagggtctcgcttgttgcccaggctggctttgaactcctggcttcaagcaatcctcctacctcagcctcccaaaatgttgggactacaggcatgagtcaccgcccccagcctggtctttctaatacagagaaacttgaaagacagcaagcaccagagcaaaaagcatggagtttagagtctgacctagacttgaattctggatccattacttattagccatgtgaccttaggcaaatcccttaacctgtttgtatcttcatttccccatctataaaatagggttaataataatatcataagaggattatgattaaataagagaatgcatttaaaagcccttagcctgcatccatagtttaggaattggtggttcccatcacttgctcagtgttgagtgtgcaaattcagaaacacagcatgtctggactcagccctggtccagtatttttaccacaaaccagcacctgacaccttccctaatcccatgcctatgtggctctcccttcttttttattttattttttaaagacaaggcctcactttattgcccaggctggtctcgaactcctggactcaaggaatcctcccgcctcggcctcccaaatcactgggagcgagccatggaacccaaccttccctctcccttcaccactccacccgtcactggccagttctgtttacacgctgcctacgtgctttcaaggccaggggttgtctagcatatctttacaagcctaaggtgagggagttgctggttagggagaggcatggcaagaaggcagtcaaagaggaagggaaaagcacaggtgtttaggaaggctccacaatgagcctggcacccagcttggtattcaacatgcattgttccctgtcatcttcataaaaatatcattttgagctggccgccgtgcctcagttaactcaggaagctgaggcaagaagactgcttgagcacaggagtttgaagttgtagtaagctatgatcagccactgcactgcagcctgggcaaggtagcaagaccctgtctctttaaaaaaaaattatagctgaggaaactgaggctcaggaggtaaacaggagatatgggataaaaagccaagtgtctttgtgactccaaaataattttctgctctgccatgctgcccaccagcttgtagatgaccatcaaatgtttgagcaataagtttcagttttcttattcccaagaggagcagaaattgcgcagccctccctccagagaatccaggtatatgctcaaacagtgatgaataaacaaatgaacactaatgaataaatgaaagattgagtgaaatctctctgatacccacaccaggaagaaggaaacaaataactctggaggagccgccttgcgggtagaagtggagactgtctccctggctgtggtctccagtgtccaggtcagcaaagggctaggaactggcttagttggagttagaaaaacttaggagggtagggggtgctggggagaacgtgatggctggagggaaagccagtgtgaagggcagggaagaggaatggaattactctgtcctcatcctcagcccttccctgccatttccctcgggaagatagcccctgactcctggcccaacatgctgccaacttttaaaatgaaagtagcaggatccaaagcggccacaccaggaggtcactccagaaggggggttaccagcgaagcaccccacatgtccctcctccttcctgcacagcacccctcggccctgcacttcctgctgccgcccccttgtcctgacataggactccctccactccctcccagctcccacatcttaccctgaaagaccaaggtaggggcgtcccagcccacgccctccggtccttgcgttccaggcttcctgggccaaggggttgcccgctgccctgaagatcccgctctgccaggcgctcctccgtccctccccaaacaaaaatcctccagacaggttccaaagctgcccagcccaggaggagggaggctgaggaaatcccctcccagctgggctgggccggcctgcttggcagtcttgctcctgggctggccctggatgaatgagtcctcctcttcgcctgcttgggtcttagccagggagccggtggcagcctctgctctttctccaggacactgagctccattcctcctccaagtcctgccctcctgcttcatgcctgggtcccctgctctccactctcagctctctgacgcctcaaccgggtggtctctatcactctgcatttggttatgctccagtctgaagccaggcctgtactgggcaccagggtgggtgacttgacgatcctcagcagagatttagtccacagaagaattggtgacaccatggcccctggtgaaatagctttgccagctctgattattcattcaaagcattttgagaataactggccttgtgtgaggccctgaggatgaagaggtagattaacggggtccctgacctcctactctactaggaagacaaagaatgaagctctaagtagacgctgctcaagattcaggcagaaggtggccaggcatggtgtctcacgcctgtaatcccagcactttgggaggttgaggtgggtggatcacctgaagtcgggagttcgagaccagcctgatcaacatggagaaacctcatctctactaaaaatacaaaattagctgggcatggtggtgcatgcctgtaatcccagccactcgggaggctgaggcaggagaatcgcttgaacccgggaggcggaggttgcagtgagccaagatcacgccattgcactccagcctgggcaacaacagcgaaactcggtctcaaaaaaaaaaaaaaaaaaaaattcaggcagaagggaccagagaggaatccccctgtgtggaagtgttctggaaaagctcctagatgacatgacatacaagatgggttttgaaaggtgaacaggggttttccagaattgtaagcggggagcacacagaaggggagcacaggctgacagaaaaggccatgggaagggacggaattcagcaggaactactcaaagttcagaattgtgagcagggagtgtcagatcatgaagggccttgtgtgccttggtaaacagtttggactgtgtcctataggttctggggagtcatagaaagattgtttgtttgtttgttcgtttgtttgttgcaatacagggtctctctgggaggcagaggttgcagtgagccgagattgcgccactgcactctagcctgggcaacagagtgagactccatctcaaaaaaaaagaaaaaagaaaaaataggatctctctcagttacccaggctagagtgcagtggtgcactcatagcttgaagcagccttgaactcctggactcaagtgatcctcccacttcagctgcctgtgtagctgggactacaggcacccaccaccatggtcagccagtttttaaattttttgtagagatggaatttcactctgttgcccagggtgatcacgaactcctggcctcaagagatcctcccgccttgacttcccagagcgctgggattacaggtggtacaccacaccctgctagctcacagataggccttaaacaagggacacaaactatcagactgcatttaaaatagatcactggagccaggtgtggtggctcacacctgtaatcccagcaatttgggaggtcaaggctggaggattgcttaggcccaggagttcgagaccagcctgagcaacatagtggcacctgtctctacaaaacaaattttttttaattatccgggcaatggtagtgtgcacatgtagtcccagctatactccagaggccgaagtgagaggacagcttgagcccaagaggttgaggctgcaatgagctatgatcacaccacagcactctagcctggatgacagagtgagaccctgtct

SEQ ID NO: 1852 - DNA, 4001 bp, Homo sapiens
agactcttctaaaaaaaaaaaaaaagaaagaaaataaggtaatgagagctggaaatttttaataggagactctcacactctaggccttgtttgaatgtatctcctttaaactgaggcatcctttttccccttgctcagatggggaaaaactgaggcttggagatgacctgcccaagcacttgtgataaattctgggagatctggtgctcttggtcccagctgcctagggcctgaattgcaaggcagggtccccaacctttgaaggtgaggctctattcccatggggctgagggtgggggtgggaggttaactctgtctttattgaaacttgtcagcaggcaggtgacttgtggggcaaaaagtttaggatgcctgagttctagttccagctctgccactcacatgatgggtgatcgtgaacaactcacaacccctctgagactcagcttctccttctgtgaaatggactaatgacgctgccatgcttcctgccaagtctgggggctgctgctctgtgattagcaggtagatggtgcttcattttctttcttttttttttttttttttttttttttgagacagagtctcactctgtcattgcccagtctggagtgcagtggtgcaatctcggctcactgcaacctccacttcctgggttcaagcaattctcctgcctcagcctcccaagtagcagcgattacaggcgcctgccaccacgctcggctaatttttttttttctcgagatggagtctcgctctgtcacccatgctgaagtgcagtggcgtgatcctgactcactacaacctctgcctcctgggttcaagagattctcctgcctcagcctcccaagtagctgggactacagacacccaccaccacacccagctaattttttgtatttttagtagagacgggagtttcactatgttggctaggctggtctcaaactcctgacctcgtgatccacccaccttggcctcccaaagtgctgggattacaggcatgaggcaccgcgcccggcctaatttttgtatttttaataaagatggggtttcaccatgttggccaggctggccttgaactcctgacctcaggtgaaccgcctgcctcccaaaatgctgggattacaggtgtgagccaccacgactggccagttgcctcattttctctttgtctctgaaaggaccagctttgagggactagggaagaaatgcctgatcccaactggtcttggctgcctacacgtgtgggcgattcatacctaacacctgccattatgaccgctcacaaccccactcttaccttccctgcccagcaggattctctttcccatgctcagggtggagcccctaggaaaggcagtctctggaacagcccagcaaagcccaattaggccaactgagatgtgggacaagaggatggttaaagctggggctctagatctggcttccaatcccaactccctgacttgtgactgtgtgaccctgaatcagccacttaaccaagcctcagtttccccacctttgtctaactcatagactaagtgagataaggcatatgtatcagcacggtaccctggatcatagcaggcactagtgaaagggtgagattttaaacccagagcccctccacctcagagcgagacggctgcccagctaaatgcgggcacccaaatgctccctcccaagacaccggagggtctttgcaaatcttggggtctttgcttcccgcgcgccctcaccccgcactcacttgggtagcgaaagtaaaattcattgtccgcgttactgtggttgctccggtgccagagggcagcgtcggttttgtggttgtagcggacaaagacagcaaagaggacggcagtggcgccctggaggaagaggcacagcaggggaagctgcagtcgccggcccgcggcgcggctaggagacccggccatgggttgggctgcgatctcggctggcgctcgcaggctttggcagacaattcccggcggcagggcaggtttcacggagccccgcccacagaggccctgctcacggaggccccgccctcacctgccgcaggcccagggccccggggaccaggagcggggcgtcggggggtcctggaccctcggcccaaggtagggccaagacttggggaagggagtcgcacagtcctggcgctgatcctggcactgttacggtgccaggtccttggacgcgaccctggaaaggcgccatgtgttctgccctgatagggcacagctgtgggacctgggggtgggagaacccgcaccctcatacatgatgttactttagagtgtctcccaaagaataaatggcccttaaagaccccggtctgggctgggtatggtggctcacgcgtgtaatcccagcactttaggaggccggggtgggtggatcacttgaggtcaggaattccagaccagccaggccaacatagtgaaaccctgtctctactaaaaatacaagaaaaaaaaattagctgggcgtggtggtggtacacctgtagtcccagctacttgggaggctgaggcaggaggatcgcttgaatccagaaggcagaggttgcagtgagcaagatcgtgccactgcgctccagagtgggcaacagagcaagactctgtcagaaaacaaacaaacaaacaaacaaaactctggtctggcccctctagggttaacacaagagagagttagggtttacttaatctttttccctactgaaaaagcagagatggaaaacagagataaatagtgctctccaggcactgatgattaaccaggctggggcgtctgggcctctgcagtggagtcccttacaccgctccaagcggtgtaaggtaagggactctcccccttcctacccccaatctgtaccacaccacagggaagcaggctgggcaggggccacactgacacccaggttccctgtgtgcccactgtggatgtgagagagcctgggctgcctctgcagctggagcggagggaggctgaatgcaaggagggcttctcaattccaagtccagagttcctcattacccaagcaagattggcatccactgggggcccggtagacagacatggaggagacagacatttattgaacacttactgtgaggcaggctttggagatgaaccagatagccccttcctccaggaaccactgtctggtgtggagacagacacttaggaggaaatttgattaccagtgggataagcgaccaacccagagaagaacagagactgcaggggtccaggaggaggggccgcagaggccccagggataggggtaagggaggggactgagatggagaattgcttcctgagaaggtaatgaatgtatgaaggtgatctggaaggacaatctatgaattggacaagtgaagaaggaagaggagacattataagaagtgggaccaacatagaccgagcctggcagtgtaagcatcccgtgtgttcaggaactcaggttgggggaggctgggggtggtgctgggaaggccctgaaggccctgctaaggcacagggcctctactcagtgggttctgggccactgaagggttctaaataggtgtggaaccctggcactattggttctgacacctgacacctccacagggtgaaggcaagtattccatggggctggtgggaggggaggctctctgtctacgctgcagcggcagcccatcccaggcccgcctgtctgagggagtcatagtgtggaaggaacccgtgagtgtctgtaatggtgtcacaaaccccagtccaaaggaaaagctgccactcccatgagtatggcctaggtccccaggggacaacctccccccagaacagatgcagggtagggctgcttctcaggaatgggcagggatggggtcaagagtagagcccctaacctcttccttttctttcctcctgccccttccccagctcacttctacctcccctcaggggctccagcctctgacacacagtgggctctggaggacagttgg

SEQ ID NO: 1853 - DNA, 4001 bp, Homo sapiens
acgttagtagcacggtgcaggggtaaagaacatggaccctagagtcaatctacagggttggaatagtggctgctacacctactgggttatatgacaaatgactcaacgccactgtaaaatggggccatgatgcataatggttaagtgtaaggaaactaaatccagggtggctaaatttaaatacgctgtgctattgctagctgagcgaccttgggcaaattactcaacatccatatgcctagtttcctcatatgaaaaacgaagatcataatagtacccacctcattgggttattgtgagggttcaatgtaaagcatgtagaatagtgcctggtacatagtaagtgctcataaatatcagttctaatcatcatgtgtctggatcccacattggatgtcatacatggttgaatgaatggaatgcattgaattgtattggattgaaatgaattaaagtaaattgaaatgaattaaaattgtgccagctcttgtttgtctgtcactgaaggctcctctctgggccagcaccttaaatggtataagggcttccctccctaagtcctacttgtcactgccatggcccccaggatgacttctctttgcttccagttaactagccgttcatatcaacctaggaacaagcaagcactcaaccaggctcaagcttcaactttgtctcagggacattcttcaaggaggccctgtccattatcaacaacctatcagcccactgagatgcctgaaactcatttcaatatttttaaaaaagcaaagtcacaccattgtggacatctgtcttatttacagttgtctcatcacagtctgggaatatttttagctgaatataaaataaccatcatcctaccctccccttcagccataccttctggttctggatttatagacagcatgcagacttcccagcccctaagtgagaagaaagctggggtcggtgggggtgggggtggggggtagcaacaggctgaagcttccaaaagaaaactagtatagatatgagcaagagagctgggcacagtgcttcacgcctgtaattccagcactttgggagactgaggctggaggatcgcttgtgtccaggagtttgagaccagtctgggaaacacagggagacccacatctctaccaaaaaaaaaaaaaaatttagccaggcatggtggtgccctcctgtggtcccagcttcttgggaggctgaggtgggaagattgcttgagactaggaggtcaaggctgcagtgaaccatgatcatgccactgcacttcagcctgggcaacagagtgagaccctgtctcaaaaagaaataagaaatgagcgagaggccacaaaaaggaaacaaaacccgaaaacccaacaacatgaaattgcttgcataagctagctgcacttgtatcccctaaatctataaaaataaaaaaaatccttgccactaaggagagagaaggggaagcagagaagcagagaattatgaagaccatttggtagagggaatttgaggaacaccaaagaggatgcctctcactgtgctgaaaaatcaaggcaggcttcacagaagagggcatgcccaggctgcttctaaaggaaagcttacattgttgactgaatttcggtgcaatctacggaagaagatgggggaatcttttcctcgggattttgtagaaaggaacatctgtgcccctggagaaccataggcctcccccgcccctgcccctgctatttgctcctgtgaccactgttccaatgaactctcaccttgataggatgccacgagccccttttgatcctctaaggaagcgtcatagtgggtaaaaaaatagaagaggagaatgagagctgcttccagtgttagggcgcagaggggcaggcagcgccggacagaccgcgggtacttagagctcatcctgtgtccgtctctgtgcaggggttccaccagcaccaggcatcacccctctctccaacacctacttgagggcttgagggagcgataggggagacacccgccaaaggccttatctcaggctgcaaggctggctgtgctggcctgtctatggagttaacacggaagcagagggactatgatggggaggggaggaaatgtatgttttccaatattgtcattcattcaacaagttgctgtgttcctgttacaggttcctgctgtgctcagtttgaaagagggcattctattcctttgacacccaaacataatccttctttactctgtacttcagtcatcttcagcatatccttgtaagaaaagcaaggaacggatcaatactcctattttataaataaggaaactgaagctcagaagaggctttctttttaaaaccttactacatgacagagagggcacccagtgagctcttaacaacaatgtattgaatgagaatgaatgaaagcaaagaatggagctgagccctggggaggatacagataggacccacgtagaattgactcctcatagttacacagttgaaattacttacatttgaacttgtatttaaatctatgtgtttctaagcattttaagggggggtggcagaagagaaaggagatgtgggtttggctctagtaaaaacctggaggggatcctgatccagccttagggtgaagttgctctacctctggtcacctcctcacagggcagcccaggactctgcctggggcactacagtgcatctgaggaaggccaccagcctcagcatccccatccctcagtactggacagtccagtcccctggcatgagctttacggggcttgggacttagttctaaccctgcagccaacttcccggaactgtgctcccatccatgtgcctggcagaaggtctggtacatggtaagtgtcaaggaaggaaggaagagagagagggatgtagggagggaggaagggatgaaagaggaagaaaagaaggaaggaattggagtttcctcattttctacaatggccccagccactggccactgagtgtaaactgaatgtgtggagccccagagaataaagccagggccaggagctacagggaagtggaaggtggaaagtggatactttattgaccattacagttgtccactgaaatactcatgaggtagtgagcaccctgtcactagaggaatgcagaaatgtcttgaaaacaattcctatgtagatcagaggagattttaatcacccagtcgaatcctgtcattttgtttttagaccaagaaaccaagacccagagaggtcatacctaaggtcatctagtcacttggcatcggtcacttcttgctcagtgcagctttatttacagaaggaaaaaactgagactaacctaaatgtccgctagcagggggttggttaagaaaactgcaggacatgaaacttgctaccaatatgatggttctgaacatatgcaggaaaagcaagaggaaaacgcttttatcaaaactgacacagaggatagactgtttagtgaaaaagcaagttatataacagcatgtacaatatattcccactcttataaaataatatgttagcacacgcatagaaaaaagttggctgcaaaccactaaaacattggttaattttgctttatacattttcagagctaactgttactaagtacttgctaggcaccattctaagcactttacatatatgaacttagttcatgacactgggatgggtactattaagcttttattacaaatgagtaaactgaggcacagaaaaactaagtgacttgctcaaggtcacagggctagtaagcagtagagctgggatttaaacccaggcagcctaacttcaggacctgggtgtttgaccacttaactgtagcctagatcaggggtccccaacctatttggcaccagggacgggttttgtagaagacaatttttccatggaccggggtgaggttggagggatggtgtggggatgaaactgttccacctcagatcatcaggcattagttagattctcctaaggagcacgcaacctagatc

SEQ ID NO: 1854 - DNA, 4001 bp, Homo sapiens
tttctgaggacattttgtacctacgttagtagcacggtgcaggggtaaagaacatggaccctagagtcaatctacagggttggaatagtggctgctaacctactgggttatatgacaaagactcaagcccactgtaaaatggggccatgatgcataatggttaagtgtaaggaaactaaatccagggtggctaaatttaaatacgctgtgctattgctagctgagcgaccgtgggcaaattactcaacatccatatgcctagtttcctcatatgaaaaacgaagatcataatagtacccacctcattgggttattgtgagggttcaatgtaaagcatgtagaatagtgcctggtacatagtaagtgctcataaatatcagctctaatcatcatgagtctggatcccacattggatgtcatacatggttgaatgaatggaatgcattgaattgtattggattgaaatgaattagagtaaattgaagtgaattaaaattgtgccagctcttgtttgtctgtcactgaaggctcctctctgggccagcaccttaaatggtataagggcttccctccctaagtcctacttgtcactgccatggcccccaggatgacttctctttgcttccagttaactagccgttcatatcaacctaggaacaagcaaggactcaaccaggctcaagcttcaactttgtctcagggacattcttcaaggaggccctgtctattatcaacaacctatcagcccactgagatgcctgaaactcatttcaatatttttaaaaaagcaaagtcacaccattgtggacatctgtcttatttacagttgtctcatcacagtctgggaatatttttagctgaatataaaataaccatcatcctaccctccccttcagccataccttctggttctggatttatagacagcatgcagacttcccagcccctaagtgagaagaaagctggggtcggtgggggtgggggtggggggtagcaacaggctgaagcttccaaaagaaaactagtatagatatgagcaagagagctgggcacagtgcttcacgcctgtaattccagcactttgggagactgaggctggaggatcgcttgtgtccaggagtttgagaccagtctgggaaacacagggagacccacatctctaccaaaaaaaaaaaaaaaaaaaattagccaggcatggtggtgccctcctgtggtcccagcttcttgggaggctgaggtgggaagattgcttgagactaggaggtcaaggctgcagtgaaccatgatcatgccactgcacttcagcctgggcaacagagtgagaccctgcctcaaaaagaaataagaaatgagcgagaggccacaaaaaggaaacaaaaaccaaaaacccaacaacatgaaattgcttgcataagatagctgcacttgtatcccctaaatctataaaaataaaaaaattccttgccactgaggagagagaaggggaagcagagaagcagagaattatgaagaccatttggtagagggaatttgaggaacaccaaagaggatgcctctcactgtgctgaaaaatcaaggcaggcttcacagaagagggcatgcccaggctgcttctaaaggaaagcttacattgttggctgaatttcggtgcaatctacggaagaagatgggggaatctttttccttgggattttgtagaaaggaacatctgtgcccctggagaaccacaggcctcccccgcccctgcccctgctatttgctcctgtgaccacttttccaatgaactctcaccttgataggatgccacgagccccttttgatcctctaaggaagcgtcatagtgggtaaaaaaatagaagaggagaatgagagctgcttccagtgttagggcccagaggggcaggcagcgccggacagaccgcgggtacttagagctcatcctgtgtccgtctctgtgcaggggttccaccagcaccaggcatcacccctctctccaacacctacttgagggcttgagggagcgataggggagacacccgccaaaggccttatctcaggctgcaaggctggttgtgctggcctctctatggagttaacacggaagcagagggactatgatggggaggggaggaaatgtatgttttccaatattgtcattcattcaacaagttgctgtgttcctgttacaggttcctgctgtgctcagtttgaaagagggcattctattcctttgacacccaaacataatccttctttactctgtacttcagtcatcttcagcatatccttgtaagaaaagcaaggaatggatcaatactcctattttatgaataaggaaactgaagctcagaagaggctttctttttaaaaccttactacatgacagagagggcacccagtgagctcttaacaacaatgtattgaatgagaatgaatgaaagcaaagaatggagctgagccctggggaggatacagataggacccacgtagaactgactcctcatagttacacagttgaaattacttacatttgaatttgtatttaaatctatgtgtttctaagcattttaagggggggtggcagaagagaaaggagatgtgggtttggctctagtaaaaacctggaggggatcctgatccagccttagggtgaagttgctctacctctggtcacctcctcacagggcagcccaggactctgcctggggcactacagtgcatttgaggaaggccaccagcctcagcatccccatccctcagtactggacagtccagtcccctggcatgagctttagggggcttgggacttagttctaaccctgcagccaacttcccctgtgctcccatccatgtgcctggcagaaggtctggtacatggtaagtgtcgaggaaggaaggaagagagagagggatgtagagagggaggaagagatgaaagaggaagaaaagaaggaaggaattggagtttccttattttctacaatggtcccagccactggccactgagtgtaaactgaatgtgtggagccccagagaataaagccagggccaggagctgcagggaggtggaaagtggatactttattgaccattacagttgtccactgaaatactcatgaggtagtgagcaccctgtcactagaggaatgcagaaatgtcttgaaaacaattcctatgtagatcagaggagattttaatcacccagtcgaatcctgtcattttgtttttagaccaagaaaccaagacccagagaggtcatacctaaggtcatctagtcacttggcatcagtcacttcttgctcagtgcagctttatttacagaaggaaaaaactgagactaacctaaatgtccactagcagggggttggttaagaaaactacaggacatgaaacttgctaccaatatgatggttctgaacatatgcaggaaaagcaagaggaaaacgcttttatcaaaactgacacagaggatagactgtttagtgaaaaagcaagttatataacagcatgtacaatatattcccactcttataaaataatatgttagcacacgcatagaaaaaagttggctgcaaaccactaaaacattggttaattttgctttatacattttcagagctaactgttattaagtacttgctaggcaccattctaagtactttacatatatgaacttagttcatgacactgggatgggtactattaggatttattacaaatgagtgaactgaggcacagaaaaactaagtgacttgctcaaggtcacagggctagtaagcagtagagctgggatttaaacccaggcagcctaacttcaggacctgggtgtttgaccacttaactgtagcctagatcaggggtccccaagctttttggcaccagggacgggttttgtaaaagacaatttttccatggaccggggtgaggttggagggatggtttggggatgaaactgttccacctcagatcatcaggcattagttagattctcctaaggagca

SEQ ID NO: 1855 - DNA, 4001 bp, Homo sapiens
gaatactccagccccaggcctcttcccttcaacatagatcctgagtggcccttcccttgcctccagacacattcacaaaactgttggttttgtggacatgagtcagagaatttacaggagttcaaagtacacagccacactcttcccaccacaaaacggactctctctgattccccagaagacaagcaagaaggcattcaccctgtcggcagatcgcctccagaaatggaaaccatcctccaaaaagagggttccttgggaattctatcccggtgactgacgctgggatttcttccaactcctccacccactccattagttcaccttgccctgttttgtaaagatgggctggggtagccccaacctggggtgggcagtgttgatggagggcaatcactactggggtgaaagccagtcacttaggcatgagtatgccactgctgtccccccagcagggtaattcagacggcaccagagtggtgggaggcagaggacagaaacccggggttgaggcatgcgttaagggacctggagcctccagcccaattagaagactttccctccaggctatgattgggccagaacagcaggcagcccaggccaggacactaggcccaaggccaagatggcatggacaactccctgtgagaggcagccccagagggactgtcccactgaccccttaagaggggcaactgagccccacacagggcctggaatggagcctggaacttctggggccttccccaagacaagacagtgtggctacatcagacctctctccaatcgctctcttgaattcccagatgatccagagcggccggttgactttgccggcccaccctacacctagggaaggaatccgttctggagataccaagagatactgcattctcaactttaaaaccagagtgagggcgggactcggcctcgggatcccagtcccaaaccccaggatactctttcttggttcgagtatgaagaaggaggattctcaatctcattttctctctctctctctctctctacacacacacacacacacacacacacacacacaccacacacacacacacacacacacacacacacacacacacacacacacacacacacacacacacacacacacacagagttggatccttccccatctcccttatcctcaacacaagcgggctccaggaaccgtccagggcggcgtccagaccctgccgagcagtggcaggccccaatggtcacatcccgcccctattcccgccatacctccctcctggcctggaggaattcccaccccatcccactctaggtcccctgcggccgcccaccctgggggctggggcgtctgagttgaagttccctcgcccctcgcccggcggggcaggttccgggaagctgggaggagaagggaaggggctccgactcggacctcaggaggccagagcccctgccggcaggtccgggccccctcgctgcagcccggggaggggccgacgcggtccgaccaccgcccagcccggatgccgactccgcttggagggaacggggtccacgcccaggccgaagcccctcctcgcacgggccccgatctccgggccagcgaggaagggaaagtgctctcctggggacgagttcccaagacgccccaccgcccgcagccccggcccagggtaccttccgctccgccgcctccagctgcgcggccggtgccggaggctcagactgaccccagggccccgccccgccctcctccagcgccgcggcggggagggcgggcccggcagggggagggtcggccgggggcggcccttggctcggcccgccccggccccgcgcagggccgcagccaccggccccctccgcaggccggggactgggggccaggggcgtccacccctccaggtcggggagagccacggggagattcctggactgcggaggagccgggcgagcggggggagcacgacccgggtggactcagactctgcccagccttcaatcccctaggggaggaccggcgtcgggaaagttaagaggtgctcggggtggggtcaggaagggccgctgctgccctcctgtggccaagcggccacccgctcctgctgcacctgggacctcgcgggaagcgggactgggaaagggtatccgccgggaggtcccagggcccggcgcgggtgtgttggttggggggagatgtccaccctcttgttcctaggatcgtacagcccaacgtcatcccccaaacttgaagacctctcagagccgttcagacccagaccaccgttcctcctcacaattcgctttcttccctgggcctggaatttccaggagtccaattcctacctactcctcaaagggtgcgcctagaaatgcttctggatcccagctgtgaattctgttcccactcctaggtctgacttggcgcataggatatttacctacacgcgtatctcctttccctgtaagggagctgaggaggtgggagtagaatgaggacgtccaccaacatttcattggcttgtgcttgggacactacacagcttaaccctttcaatattcatcacagatctctggggaaaatatacccatccccttttgcccatagagaagctgaggttcagagaaatcaagtggcttacacaactgtttttgacttgtgacagcaagaattcacacagccgggcctgtctggctccaaactggtggtctggccctgctacctcacgggctcctccagcctgtcccttcccccgttgtctagcagagtgagtggcacataataggttgtcaacaaatatttgatgaatgaatgaatgttaggagtcatacagactttaaatatctgaagtgcaatccagacatttgacaaatgtgaaaacaggtccgcagcagtttggccccaggcctcttaactgactcaatgaacatttctcgagggtgaactgagagctatgttcggaagatccatttctgccttcaaacaacttagagtctaaatgaggaatgcaatttcaagatagctaacatttattgaatccatattacatggacctgggtccacatacattaactacaagaatcccatgaggtagctatctccattttactgagaagcaaattgaggttcagagaggttacagagctagtgctgggtctgacactagaacccaaacagctgaactctagagcccctgttcttaattcctactccctactgactcctaatgtagacagttacaataccggaggtcattgctgtagtgtgggcatgtgtgggctgtgcgatacccagtcctgaacaacaggtgaagttctcaagataaggtgatgtgtagatttttttaattttaatttttttttgagacaaggtctctgttgcctaagtgtgcagtggcaagatctcagctcactgcagcctcaactttccaggctccaatgattttcccacttcagcttccccagcagctgagactacaggcgtgtaccatcacacctaatttttgtattttttgtacagatgaggtcttgctatattgcccaggctggtgaggggccttttctaattattttgctcatctttatttttgcttcccttaacttactttgggtttaatttgctgttctttttctagcctcttaaggtggaaacagatcactgatttgagatctttattcttttctactataagcaatactcttaatttccttggatgcttaactgcttcccacaggcactcaccactacattcagctaattttttatttttttgtagagatggggtctcactattgcccagggtggtcttaaactcctgggcttagcagtcctctcacctctgcctcccaaagtgttgggattacaggcgtgaaccaccgtgtccagcagtagattttgaataagttggagctactaaaagcccacagttatgcaaaccccaggaagttggtggtggtggtaaaaaatgaagctggagaaggaagcagtggctggatcatgaagg

SEQ ID NO: 1856 - DNA, 4001 bp, Homo sapiens
gcagcttccctcacttcctccttccctggggaggggaactgacctccagccggctgaagttcccaggctgcaggaagagagggcgggctctggagctgagatgaagtcaaggctgttgggaagggggagggggctagagtctgggctgggaggagccccaaaagaagagacaaatgagggccagtcccagcaccaaccaggcagggagcagttaagaaagcgacggtaacctgatctcagcctcaaacctagctttttctctcagtcccacatcctgtcaaactgggctgactgaacgcctctactccccacaccccaccaccacctcacactgccctttaggaagcgaatactccagccccaggcctcttcccttcaacatagatcctgagtggcccttcccttgcctccagacacattcacaaaactgttggttttgtggacatgagtcagagaatttacaggagttcaaagtacacagccacactcttcccaccacaaaacggactctctctgattccccagaagacaagcaagaaggcattcaccctgtcggcagatcgcctccagaaatggaaaccatcctccaaaaagagggttccttgggaattctatcccggtgactgacgctgggatttcttccaactcctccacccactccattagttcaccttgccctgttttgtaaagatgggctggggtagccccaacctggggtgggcagtgttgatggagggcaatcactactggggtgaaagccagtcacttaggcatgagtatgccactgctgtccccccagcagggtaattcagacggcaccagagtggtgggaggcagaggacagaaacccggggttgaggcatgcgttaagggacctggagcctccagcccaattagaagactttccctccaggctatgattgggccagaacagcaggcagcccaggccaggacactaggcccaaggccaagatggcatggacaactccctgtgagaggcagccccagagggactgtcccactgaccccttaagaggggcaactgagccccacacagggcctggaatggagcctggaacttctggggccttccccaagacaagacagtgtggctacatcagacctctctccaatcgctctcttgaattcccagatgatccagagcggccggttgactttgccggcccaccctacacctagggaaggaatccgttctggagataccaagagatactgcattctcaactttaaaaccagagtgagggcgggactcggcctcgggatcccagtcccaaaccccaggatactctttcttggttcgagtatgaagaaggaggattctcaatctcattttctctctctctctctctctctacacacacacacacacacacacacacacacacaccacacacacacacacacacacacacacacacacacacacacacacacacacacacacacacacacacacacacagagttggatccttccccatctcccttatcctcaacacaagcgggctccaggaaccgtccagggcggcgtccagaccctgccgagcagtggcaggccccaatggtcacatcccgcccctattcccgccatacctccctcctggcctggaggaattcccaccccatcccactctaggtcccctgcggccgcccaccctgggggctggggcgtctgagttgaagttccctcgcccctcgcccggcggggcaggttccgggaagctgggaggagaagggaaggggctccgactcggacctcaggaggccagagcccctgccggcaggtccgggccccctcgctgcagcccggggaggggccgacgcggtccgaccaccgcccagcccggatgccgactccgcttggagggaacggggtccacgcccaggccgaagcccctcctcgcacgggccccgatctccgggccagcgaggaagggaaagtgctctcctggggacgagttcccaagacgccccaccgcccgcagccccggcccagggtaccttccgctccgccgcctccagctgcgcggccggtgccggaggctcagactgaccccagggccccgccccgccctcctccagcgccgcggcggggagggcgggcccggcagggggagggtcggccgggggcggcccttggctcggcccgccccggccccgcgcagggccgcagccaccggccccctccgcaggccggggactgggggccaggggcgtccacccctccaggtcggggagagccacggggagattcctggactgcggaggagccgggcgagcggggggagcacgacccgggtggactcagactctgcccagccttcaatcccctaggggaggaccggcgtcgggaaagttaagaggtgctcggggtggggtcaggaagggccgctgctgccctcctgtggccaagcggccacccgctcctgctgcacctgggacctcgcgggaagcgggactgggaaagggtatccgccgggaggtcccagggcccggcgcgggtgtgttggttggggggagatgtccaccctcttgttcctaggatcgtacagcccaacgtcatcccccaaacttgaagacctctcagagccgttcagacccagaccaccgttcctcctcacaattcgctttcttccctgggcctggaatttccaggagtccaattcctacctactcctcaaagggtgcgcctagaaatgcttctggatcccagctgtgaattctgttcccactcctaggtctgacttggcgcataggatatttacctacacgcgtatctcctttccctgtaagggagctgaggaggtgggagtagaatgaggacgtccaccaacatttcattggcttgtgcttgggacactacacagcttaaccctttcaatattcatcacagatctctggggaaaatatacccatccccttttgcccatagagaagctgaggttcagagaaatcaagtggcttacacaactgtttttgacttgtgacagcaagaattcacacagccgggcctgtctggctccaaactggtggtctggccctgctacctcacgggctcctccagcctgtcccttcccccgttgtctagcagagtgagtggcacataataggttgtcaacaaatatttgatgaatgaatgaatgttaggagtcatacagactttaaatatctgaagtgcaatccagacatttgacaaatgtgaaaacaggtccgcagcagtttggccccaggcctcttaactgactcaatgaacatttctcgagggtgaactgagagctatgttcggaagatccatttctgccttcaaacaacttagagtctaaatgaggaatgcaatttcaagatagctaacatttattgaatccatattacatggacctgggtccacatacattaactacaagaatcccatgaggtagctatctccattttactgagaagcaaattgaggttcagagaggttacagagctagtgctgggtctgacactagaacccaaacagctgaactctagagcccctgttcttaattcctactccctactgactcctaatgtagacagttacaataccggaggtcattgctgtagtgtgggcatgtgtgggctgtgcgatacccagtcctgaacaacaggtgaagttctcaagataaggtgatgtgtagatttttttaattttaatttttttttgagacaaggtctctgttgcctaagtgtgcagtggcaagatctcagctcactgcagcctcaactttccaggctccaatgattttcccacttcagcttccccagcagctgagactacaggcgtgtaccatcacacctaatttttgtattttttgtacagatgaggtcttgctatattgcccaggctggtgaggggccttttctaattattttgctcatctttatttttgcttcccttaacttactttgggtttaatttgctgttctttttctagcctcttaaggtggaaacagatc

SEQ ID NO: 1857 - DNA, 4001 bp, Homo sapiens
ggggagtgtggagaggcctgcagcaggacatgttgtggaggtttctattttaattaagcagtcagttttgtctctttctacacaactttctaattgtttctaaatatttatactagtcagctgcaggggtggggtggggggaggggaagaaacaataccctgcggtgggaacccaccagtacagcacccatttctctaaggtacctttgggatgaaaggaaggtcagagaagcaatttttttttaaagaagcaagacagttaagtgtttcatactagtttctgtgaattttaactttttcttaaatttcaaaaagacctgaatagcaagatagagaattcctttctctttgtatctaccaagggaaatggcatcgcacccggtacataggagctttaagtagcttaaagggatcctgaaaagataccaacaatcagaatccgagcccatgtgggcagggaaggtggtggggctcagaagaaagaaatggtgtttactcttcaggtttcatccaaacctaagccttcacgagggccgctcgcgctttttcactaaatcaagtgttttcccggcgtctccgcggctctttaaagcggagacgccccttgtgagctgagccgcctaaaagcaaaggagcgacgctcaggtaaaggcacctgcgcgtcaccttctgattgaaactctgcagcggcgccagcgacgtcgccctcaggaaactttgctctatgcaacaaactgaccgggcaccctgaactcaacctgtttcactcctacttatctgttgcttaaattgtgagattttttttttttttttttttggcaaggctctgactgccgctccgccctcctctctccaagcccactccgccgtggtcctttcgtgttagctccgcgcttgcccggtccctgagactcaggaaacgtcctgcactcctcatttgtccggcttcccagctggagccgcgcccggggccctgcagcccccttgggaacctcgcgaccctcgcgccaccttccttcccctgggtggaccgcggccacgcgcccccggccccggccccccggccagctcaccggagaagttgtcgaaggcagtagggatgtactcggtggggtagccgttggtggtgtagctcaccaccaggctcgtcttgcccaccgcgccgtcgccgaccagcacgcacttgacgccgcgcccctcggcaccccccgcacgcccccggccccccggctccccaggcccgcgtcccccgcgtccaccgcgctcccgacgcggcggcaccggaggcgcctcgcagcggtcggggaacgcggggtccccctgctgcgggggcatcgatccgcgagcgcgggcttgcggtcgcgggctagcagggcccggcccgaccgcccctccgccccggagggttgcggtagggaggagctgtcaccgacagctgcgggcgcgtccccggccctggagagtggcggttccgggccgcacggccagtagacaaaggcggccagggagggtcgtggctccgcgctccggcggcgccagccgctctgccctgcgctgttggaggacagcggtccgagcgccgtggatcccaagcgctctgtctccgcccggcttcccggcgacacgacgcgtggggggcgggcaggcgggcgggctggcggggagggaaaagaggcgggtctggccgagcggctcggtccccgcgccaagaccacagcgccccccgcctgcgcgccgcgcgcctgcacccgcgcccgaggcgccgccgcgaccaggcggggactgcgaacactggcgcgggaggacctggaacacacgttccgggggaccccgcgcacccggtccgggaagcgacgcccgaaggagccgggccagcctccgcagcctcctccccagctcccaagagggtgaccaccgcgcgactggcccgggaggttccgctttctggcgcccacgcgagccaggaagcctgagccgcctcctattcactccgtggagcccccggctggccacggctccacccagggggaaaaatgaagtgtcctggaggcctgtcctgcgaatgagattgaattaacagacagcttttttccttaagtctaactgcagctgatcgtgtgattttttctcattttgaagcaaaaggatgccagctccattgtgaatgctcctttgactttgtctttcggcatgccgtgaacctttatacatgtatgctccagaaatttttttatacccccaattccttcatttacttaaaggtaattcggagacattaatatgtctgaaaaaatattccgtttccctttgattcatttctctctctgccttccttctacatgtggtcaacagtctattcagaaaaaggacgcctcttagccaagtcagaataccaagagtcctgggggtgtacagcgtggtgtgagaagggccacatattattaatacacattgatactagtggtagtaaaaataacaataacaaatactgaactttcataatgtgtcagatactgttgtaagcactcttcaagaactaattcttttaatcttaacattacttacagatgagaacacctgaggcacagagatattaagtaacgttttgggattccacaagctagtaagtggcaatgccaggatccaaacccaaatagtctagccccagagcctgagcttctaaccaaaatcctggaggcaaaaataagtcagtatgataaacgtaatcttgaacgtatggccatggtcagaatgcagagatggatttatcaagaagttagaagcttgaatccaggacccctgacttgcaaaggacactttcacattggaagacctagcaatgtgtacacgtggtaatatgtttctgtaaattttgaaaaaaaaaaaagtattttaatcaccaccagttatgttcactgtctttttaaactgtaacttaccctcatattgagtgactttgaagaggccatgaagattttggggatcagccaaagaaagtgaagttggggagacccaaacaggttgtttgggtgtaatgggatacagaatcaggatgaaggtgagataagggggatgtcaaggatgcaaaatttatgacaaattgagcattcagaggcaatatcaaaaaacaacaaatttagagggcccttactctcagggtcaggcaagtgccaatgttaagttttgagcctcaggtacctgacttgcctctccctcgccctggctgtgatgacaggatatatttatgtggtttacagttctcctatgtagatatgttgttgctagccatccaggtataggaatggctaccactgacatacctatgaccctctgtgagagtcacattggtgcccttaactgtcttactttccccaacactagaagggttccagtagcaagagtagcagagcttgagatgggcagagctggaagctagtctggcaattctttccatcataaagcacctaatatcggctggtgcggtggctcacgcctgtaatcccaacactttggggggctgaagcagtcagaccggttgaggccacgagttcgagaccagcttggccaacatggcgaaaccctgtctctaccaaaaataaaaaaattagccaggtgtggtgactcacacctgtaatccaaatactccagaggctgaggtaggaggatcacttgagcctgggaagtcgaggctccagtgagcccttgatcaaccaatatactctagcctgggcgagagtgagacactgtctcaaaaagaaacaaacagaagaaaacacaacattgttagagaaggtttggttctctctactaaacctgatcaaaacagaagttgtctgctgtcagaaatgtacctgtactctaaatgcagcagatacacttacaaatgcatcatacatttttggagaaaaatcacatgaaatgaatgatctgaattcccatgtttgtaaggacatgaggctgtagtagtacaacaaaaagcaagttcacctgtgtgtgaagta

SEQ ID NO: 1858 - DNA, 4001 bp, Homo sapiens
agtagagacagggtttcctcatgttggccaggcaggtctcgaactcctggcctcaagtgatccacccctctcagcctcccaaagtgctgggatcacaggcgtgagccaacgcatctgcctggccaacttttttttgtttgtttgcgatggagttttgctcttgttgcccaggctagagtgcaatggagcaatcccagctcactgcaacctttgcctcctgggttcaagcgattctcctgcctcagcctctcaagtagctgggattacaggcatgtgccaccacgcctggctaattttgtatttttagtagagacggggtttcaccatgttggtcaggctggtctcgaactcccgacctcaggtgatccacccgcctcggcctcccaaagtgctgggattacaggcatgagccaccttgcctgacctcgccaacttttgagaagacaagggagggcccacctctggctataagcacacagtccagaggggaaatggggaccgactgcttacagcacaatacagtgggaaaaccaggggtttgaatcctggttcagcaactttgggaaggtacttcacctttctaagcttaaattttctcacttataaaataaaaatgacaatcacctgtcttttgtggaggtgctgggaggatcagcaaaagtgttccaagatgccacacactgcgtgggcactgagaacacaaacacactccacaagctcggagctttggaccagtaacagaagattgacagctcaattacaatacagtgtggtaagtgctaatgtaggggaacagcacaatgcctggagatgggtgccattataattatttaaaccttgtctatttgtctataaccaaacagcatttgagatagctctattgttttcatccactgatgctccgtgatttatttttttaattctccttcttcatcccattaggatatgtttccattcaagcaaatgccaggctgaaaggagggtgggggaaggaaagaacatattccaggatacgctggtaaattgtcttctcttccccaagaaaagagtggcttccaacccttggaatttttctacagtaatgttttcaagtagggaagggccaaccagacaactgatttttgttttaagttcaactagtgattttgttaagctcctatggttgagaatagtgttctacacccagtggatggctgttgggtttcgcaacgccaaattccctcttccaagtgtcataaggtatgtatttatccttatggttaaagtaaatgaatagacatatttttaagaatttagagataactgaaggaaacctctagagataacgaagaaaaccctgcgtgccacaaatcccagagcctggaaaaccacctacctgaagaaaccacttatgagccactctacttctttgtgggtccttaggtacttttcgttagcaatccgagtctgaatctggggggcaagaacaaagggtcacttccattaggagacagattcagggttcagccctggagatgtgaagggctgcgggaaacggcgtgcgcatttaacccaagtctttccccaggatgcttgaaagtttaagccacccatcttcttacagataaaatatcattctgccgcttgttcaggatgaggggcctttactaaggtcggatgtgtctggcagtaatttcggcccatttctctggccgagtccctgagttagttcttcctgcactctcagatgcccgtcgcgctctgtgctgggatcagacgcctagaggtccgccgggggtctcccctgcgccctccccactttatcagggaacaggctcccgctccccttctctcggcggctctcttcccagtctggggccccagtcctggggcagctacactttggtggacgctggatgggggcgcgggcgcacccaccttgaattttcgcagctgctccagctgcgctgcgctaagcgccccggggtcgggccgctgcagcaagcctggcagcgtctccatcttgctgcggtcgtcaaggcgaccggccgcgagccggcgaggccccgcccccggccccgccctgcccccaagcccggccccttcagcgaagcaggggctaggggctgagggaactgaggggtgagctccggggcgggggcttggggggtgggtctctaaaggatcgcctttcccggattgggggactgatttctggacttaattgtatgtggaatgagccctttttgaccccacccaacttcagggtttttttgttagctctagagtaaaacaggaaaaaaggtctccccgaatctgcttccagactccctcacttggacagaagctagaggaagcctagtactggggaaagagaacccaagcttcttccctttccactgtcccagaagccaacccgtccctctgtccggtacacattcgacactggagccgtggattcttcaaacaacgtggaagcaccccagaacatagagtgagctgagttctgcaaaggaaggaacgttctgtccgactaaagatgctggaaaggacctgggggacattctgccagaatttccccctcttggactgacttttttgtgtagattaactttctcttcaccctgggctcctcataaattctaaattattttattccactcccaactgaatacgggaggagaaagggaatttggtcttcaagatttgttcttctagtatctaattaagaagagaaagtgaaacataaagccagagagctgaaaatagccacgagaaagggcatgagcctgtctgtcaatacacacatgccgagctcctacccccacagagatcgtgctcagcagaggccttctgagaagcaggagaaaaaagggaggctgtcttttcagatttgtgaacaactgccctaaggagcaagaaaataccatgagaaacaagctcagcattaggccctggccgtggaggggttatcattggtctgcttctgtcctttccagcaaagactgaggaaaagaagtgaaagtgttggcagttcccaagccagggaaaaccacaagaagtaaattaggtagtgggctacaagccacttcccaggaaccccatcttggttagtgatcattttggttgattgtctttttttaagagagagagttaatagagtgagagagagataagctgccatctgtcagaagtgattttttttttcccggcaggagcaagaggttaaccagagataatggttcctcttggccaagatctgtcttttctccccatactccctccagagaagctggtggtggcacctccagagctgtgccagccagtacagtcaccacaagccacctgtggctcttgaacacttgaaaagtggctgtaggtgttaaatgtgcagcaaatataaaatacacacaggattttgaaggcttggtatgaaaaaaatctcattaataacatgtaattgatttacatgttgaaatagtattttggatatatcaggttaaataacatttattattaaaagtaatttctcttgtttctttttgcttttatatatggctactagacatttttaaaccatatatgtggcttgtattatattagacaatgccagagcctggaccagcaaacctacacactcaaacacacacaggcatgcacagtgttctctacctccccacctccaagtaggaaatgattgataccctccgtctgccaatctgtgatcttcttgtgctttgataatcaatcaagcctttcttcactgatcacatcctatgacccaaatgcccatgtatgagaggggctactttttgtttttttaacagcgtctcagtactcactattatgtattgtgttggcctgtcttaccttccacttgaggtggaagccacttgagggcaggaaggttatagaatcaattctttgtgcactctcataaattctgctgcagatgtcttcactctgtattcaatcagggaagccagtaagtacttcatgactagccactctgcccacacata

SEQ ID NO: 1859 - DNA, 4001 bp, Homo sapiens
gacactaaacaaaagggtctgagtgtttcctgtggcactagcatttaattttatcttttttttaggactgattctttaaaatgaggttttagatacagagcattttcttgctcttacagaatttgtgacggttctacaaactaaatgtgatgtggaatttggctactgtatctcaaaaaagagacatctttacaaactgtaaaataaataagcaaaaagttcatcctgggtagaaagatgtacatgttaactacttaatctaggtcggtgaaatacaacagattatacaatttaaatatgatcctgaaacacataaagtgagaggaaccttaacccctagtttctataaataagaatcccgagattcaaagacaaaagtggtttgcccaaagcaaagccaagatacttgttaactgtaaagctgtaataggaattcacatctgcagattccctgttcagaaatctagttctacattaactgtgacagttttaataaatcaaggatagagagagggtaccggttgcatctgatagtcattgttgtagattaaatgtaaggtacctaatgtttatggtatatttctccaacaggatatacaatctgatattaagtatgagggacttcgataaacttggagatgaaaaatctataacagatatattccactcagaaacaggtcatattcaaaatctcacttgtaagtagtctttccgaatttgaaattccttcccctgccaaagcaaagtaacagattacgagcttatttaaccattaataattgttgaaataatgcgaacagtatcccaagatgcaccctgaactgggcgcaaatccttttgagtcctggactccctgaaatggttggatgcctccagtggagccccagagacactcaaacagcaagccagagggttttctgcgtcagggattcctaaatcagagaggcctgtattaaggatatacgaaaaaataattaaccttttgaggtcaaacccacagatgacaaccatgtcttacccacaaaagtctcctgaacacagcagtggagtgatcagtgaggccagaactgtctgaacctgaaatcccggctcttctggaatcagaattcaacgctgctagggagaaggatgagttaaacccatcaaaggtctacactcccactttacactcgagaagtgactccaatctttctcagatttcccccatatgtggctttctagtttggaaataatattctatgtggtgcacattactgatgctcacacactcccaaaaaacttttttaaaacagtcatcttaatagtaattttgtaaatctggtgtggatttctagaaacctcagagtctaaactgtcaaggtattgatgcgagcaggatttgcaaatgtggggtttaacagcctgattttcctcggacacctgggtggcttcaggtgaattcgggtttctcacaaaatgaagtcccctaagtaaattaaatcgcgttctcgaatcttggcctcggggcaggtggtggtggttaaagaagctatgaaggttagcggctttctccaaccccaagaagtctcgcagctagagtgcggctagtgtgcgggcccgaaggagactctgctgcgggaggcccggcgagcgcgcccacccgaccggctctcgtggaccccggcgcgcctccctgccctccccgggcccgcctcgctcaccgaggtggccgccgacgatggtgacggcgatctggtccataagcaccgcccggaagcgcacgtcctgctcggagcagcgctgccggagggcgcgcaggatctgcacctgcgggtagtcctcgcggatgcgccggtccgtcaggaaccagagctgggagcacatggcggccagggcggtgcgccccgcgcggcgcggacccctcggcgccccgggccgctcgctcagtagggcgagcggaggggcggccggcgtccggggcgagcgcgccacggctccgctcccgcgggtgcgccaggcgtctctgcagccctgacccagcgaatccgcccggccactcagcgccgccgtcggccccgccagccaatcagcgcgcggcggcgggcgctggcggctgcagaagcgaccctggcgggcggtgccggggaaggacggcgggtggggggcttgcggcggcgggggaaaggacccggggttccggggagcgagccgccggcgggcgcaggcgaggcggaggagggcagccccggcaggccccggacacccggtggacgtggcgctgcgggctggggtgggacagccggagcaggaggggccggggcggcggccctgtgaggctcggagggtttccgagctgacgggccagagatgcgcagtgggcggcggatgcgtctcccaggcgatcccgggcgctcgggggctgggacacgggcggacgcctgctgagccccggacagggagggcctcggggacgtcccaaaggagattccggggtatggcgaaggtcacacggctaggtccccagttggaccctaaagcattggaaggagagggatttctctgccgaaatcctagcctgaagccccacgggggtgggggaggatgtaggagagggggaagttgagtcttacccacctcccattcagataatttgaaagtgcatttcctggggtctcagattttcttacactggacatcccctcctaggtttcagcaggtctgagccttcacagactcgaggtcataaaaaattgacctagcatccttttcagttagaaggaccactggctggtctcccttcaccactcccgctctccccaggccatacaactgagtcatctttaaacactgtccttggtcctggccaattgcaaaccctgcctgcagacaatagtgtttgaagccagattttcctttctaaataactgcaggattgaagttagccatttttggagactgcatttgctcttccagttcattaaaatatgcctttttttaatttcttttttggcttagggaagcaagagtagtttcaaggtagacccagcaatggcaacttagaaatggggtaagttgtctcagggaaggcacaggcttctctgtaaatattgtgcaggtgtgtgcatttactcactaagatgagcctataggaaagttctgtatactggaatttcaaaagttatttttcaagcaatgtttttcttttttttttttttttttttttttgagacggagtctcgctctgtggcccaggctggagtgctgtggcgcgatctcggctcactgcaagctctgcctgccgggttcatgccgttctcctgcctcagcctccggagtagctgggactacaggagcccgccagtacgcctggctaattttttgtattttttagtagagacggggtttcaccgtgttagccaggatggtctcgatctcctgacctcgtgatccacccgcctcggcctcccaaagtgctgggattacaggcgtgagccaccgcgcctggccttttcaagcaatcttaagtaagtattttgatgttgcaaaatatctcctcccccgttctatgaatgtattttcttaaagtaacaatagtgccctatggattggtaactttcaaaactattttatggcaaaagacaaaattacaacaaatttagttatagattgaattggcttttgagattcatgaattggggtagcctccattccacagaatagaatgagagctttcactgggcaatggcagaagagtgggttttaaaagaggggaacaaggaaatagagcaatggaagaagagctgattgcttaacatcaggctactttgggttacttttttggtaagggttaaagcagaggggacttccttattctgactcaggtaaactgaaatctcctgttttcaggaaaagctggtctgttgtgggatgtacctcaagtttgattatgtggcatttagcaggagggactcgatttggtttggtctattctgttgtggcctggtgcaaaagctcagtccaaa

SEQ ID NO: 1860 - DNA, 4001 bp, Homo sapiens
ctgggttctgcgcagtaaaatccaattaaagtccagagaccagaagcgtcgttgagcaaggagggagggagagagaatagttaagacagtgacacagaccacatgccctgggagaagggaccgtggtccctgctgggtcctcagcacctggctcctgcacgcccgcccagcaagtacttggcacaggggttgctcatgagttcagcagttagctgctgagccctcctgagtgccaggcactgtgctgcgcagctcaaatccaccatttcactcactccttcctgctacccacatagcagctgggtttgttttactgaaagagtctcagagaggggaagtgatttcctcaatatcacacagccagaaagtggcagagcttgggtttgaagccaagtttaaccaactctgggcttcataccctgcaaagggtcggataagtgtagaaccccagggctggaagtccctaagcaaggcagtcaggaacagaaggcagggaaggggtctgtgggccctaaacaaacaacaaagggcatggtgcttggtttaagcacagggcacatgggtcacctccccagcacatccctgccaacccacccaccccgcctcccaaccaagaatgccccattaggctacccacatgcccccagggacagttggcagctgcctgattacagactaattggtggctggcagcaactatggtggggtgggggagatggctcattaaccccttgttgaccaggcccaatcctcctcccatgacttcaggccccaaacccaaggaacccagacttaagaagtcatcatggatagaggacaggaccaaaggagcagcagccttcttccctacatcctgataacacccctggggctagggttggacacatattcacccaggtgtccaagccctgaaggaccacattgaaacaggccccaagtggcagtgccagccaatgccccctgttctccagccttgatatgccattgcccaccccattccaggatccttcctgagccttcaggaccaggacactgaagaaacccactcctcagggctgagttgtccagaggtgatggggacatggagtccaggtacccaggcggccagtcagggaagagctcctccctatgaatgagagcatgcccaagttgcccatcaagggtcctgccaagcctccctgaaccctgggctctgcaccatgctgctgaccaactgcattcccagcttcccaaagccccctcttcccaccccagggctggagtaagcagcactccttttcttttatggggtggagggggtcctctggacaccacaacggtgtcacgttgaggaaaaagtggctgcttctcaaccagggcacaggcagaagggagaaaagcaggctgccttccagctccctttccaggagggattttaagcactttccaaaaatgccatgccaggcaatgctgttgaagaccagggccccaggagctctgagcatcagcaaagaactcaagactctgggcccccttccccattttccaggcttccccaaacaccccacgtccctctctcatcccttagtcccctccccagagccctctcacaccctgtgttcatccccccacccccgcccctgcacactcacatacctacgttgcgcttcatggccagagcccccctccccccgtggtcctccagacctctgcagccccctccccacgtccactcccaggcgagcaaggcctgctgacttacccggaggtggggccggggtccagacagggagggggcctccacaggccgaggcggctccgcaaggcggggcaggtgctgccccgggaccccgccccgcgaacccggcagtaggcgcggcccggccccaggctggcgcggactccgagtggataggcacgcggggcggggaggggcggcgagggaggctcacgggggcatcgcccgccaccacgggggcagctccgctccgcccgcctgcgctgccggctccgcagcagccaccgttttcagtcgccgccgggtgcaaagcccaagcttgggccggcgggaggcgaaggggaggcggggcctgccgggggcggggccgcgtggatgggcggggccagtgggccggaccttggtggtgggcggggcctaggggaatccggggagtttggcttgccgggttgtggttgggggacctacattaatgaggcttccaagaagcggggtctggggaagcctcattcctctccgtgtccctaggactctcttgcctcctgcccggcctcccctctccaccacctaccctatctgttctttctcatccttccttttctttggggcacctcccaggacctcacaggcaccacggcgccccctgccctgccctgccctgaagcagttccaggaacgtcagatggtaagagaagaaacgacttacaaacgtcaagtccattttacagatggaaaatctgaagctcagataggagaaaagacttgcccaagtgcctggtatgaagagaaagactttataatgtccctttcagacagaaggaagtagagtggccggccctgaagcccaagttaacctgcttcccctgcgctctctacttctagagcaatggttttaaacttggggcgattttgccccccagggaacattcgaccatgtctggagacatttttggttttcccaacgaggaggttgctactggcgtctcatgagaagagaccagggatgctgctacacgccttcaatgcacaggacagcccctgcgccagagaattgtcaggcccgaaatgtcagcaggtttctgaggttgagaaactctgttctagggcctggcatctgcctatataaacttccaaatagactcctggagtcctgggttcttctgcagcccgggaggatactgtatgaagtctttcctagggtcgtgcctgccccaacttgtatatttaaccttgcttaggactggtcagttccactcttgggctccagtgttttgaattccacccactgacagagaggacagaataattaatatttgctggaggcatgtaaaaccagtagtctccctgctgagggcatgaattaaaatgtaaatgggagctgggtgcggtggctcatgcctgtaccagtgttttgggaggccaaggtgggtggattgcttgaggctgggagttcgagatcaacctggccaacatggtgaaaccccatctctactaaaaatacaaaaattagccaggtgtggtggcacacaactatagtcccagctactcgggaggctgaggtacgagaatcacttgaacccaggaggcggaggttgcagtgagccgaggtcgcaccactgcactccagcctgagtgacagggggaactctgtctcaaaaaaaagtaaatggggagtgggaaggtggggagaaaaaggaaaattattgggattaaaggatcctcctggggattgctaggaggcatagtcatcctacgccttcccttctcacctggtctgtgagaagcataaactgaggccctacaatgtgaaaagcctcaaagtgcgttccatagctggtcagaggtggagctggggctcctgattatatttacatattaattaaagctttgttatcagctattctacctcaggcctaggcctggactagggcctgggtggtagaatgggttactctggagcagcaagggggactagattaggggaggtgggatggaggccagggcaggacctggaacgagggtggaggtgaggggtgggagcacagagaggaatcaggcttcctgtgtgctcctccctggcccctttcacagagacaggtaaaccaggggttccctttgcacatctgatgaaaacttagcactatctctctggagatgtgcaatgtatattttgcatataatttcagtatcttcaaagttctatattggttaccagaaggactggatgggaggtgggtggagagggggttgattcttaagtgtatatagaagaataaacatacag

SEQ ID NO: 1861 - DNA, 4001 bp, Homo sapiens
taacagtacagctgactttctgtgccctctcccattcccacatccatttttctttcatattaggatataaacccttagaatcaaacctgcttccttatggtttaggaatgacagtaatgttcttagtctttgtagagattagcaattaaaaaataaaaaagtcaaagcaaacaaaatgacttttttactctattagcgttctgcaacaagagttaaggaccataaaagacatcggagggctaggcacagtggctcacgcctgtaatcccagtacttttcgaggctgaggtggatggattacttgaggtcaggagtttgagaccagcctggccaacatagtgaaatcccatctctactaaaaatacaaaaattagccgggtgtggtggcagatgcctgtaatcccagctactcaggaggctgaggcaggagaattgcttgaacccgggaggcggaggttacagtgaccggagatcgcaccattgccctccagcctgggagacagtgcgagactccatctcaaaaaaaaaaaaaaaacaacagacagacatgggagaagacattactacgtaatgaacttaaggtataaggaagtaaaccaagagctccaagtgcaagatgtccaggcttggcatgtctgggttgtaagagttcagcagcctggctctacttgtttctctgcttccttttgtggaagttcaaaccagctgactcacagttacagagcgagtctcaagtcatacccttagagaagtgacagcaagaaaaggcttcgttaagtggcctgtatacaaccataaaaaaatacaacaaagagagttgtcccattaatgttcagtaagagacaaagactaaagatggcttatgacataaagtctgaaaaaaaaagaaatattcagttgcttaccaactgctgatacccttgtttctaaataaatctgaattagactccaaaaaagcctcaaaatataaatagttagaaactactgatattcattaagatatttttatggggtatatttggaaacataagtgatgatctggcttaccaatggtgggatcatgatcttctgggaatcggtggctgatgaactgcatggtcatggcttcaaaagaagaaataaaagtcaaatcctcacaaaggtgacccacagagagaattttaagtattaacattgcaagatagcaagtatcccatctggtcatttaagtacttttcatccatgcttcctgtcaaatggaaaatgttacctaccactcttccctacaccaccagcacccagcatcactagtttgtactcccgtgagagcccagcggggctgctacagcagctaccaactgggcgagttccagaatccattgtcctcttggggccttcctcggttgccccgaggaaaagccacctagaaaaggaggaggaaatgcttaatccaggatggagacaccacggcgacagccctcaagccagtgccttacctttccatacatattctggcctgtccctcttactctggcctgtccctcttgctcaccactgcaccctttcgggtggccctaagaaacccccccatcttcaccctccctcctagacagttcagtcacatgacacatcacaggttttactttttccaaagagaaaaataaaaagatacaaataaatttacgtctcggcacagtagggacaaggagaaagttttgggaagaaagggatgcggccccttaggccgcaggggttctctcacgtctgcggtacccagaggttccgccccctccccattctcctccgaaccccctccccacccccagctgctgctccgccgccagactccccacccctctacctcacaagccgacgccctgctgctcctactggtcagtggggactggaacaccacagccggtcgggtcacgcacttcgtcttccttcactcgcggaggctccggcactgacctgtgacccctcccgcaaccgagtaagatggcgccaccggcgcccgagtcgcggaaggaggggcggggccactcagtgacgcccacagcctgccccgccctcttcccgcccctcccaggtccctaaaacccagttccgggacccaccgctgaaggtcctctggtcacctacccaacctagggtgtatgcactcacagacaagggtatttaatcacgagtagaaagtaaattatttacacaaaagggaagggagtacgtgataagagacatgcagggacacttaaattaacaacttaccgagggttgtttgctgcttgtgggaaaaaaaaaaacccaaaactaatttgacccaatgtaatgagaggaagggaggacaggggcaccccccaaatcctcctaaaacacaggatttcagtcaagtctaccggggatgactactcataggagaaaaatgactttcctaaaggagcggccacaatgacttttgctattgaaacctaaattcattctcagaaaccagatgttcacaacactccctaatcagagttctgtatgtattttaaacacgtataagacacacaaaaacttgttttaaataaatgtaccacactctggcaggaaagagagctctgagttaacagaggccttgagttaaatacagaactgaagcgcagccactataaccatattcccctctatttacgtagcacaggtgctagaagaaactgacacgaaaattgttctcatgcagctctgcctaccactgttctttttaaatgtctttctgggccgggcgggcgcggtggctcacacctgtaatcccagcactctgggaggccgaggcaggtgagtcatgaggtcaagaaataagagaccatcctggccaacatgtaaaaccgtctctactaaaaatacaaaagaattagctgggtgtggtggcatgcgcctataagtcccagctactcgggaggctgaggcaggagaatcacttgaacctgggaggtggaggttgcagttagctggctgagagggtgccactgcactccagcctggcaacagagcaaaactccgtctcaaaatttaagtctttctggccaggagtgctggctcacgcctgtaatcccaggactttgggaggctgaagtgggctgatcacttgaggatcaggagttcaagaccagcctggccaaaatggtgactccctgtctctactaaaaatataaaaattagttgggcatggtggtaggtgcctataatcccagctactcaggaggctgaggctggagaaccacttgaacccaggaggttgcggtgagccaggattgcaccattccactccagcctgggtgacagagcgagactccatctcaaaaaaaaataaaatgtctttccaagaataacatatttcctttaaaacccgcttcattcatgaagtccttttaatacgctgttaaataaaggagggctaaaatatgaaaatggaaaatatccagcataataatccttaaccttttcatttgaactttaagggtacattttgcagttacataactctgggaactatatgcaaaccttggggtctgtatatgtatttttctggtaatgttatagttgcattgtgctatgagtaaaaaagtttatgaatttcagtgtatggatgggttgtggaagaaaacagagaaaccacaagcagaatatttatagatttatttataatgaaattatggtctaaatatttacaacatataggaaaccagaggataagtttatacaaagccagcctgcaaagtattcaaatgtgcaaaaatgacagttcaatatctcaaactattcctggttcagcagactagctccttcactttcacacatcaatatttgatacaaaaagttattttggcaaaatctgtaatgccaagaaaaaggacaatttgcaatttcagtcattaagtccaaaatcctatagccagcagtcagatctctctgttttagctgcaaccagttctgggagagagagaccactgtatttcatttctgtgatgagttctgaccag

SEQ ID NO: 1862 - DNA, 4001 bp, Homo sapiens
tttttctatttttcccatccctggaatcatgtgctctatgaaatgaccatatcaaagctgggccaccacaaaacattattggctttgcgggaaacagagcagcagaggcctgacccaatggaaatccttcctagagaactaggatcatggcaaagagtgtcacatactgaaaataataaggcccggcgcagtggtcacgcctgtaatcccagcactttgggagtccgaggtgggcagatcacgaggtcaggagattgagaccatcctggctaacacggtgaaatcccatctctactaaaaatacaaaaaaaaattagccgggcttggtggcgggcgcctgtagtcccagatactcgggaggctgaggcaggagaatggcatgaacctgggaggtggagcttgtagtgagccgagattgtgccaccgcactccagcccgggcaacagggtgagacaccgtctccaaaaaaaaaaacaaaaaaagaaaataacagtacagctgactttctgtgccctctcccattcccacatccatttttctttcatattaggatataaacccttagaatcaaacctgcttccttatggtttaggaatgacagtaatgttcttagtctttgtagagattagcaattaaaaaataaaaaagtcaaagcaaacaaaatgacttttttactctattagcgttctgcaacaagagttaaggaccataaaagacatcggagggctaggcacagtggctcacgcctgtaatcccagtacttttcgaggctgaggtggatggattacttgaggtcaggagtttgagaccagcctggccaacatagtgaaatcccatctctactaaaaatacaaaaattagccgggtgtggtggcagatgcctgtaatcccagctactcaggaggctgaggcaggagaattgcttgaacccgggaggcggaggttacagtgaccggagatcgcaccattgccctccagcctgggagacagtgcgagactccatctcaaaaaaaaaaaaaaaacaacagacagacatgggagaagacattactacgtaatgaacttaaggtataaggaagtaaaccaagagctccaagtgcaagatgtccaggcttggcatgtctgggttgtaagagttcagcagcctggctctacttgtttctctgcttccttttgtggaagttcaaaccagctgactcacagttacagagcgagtctcaagtcatacccttagagaagtgacagcaagaaaaggcttcgttaagtggcctgtatacaaccataaaaaaatacaacaaagagagttgtcccattaatgttcagtaagagacaaagactaaagatggcttatgacataaagtctgaaaaaaaaagaaatattcagttgcttaccaactgctgatacccttgtttctaaataaatctgaattagactccaaaaaagcctcaaaatataaatagttagaaactactgatattcattaagatatttttatggggtatatttggaaacataagtgatgatctggcttaccaatggtgggatcatgatcttctgggaatcggtggctgatgaactgcatggtcatggcttcaaaagaagaaataaaagtcaaatcctcacaaaggtgacccacagagagaattttaagtattaacattgcaagatagcaagtatcccatctggtcatttaagtacttttcatccatgcttcctgtcaaatggaaaatgttacctaccactcttccctacaccaccagcacccagcatcactagtttgtactcccgtgagagcccagcggggctgctacagcagctaccaactgggcgagttccagaatccattgtcctcttggggccttcctcggttgccccgaggaaaagccacctagaaaaggaggaggaaatgcttaatccaggatggagacaccacggcgacagccctcaagccagtgccttacctttccatacatattctggcctgtccctcttactctggcctgtccctcttgctcaccactgcaccctttcgggtggccctaagaaacccccccatcttcaccctccctcctagacagttcagtcacatgacacatcacaggttttactttttccaaagagaaaaataaaaagatacaaataaatttacgtctcggcacagtagggacaaggagaaagttttgggaagaaagggatgcggccccttaggccgcaggggttctctcacgtctgcggtacccagaggttccgccccctccccattctcctccgaaccccctccccacccccagctgctgctccgccgccagactccccacccctctacctcacaagccgacgccctgctgctcctactggtcagtggggactggaacaccacagccggtcgggtcacgcacttcgtcttccttcactcgcggaggctccggcactgacctgtgacccctcccgcaaccgagtaagatggcgccaccggcgcccgagtcgcggaaggaggggcggggccactcagtgacgcccacagcctgccccgccctcttcccgcccctcccaggtccctaaaacccagttccgggacccaccgctgaaggtcctctggtcacctacccaacctagggtgtatgcactcacagacaagggtatttaatcacgagtagaaagtaaattatttacacaaaagggaagggagtacgtgataagagacatgcagggacacttaaattaacaacttaccgagggttgtttgctgcttgtgggaaaaaaaaaaacccaaaactaatttgacccaatgtaatgagaggaagggaggacaggggcaccccccaaatcctcctaaaacacaggatttcagtcaagtctaccggggatgactactcataggagaaaaatgactttcctaaaggagcggccacaatgacttttgctattgaaacctaaattcattctcagaaaccagatgttcacaacactccctaatcagagttctgtatgtattttaaacacgtataagacacacaaaaacttgttttaaataaatgtaccacactctggcaggaaagagagctctgagttaacagaggccttgagttaaatacagaactgaagcgcagccactataaccatattcccctctatttacgtagcacaggtgctagaagaaactgacacgaaaattgttctcatgcagctctgcctaccactgttctttttaaatgtctttctgggccgggcgggcgcggtggctcacacctgtaatcccagcactctgggaggccgaggcaggtgagtcatgaggtcaagaaataagagaccatcctggccaacatgtaaaaccgtctctactaaaaatacaaaagaattagctgggtgtggtggcatgcgcctataagtcccagctactcgggaggctgaggcaggagaatcacttgaacctgggaggtggaggttgcagttagctggctgagagggtgccactgcactccagcctggcaacagagcaaaactccgtctcaaaatttaagtctttctggccaggagtgctggctcacgcctgtaatcccaggactttgggaggctgaagtgggctgatcacttgaggatcaggagttcaagaccagcctggccaaaatggtgactccctgtctctactaaaaatataaaaattagttgggcatggtggtaggtgcctataatcccagctactcaggaggctgaggctggagaaccacttgaacccaggaggttgcggtgagccaggattgcaccattccactccagcctgggtgacagagcgagactccatctcaaaaaaaaataaaatgtctttccaagaataacatatttcctttaaaacccgcttcattcatgaagtccttttaatacgctgttaaataaaggagggctaaaatatgaaaatggaaaatatccagcataataatccttaaccttttcatttgaactttaagggtacattttgcagttacataactctgggaactat

SEQ ID NO: 1863 - DNA, 4001 bp, Homo sapiens
agccttacccaaaacccacagttgttttcctgcaccacccctctccttccattagtttcccctcctcccatagcattctgggtccttaccaatctctacctttggcactgggatgctttccccaccccagaccttcacgtgactcattttcatccttgcagcccatagggtcttactaactaaagtggcctctcccagttacttctttctaagcacatactacaatttataattaacctttttacttatttttctagttaattgtctttcccatcaggatatcccatgaaggctctctcctcaccattgtctctacaacacctccttttccatcattaccaaaaccgcactggaaatactgtcattcctaccacctcccaccaactgtaagttcatcaaggctaagtgctgtcttactcatgtttccccagcacttggtaaagtccctggcactatcctatgaagtcagtaaaaatctgtaaaataaatgagcttactaaacagggatgactactactaaggaagcagagaacaacaacacgttaacatttaatagtacagggcaatgttgcaggttgtacacacaaaaattggagtggtacaatccacggaaaagattagtaaggacaaaattccattcagagagatgaggtgcttctgcctcggcagagagagggaagaaaagcaatcaagcaagctaacttttattctactccggaccaacagagcaaattgccccccaaaattattattttagaacgccgcaatttattcagcatactggactacttattagactccaagtaccaacatgccacgattattttgcattttctaaggtacaacagataaggagctgatgggtgcctctgaaacctgacagaacaaacattggaagcagaaataataatggccaatatttgtatttgtaaaagacttgaaaacatacagaaaaatctcggagtggtcatggagactaaactaaacacacccataaatatgtaatcataggttaggacccaccaaggcacagaaatgatcatacgactgccaaaagaggccacactctacatccctcttcccatcctcttctactcaaagagtcagccttattctcggtagcacaatcctctcaaagaaatacagaaaagacgaaagaacggcttaaacgtaaaaaaaaaaaaagcaaaaaccaaacaaccaaccggctccgcaatccctaatcagaaagctctagacgcctttcgaagccaactgtcataccttttaggagcccagaagatgttaactccaaaaataagtctctggccccaacacacctctctggattattcagaaaaacccgggtttaccagttcggagatctgcactccactcaaaaaaggatctcccggcagggacaagcaatcaatccctcagggggcagtggcgctccaaccacccggccaggacacaggcaacggcgacagggcacagcccttccagggacccgccagggccctccgggatctcagtaaggctcagagcaaaacgacccagcggtggccaaagtcgggcagtggcgcaggggggccagcggtcgagcttccgagctgggccttcccggcccgggggcgcggcgagtcacggaggtggcgcctttcagtttggacccggctgcttacagaggatccagggcctccttccctgacttccccgccccgccgccctcagccagccagtcagcccctcacctggcagaagctccggcagtagttcaaagatgagacctccgacacctcttgctccctcagctctgtctccagctgccacagacacggccgcagtcccgaggctcccggcgctggagatacggggcgatgaccccgaaccatggactcagtctcgactccatctccggctcccgctaccgccggagcctcagccccagccccggcgacagcggcggcgtctccctttccgtccgccatcttcccacggcccaccagcgcgtaggcaaccaagccacgtgactcagccctggccctgcccccggccgcccgcgcactgtgacgcactccttagcgacgcgggcgcccgcctgattccgtcactcggactccgggtgctctcagtggcctacgcatcgccagtcctgacaacagcctagcaacaactggctagaggctatgcccacctagacccctttgaggtcatgggatcacggagccagaaatgcctgtagagcaatctagatttgagggggatgacatttgaactgcgatctgaagggacaagaggaaggtagccctgaaaggaacatagcgaaaagcatccctggtagaaggaaaataagcaaagattgtgaggccgaaatgaagagtaacatcaagggaacttggtttatgatacagacggcattacaagtcagtgggcgaaaggacagactcttcaataaatggcgatgagacattttttccaaaagggaaataaatgattagatttctacctcaaaccatttccaaaaataaggccgagatggattaaagacctgcaaacatttttcagaaaataaaaatagctttataatgtcaaaaatagggaagaatttttttttttttttttagacggagtctcacccttgttgcccaggctggagtgcaacagtgctatctcagctcaccgcaacctccgcctccttggttcaaacattctcctgcctcagcttccggagcagctgggattacatgcatgcgccaccatacctggctaattttgtatttttagtagagatggggtttctccatgttggtcaggctggtctcgaactcctgacctcaggtgatccgcccgcctcagcctcccaaagtgctgggattagaggcgtgagccaccgcgcccggctaagaatttcttaataagaccggaaaagcacaaaccataagggaaaatatttagatttgactgtattaaaatgtgttacttccgtataacaagttgaaaaagcacacaaagacaagccacagactaaatgatattccccatatatataaccattgtttattgttgttgttttttgagacagggtctcactctgtcacccagcctggagtgcagtggcacgatctaggctcactgcaacctctgcctctcaggtttaagtgattctcgtgcttcagcctcccaaagtagctggcactataagcgtccgccaccatgcctggctaatgtttgtatttttagtagaggcggggtttcactgtgttggccaggctgatctcgaactcctggcctcaagtgatccgcccgccttggccttccaaagtgctgggattacaggcgtgagccaccgcgcccagccataaccattgttttgattagtatccaaaacagttcccgggctgggcgaggtggctcacgcctgtaatcccagcactttgggaggccgaggcgggcagatcacgaggtcaggagatcaggactatcctggctaacacggtgaaaccctgtctctactaaaaatacaaaaaattagccgggcgtggtggcgggcgcctgtagtcccagctactcgggaggctgaggcaggagaatggcgtgaacctgagaggcaggggttgcagtgagccgagatcgcgccactgcattccagcctgggtgacagagcaagactccgtctcaaaaaacaaacaaacaaacaaacaaatagttcccaaaatcgaaaaaggcaaacaacccaatagaaaagtaaattaaaaagctggacgttttggctcatgcctgtaatctcagtacttgggagcccaaggccggaggattgcttgagttcaggagttcgagaccagcctgggcaacataatgagatcttgtgtctacaaaaaatgaaaacaaaattagccaggcgtggtggcatgcgcctctagtcccagctacttaggaggctgaggtgggaggatcgcttgagctctggaaatcaaagctgtggtgcagtgacccaaggtggcatcactgcattctagcct

SEQ ID NO: 1864 - DNA, 4001 bp, Homo sapiens
ccatactataagtcatttcctgtgttattgcaaagtcttgtaaaacatttttcatgactatgtaatatgaaatcatacagttgtttcatttctctattactgagtggttttcaaaaataagttttaaagggttttttaaaattaaaaatttaaaaaatctaaatgatgttgcagcaaattcagcttattttagtttattttctttcgatagatcttatgatagatttcatatgatagacttcaaagaatttaatgactattcaaaagatatgattgtatttaggattcttaacctatattaacaaattgctttcaatgtcatataaatatattcttaccagagataggtggcttccaaaaaaaaaaaaaaaagaccatgaaaatatgcacatcaattatttatcaataaaaaaagaagaaccctcattcaataagaaaaatatatttcttggctttttttccctttgcatttcttatgtcaccaggaaggttgatcactgtgtttgctgactctgtgcatgtcctctttgtacaaccctgtgcccctatttaaagtacagacaatatctgacttatgttttttgactttgatttatgattttttgactttgcagtggtggaaaagcaataaacattcagtagaaaccacacttcaagtacacatacaaccattctgttttttatttcagcatagcattcgataaatacatgagacatttaacactttattataaaataagctttgagctagatgattttgcccaactgtagcctaatgtaagtgttctgagcacatttaaggtaagctaggataagctatgacgttcagtagattaggtgtattaaatgtgcttttgacctacaatattttcaatttaggatgggtttatctgtatgtaaccccatcataagtcaaggagtatctgcagtagtgaaaagagcttgtactctgaccttagggagatctaagtttgagcttgtggctgtgtaattttttactattacttcctgtaaccttggattgttgaatctcaattttctatttcctgaaatggagacaaaaataaatacagtcatgtgtgtaaagtacattaaagtatggagtgttgcaaatattagccactcaatgaatgttagagctaattatatcccgttatgaaaaaataaattgcttagtgaattctattctccctacacatgtgcatatagctactacacgaataggcaactggcagctatcaatttcgtccaactgtcaatcagatctgagaattacagatccagttcaatcatcagacagcccgaaactgttacctgaatatttaaataactgcatctgctatagaattcacgaagcaaccctttttcagcaatctcaccactctgacagtttcaaagcctcagaggttaattgattagcctcttagaagtttaattaattgtgcaacacatacacgatcaccaggcaatgaaatctttgaaccaaagtgtttgtgtagaccgtccccattacaatcagatgtgaggtgggctggtataaacaaaggagccgggaaggagaggaaatatcaaggaagccctgagtgacgcatcagagtagagaagagacgagcctgcggaagtactccaacagacaatcctgctttcaatttcactttctctgtgcgacctgagtaagtcgcaaagagatgcctgagaaactgaggacatggataaatgacgtgtggactctgacagaactctggaagggcactggaggaagatccttccgggcagccaagggctgggagctcccctcccacttcccaagtcctccagcccctggcctctccagtctccaaagcccaagaattcttcaggatcgacttatcgaggttttctagctttcctccttctgcctgccttacctgctcaactcagacgtctcaattattcctttggcagccgcaaagcctggaagactgcttgcagcccgagcagtttcctcctgctgcgtcactgagtcagcagggcggagccaagaaaggagtgaggagtgtgggagggaaagcagccacaggctcactctggcaccaggagcaaagcttctacttgcacaccttctggaggaaagcaatagccactttctgtctgctgatgaggaatgtgatgcccggggtcatgtcactcacctctcagtcttgcagcctttcaggtggcagcagccaactgcatccatcactcttgcatcctttctttgtcattgcaaattctggtcttcttggaagaaaggaatggaaagtaaacacatattgagcacctattgtgttccagacacaatgctttacatgcagcatggtcccagttaacccctgacaatcttgttgattatgaaacgcaggctcatagaagctaagtaagcccaaagcccaagccctgtcacctttctcagctcactcaactcacagctctgaggcagtgcggccttctcagaagggtaccggactggcagtctggagacctgatcctacagccagctctgtggctgcttagctgagtgacctcaggcatgtgatttaaccatgtagggcctcagttctctcctataacttggttttgaaggttcctttctgctctacaagttctgttcttgactatcttcctagcaatgagctgtgtactgtgtacttagtgctgtagtggaaagtatttccatccccaaagaatacccagtcttgctggggagacaaagccctgggacttgtgaacaacaagtagtgcatggtcacttgacgaccacctgtgtcacaccatccagacccggggcctctaccaccccttatacaccagggattcccaggcctcgctctctaaccccagcctctctgctgagctttagacctacaaatcttgaatatgtgtcaaatggaaatactcatcttttcctaaatctgcccctcctcccacttattccatctccacagatggcaccatcacccggaggccacccctcatcctcatcccaacaccaagtctcttgctttcatctacaaagggatgaccattcgagtccttgtcatcatttatagcaagaaattgatgacttgcttcctagcccttcatccattgttccaccctgcatcattgacccaccatcattttcaggacaaagttcaaaaatccttaacccattattcatttaattaatacttgttggacaggcgtggtggctcacacctgtaatcccagcactttgggaggccaaggcaggcagatcacctgagttcaggagttcaagaccagcctggccaacatggtgaaaccgcgtctctactaaaaatacaaaaagtagccaggtgtggtgttgtgcacctgtaatcccagctactcgggaggctgaggcaggagaattgctcgaacccgggaggtggaggttgaagtgagccaacatagtaccactacactccagcctggatgacagagcaagactccgtctcaaaaaaaaaaaaaaaacttattgagcactgactatgttaccagtgactattctgcatatctggcatagaatgatttaccacaccagttcctcacagagttcttctaggagcttgcatcttaataggcagaaatagatcataaacagttgaaaaacccaacatatcatgatttcaggttataatacagtccctgcctgtccctactcctcatgggcatcatcagtgctagcctccagttccttgtcacattatgtcatatgcttctacctctatatcttgacctatgctgccttgctaccagaactaatgatattagtaagagtgatgaaaatgtggatgattctgttaataatgacaaacatttacatagctctttaatatggtccaggaactgttctgaacactttatatatgtattaaattatttaatcttatccttatgatgtatatactatttttgtctccgttttgcagataagaaaactgaagcataaagtggttaagtaacttgctctaaggatttga

SEQ ID NO: 1865 - DNA, 4001 bp, Homo sapiens
aggtttcagtggggacacaagggattcgggctgggaaggaagggaatgctgggacttcagacatgaaagctgagttctcaaagaggattagatgtccacctggctgacccgggcgaagggctccaagcagagaggaactggagcaaaacaaagctgtgaacagcctggtgtatttggtaggcctggaatatagaacgtaagagggagaagtcatggaggcttctgtaataccacaatcaagactggaccttactggtatatatgaaatgcccccagaagaattttattcagaaaacgagcatatatatgatcaggtttttctggtgtgatgagacattggtttacacaggaatgagaaaagaaaacactagataatgatgtcatcacatgaaacaacaaaggagcctacccagtcagaaaactaaactcttcaggaagaaattaagcactactactattgaagccctctggaaaagggtgtattcaatatcatctaaaatggaaaaagtacaggaaaggttttcacacatctattgtggattataacatccacatacctattttgagtttaagaggtcttcactcgaattctgcaacacatctgggactactgattattgtacaaaaagcagtacaacgtatttaggagagtctttgatacaaagggagaacacgagtaaccgaaggaatttcccaagccaggtttaaaggtttccaaagttcaagctaatcaagttttcttaagtcagcacgtttaaaaggtgtgtcatatgggtggagcaaaaagaggagggattaaaatttatatacatatatatatatatatatatacacatatatatatatatacacacacacacaagtaactcgatgtcgctagggttaaaatcaccacttggagatccgtctcccaagcagagggaaaacctgccagatccaattaacaaaaagacgagggaggtgggtaagaggacgaccacacatgaaaacataaatggggcgggggggtggtgcttggcaaccacctatccagaacccataatccagttggcggtgcgatgaggaaatcatacgattcagacataaagacaggaaaatgtcactcccaaactccacaagcgaaccaccagacactggccaaggggatgtgatcacatactctgatcccagaactcaagggcagagggtatcatccccacacggtgcccgagggcaggcgaagaatcaaccttactctgagatcagagagcaaatgccctcagatccagccctaaggggtcaatgccgcccaggccaggccttgccgaagccaggggcagagacggccccgaagccccctcaatctccgccagagctgcctctactcgctccccccaacacacaccctcccctacctgatatggcggcggcggctcctgatccggctccgtcccctcgccaaagctagcccggtcggactgagactcgtgaagcagggagatgtcatccgaggtgggggatttgaggcagttccccatcttccggagctggggtgcgtgatctgggggaggagaaagcagcggtggggtcgttcgcacactccgcggtccgcctcggttggcgaggtggggtcgggcgacaggccggggatcaggcggaggcgactccaccgccccacggtgccgccgaggggccgctcatgccagcccccggggttgggggatcaaggctgggccgcgggctccgctggggtcgcggcgttcgcctcctgcgaggcagcgatgggggggggggggcggggagacgaagcacttccccaccccgcccccccgcggggcggcggcggccacggagctgctgggcctaatccaggtcagcgggggggggcgcggccgtcgcggctgcctcagctgctgcctcagctgctgctgcccccgccgacgccggagccacggccgcgggcctcatcctactccgcctcagcgagacggcggcagccagaacgaggccggctcgggcactgcgtcatcgcgccgtgcgtgctctggtcccgcccccggcgccaggaggcgagggcggctccggcggcgcccatccccctctccactagcagctgttctcggtgctgcgtcaatttttgcttctctctgactgcttggctccgtacctggctccgaaaccaatctcccgtctcccgcgcctccccacattcattgctcctgccccgtctagggctcagttcttacctgtgcactgcctgacagtcttctcaccaccctccgccaagcggtctatttatataaacccatatcggaatggatcagtcccatgattaaaatgttaaaagcttcccctttatcccttcacaataaagtcctagctcgttactgaaccatccctgcctgtccaatcacgtccttatccttccacatcacagccagagagattattcttccagttgtatatcagattgttcatttctttccagtcccagcaccaaagtccaagccaccatcatctctcaccttggcttctgcaatagactctcagctgttcctgagttcatcattgcccacatccaattcactgttggcacagttgacagagttatctttttaaaatttaaatcggatcatgtcattctcctgttaaaaccttcagtgtctcctcaaggctgtccttaagacaatccttaaatggtttacaaatctgactccctttcaatctcattagcagcattgtcacctccttcacaaattctaaactagactctctaaaatgcttttcgttatctggaatactattgcctctgcctggggcctttgtccatattgtttctctcacagaaacccacttccctccactcccaacctttctgcttctcatcaggctaatcattattctcaggaatccttctggatgcaacttcatttcccctggggagactctcctgaccctccagtctgggttagtcgcatcctgtgtgctctcagaccctgagcttttctctgtcacagcctgatcaagctgaatcatctgtccctctgtgcaaggctggcacactgcccaaggtagagtatgctctctccttggttgaatgagcagctcaaacaacatatgcaaaagaaggaagcaagaaggatgacagtgctcctgatagacgttcattcaacaggtggatcttgactgcctttcgtttcattcaccatttactgaagttgtgtgtgcgtgtgtataccagaccccacgctaaggactggggaaaaggatgatcatacctggcttgttcctgatagagcccagagaccacctgggaagacaagtaatcaggtgagtcctaagcccacaccctgccacggaccccaaggtttttagaggaactgaaagacagcaattagttcatttgagtgaggaacagaaaggattcttagaggtagggctatattaaactcgaatgggtctgaacactcttactctgcagtccctattctacgaagtcactatcttatttaaatgcactcaaattccacattaaatatcacctttttgatataaaatttttgaaaagactcataattttgggccaggcgtggtggcttacgtctgtaatcccagcaatttgggaggtcaaggcgggtggatcacttgaggtcagggattcgagagtagcctggccaacatggtgaaaccccatctctactaaaaatacaaaaactagccaggtgtgctggtgcacgcctgtagtcccagctactcgggagggtgaggcaggaaaaccgcttgaacctgggaggtggaagttgcagcgcagtgagcccagattgtgccactgcactctagcgtgggcgagggagtgagtaagactcagtctcaaaaaaaaaaggaaggagaaagagagagagagagaagggaggcaggaaggaaggaaagaaggaagggagagaaagagaaagagaaaagagaaagaaaagaaagaaagaaagaaaagaaagaaagaaagaaagaaagaaaaagaaaaagaa

SEQ ID NO: 1866 - DNA, 4001 bp, Homo sapiens
cgagaccagcctggccaacatggtgaaactgcatctctactaaaaacacaaaaattagccagggtgcggtggtcgtgcacctatagtcccagctacccggaggccgaggcaggagactctcttgaacccggcaggtggaggttgcagtcagccgaaatcatgctcctgggtgatagacagaggctgtctcaaaaaaaaaaaaagaaaaaagaaaaacagctaagtagcatttagatgaaactatgactctgaagtagggggtgcggcaagtagagaggaaagaatgtatcataatgccttaaacaaaacttttgagtgagagaagactataaaacaccctttaagcacttattcactggactccatttgtgtttctaagaaataagatatacagactcacttcagaaggttttctcctacactgtatctgagacaccataaatagaaacatacattatgttgccactctatcacaagactgaacctggacacttgtaaggaaaggaacaaccataaagacagttggccaaggacaggattgacattcactctgggggagctcctcgtagtagctacaacccaacccaaaacagtttctgggtttgtgatgctggtgctggctagtatgctgcataaatgttgtttgtttttgtagagaggggtctcactctgttgcccaggctggtctcaaactcctggcctcaagcaatcctcctgcctcgtcctcccaaagcactgggattacagacctaagccaccgcgcctgacctacaaaagtgttttcttcccaaccacagcactgcctctcaaggggctaacactctggcagaaactcgtgaaaaccaatttcacgtcagaggaagcatccccaacattctgtcccggctctttttcttaggtgaagaaagggacagggcggggggcggaacaatgatattaaagacactggcagcatgacaaccaaaataaacgaagttgaaacagtacgtcctgccttcttcctaaagccatttccttcaacagtgataggagtgcagaccgtctgcaagtcattagtacgctgctgtcttcactgtcacaaggaccctggaaaccactgaagagcaaaatcccccttttcgccccacagataccttccaaccccctttctgtgcttccttccctagaaaaaaccgaagagtgacaatcctcagcaatccgctatttcgcttcactgacaagggaggtggcgggggcggtggggggtgaaaagtggaaaagaacacagaggaaggtgagaagacacagtggaagaagtgtggggggaggtcatcgtaggaaaaagaccaggtataaaagaatgcaagaaaattgaggggagagttatcagagggaaacttgctaagaaaaaaaaaaattaaggacacgggaggtaaagaggtgaggtcaggtggagcagcccaggatgaattaagaggtgggcaggaggtacggggccgaggccgtgatgcccagggtttagggccggcggcttagaagtgggcagcaggtattcggcagaccgatgtcgggcgagtcaatgatgtgcagaaagctccagacccagttccgggaaatcggggccaggaatctatgaggttcccaagtatagagaacacagcgctcttaccggtagtttggggctgacctcgcccttgcaaaagtggcagaaaaaccggtgggcggctacagcggcgcccgagtccgccccggccgccgaagcctccgccatttttgccctccgccgcggccgtccgagagggcagccggcccgtccctcgccaggccgctacctcccgagctgcagtcgtcgccgccgccgccgcctcggtgcggcccaccgcttcagagcccgcgtcggtcacgtgagttggccaggcccagaaacgcggcggcgccaacagctaccctgcggcccgcctcccagcaccaaagaggcgcaggaaggagagacaaacggcccgcccgccggctccacaaacagcccctcgctggtcctccagtcttccagcgagaagaaagaaagagcgtccccggaagccgccgaaactctggggtagagtggcacgcgctttttgcttttccgcgtcttcttcggtggcgatccgcgtcctagaaagggcggtgggctccacctcggcctagaaggccagcgggagccgtaggaagccgtcgcgggaagctcagccgaattggagttggagcccccggattgcgctgaccctgaggttagtggaaaatgctgtctgaacgtggcggcactgactggaccaagagaccacgtccgaaacgggaacctgtgtaaaggaagtgtagagctaggagccaagcgccttggaagccctttccgaggatggcaaaggatctgggaatgcttctccaaagatatgtggatggacgaaataggtctctggtgatactgaggcggggtggggacggggaggcaaagacttggcttcttaggaattggaagaaataagtaaacaatgtttggtagcaatttgtaataaggaagtaatcataaaattaactacgtccgtttctgattgtgtcaactttgtcaaggagtagaagtttaagaattgaatactgtcctgcaaacaacgtaacctcatctcctgtttgacacaccctgttgagaagcagtcctttacctcctaaatttctttttcgaaattatcatttcctttatggactgagaataacactgcctgttcactcccaccgagctgtgaacagtgaccttaattcttccaagcagtgaagtgtagaaactaaggtctgtgacagaccgcaaaatcatctcccaatctttaaggaaaatcagaatcacgcataatcccatagagataaatttgatgcatagtcttttcctatgcatacatttttcctttttttttacaataattgaatttttatattttttcagcttgcttctgtcacttaatatattatgagtaattttttttgtttttttttgttttggagacagaatctcgcactgtcgcccgggttggagtgcagtggcgcgatctcggctcactgcaacctctgcctcccggcttcaagcgattctcctgtctcagcctccctagtagctgggattacaggcacccgccaccacgcccagctaatttttttgtgtgtttttagtagagaaggggtttcactatattggccaggctggtctcaaactcctgacctcatgatacgcccacctcggtctcccaaagtgctaggattacaggcctgagccaccgcgccagcctattatgaataattttctacatgaatacgcatcgtactaaataactttaaatgttggtgtagtatgccattgtatgggtatggcatcatttattgttagacgttagattgtttccactaagtcggtattataaagagaactaatgacttcattattattagctttttctttctttggacacaatatccaaaaagaaattgttgtttcaaagatatgcaagatttttaaggctttttgatatgtattgtcaaattgccctccagaaagaatacatgaatttacactcagcagctctgcttccagcgtgaaagactttctattgtaccattttggtgttttttccctagctctcagactccccagtacaatgactcaagcagaaattaagctctgttctttgttgctgcaagagcattttggagagattgtagaaaaaattggagtccatctgataagaaccggcagccagccactaagagtaattgcccatgacacaggaacatcactggatcaggtatgtctaaatgacattcattttctctcatttctttcactaatttatttcacccacctttgaatattgttcttctcaccccagaaaaggaaaaatgaagaaagcctgcccttggagcagaacaatgttatttcggggagaaaaggatgagacttagacatcaacattttgtttctcaaagtgttcctagttcatcacagc

SEQ ID NO: 1867 - DNA, 4001 bp, Homo sapiens
ctcctcccatcctctgctcatctgcactcccacataaacacccggctgaggcctgcccctggcaaccatggaaagtcgtttcccccagccaatgcctcccctgtgttaagaagcagacgtggtggaaagaaggcacgaaaaaagcttgcgactcacagggtgaggtgggaaaagtggggttattggtgaggaccgttgcatttatggggcctcttatctttatgacaaaagcttaactagtacttgagatgcaataacaaagacggtaacatccataaagatctagttctaccgtgtgggactgtgcaatagatgggcagctggccccactgtatgtggactgcagtccttgtaaccccgagatttgctgctaagtcagggcctagtggcacggagtggggaactcctagtgaggatactgggagcaattcccaaaccctgccctctccacccctccccatctctgccagctaaatgtgggactccccctgcagcttcagaaacaccatcccttcacacacattttgtctccccaaccctagggtcaactccatgggagacctaaacaaccaggacacttgccgaggctaggctgggcatgagatgctcagtgttagaggaagcgcagtgggacctccccgtggactccaagctcccaggagggaaaatgtgtaacaaagggaaatgtgaaccaactgctgccccaaacccaaaaaaacaaaggaaaacaagaaaacaaaaccagctacataaattgcaaaaagaatggaattccagttctattctacaatggcatcaatactgcaatactttcatcaagttatataaagaaaaaccaagaacattggaataagaggaacaggagcttcccccatcttgtcatgttcaagtagtttgtgtctgctcccctagccaccaacagttttagctatgctatcccaagggcaagtgcaagcctgtcatccaagcgtgtaattcttgacccaggctggccatctcggttgtggcttgcaagtcccgctggcatgtgatttcccaaaggagccagtcttagtccgtaaccccttaccctgttcattgtggaagtccgggggcccaagggcagaaagggctgcagggatagcctcatcagagggcactcaggcaatggaagagatgtggctgtgtttctgctctctgcagaagagagtcctggaggagggccagcagctgccccgggtgctggggagacagcagaagagggtggacatcagcagggccagggcgatgatgaaggtgagcacccatcgtaagacacccgggtagatgaagggcccgatgaggataatgagcaaggccagcaggagtaggtgcgcggccaggcgccgggctgccacgtggtttgcacttacttcatcctgtccatcctctcccaccaagctggggtgtcctgctgccaagtcagcaggatccaccagcccctgaggacagagcgatacctctgtgcatggctgggccagctgccccaccaccgcctcatggtcgcgcaggctgcagatgaggcccccggggacggcggtgaccttgcggcacagcgggcaggtgatggaccaggtgttgtcctgcacgcacagcaggagcttcaggcagatggcgcagaaggcatgctggcaggccagcagcttgggcaaccggggacagctgtagggctcccggcacaccagacactccaggtcacattctgtggagccagaatgacccccagcaggggccacagcggtggtggttgtggtggctcctgcggagatgggctgggactgttgcagggtcttggtgcaggccattctgggcacagggaccggtgggacactgtcgctcagcacctgggcattggcagagagtgtcagctggcgccgctgggacttggatggaatctgcccctccttttcactctggccaggtgcctgttgacaacagctgtctgacactcctctctcccagagctgcccagcttgtttcttggcttacgtcgtcccttcagttattattatttattttctcaaaacctagggttaatcagtaacttgcgggtctggagactttgaattgcctgataggagggcaaagtgggcaagggtctagtgaatcaggactttcctgttggggccaggtacctggtgggtgcccacagaactgtggctcaagctttaggaggcagcagaatccaactctctcacccccacttcccaggtccctgaaccttttattaattttttttatttaacttttttttttttttttgagacggagtctcgttctctcaggttggagtgcagtggcccgatcttggctcactggcatctacaaatctgcacaataaacagacagccctatgagtcggacataggtggattggtggacactgctttctcagacacaaacttttggatgtcaggatgagtggaaaaaagtttgtttgcacttggagcacatttacaggcaggtggccttggaaagaggaggggagaggtaagaaaagtgagtggaaggaggacaaagcccaacccaacgcagaaaaacaaaaccacatacagcgcacaggtgtttggcacctgctactgtattcatttccttagagccacagctgttgtattcacagttacgggtgtatgaacttcccatcggtgccctgctgcacacttcacatgcctaatcacaggtgtcctgttttgtgctaggcatgctgcgtatccagtagtactaagaacagctgccatttatttgggcctactctaagccaagccctgtgcccggggtccccagcccccatttcccggaaccctgatacagccttgtagggaaggctgggaaacaagggcagggtgtggtcagggtaggctgctggctgcctgccaaggggccttccatggagcaggaccttgtggaatctaccagcgtccaaggtctggttgaatcaatttcattggttcatttggacacaactggccccagccgggtggcgtaggctaagaggactcatgtgagacaggcagatattagtaacacagcagttaggaaaacgtgatttccttactttgccctcaagggcaaatggcggggtggcatgtgcactccctcaaacaaatgtttcattcaggccactctgaactcagaagcccgtgtgaaggatcctttggtgctcatgtcacctgccaagggccacacagagtcctgtgcctctgattcagctctttcccttaccccagtagctggcactgcaggccaccctctgtgtcctggagtcaccagccccaaaggggctccctcccttgtgggatcggtaactcccacctccccactccccctgggccctctatctctgaaatccaatactctcaccatcccatcccatttcttctcaacctgtagctagaccatcagttacctctgtgaaaggaaaataaatcgtggggccccaaaatcactaagccacaagggaaagtcaagctggaaactgcttagggccagcctgcctcccattctattcaaagtcacctctctgctcactgagacaaatgcatatctgattgcctcctttggagatgctaatcagaaactcaaaagaatgtaaccattcttatccacctgtgacctggaagccccttccccacttcaggtcttcctgcctttgcttcaagttgctccaccttttcagatggaaccaatgttcattttacatatgttgattgatgtctcatgtccctctaaaacgtataaaaccaagctgtgctctgtccaccttgggcacatgtcatcaggacctcctgaggctgtgtcacggacatgtgtcctcaaccttggcaaaataaactttctaaattaactgagacctgtctcagatactaaggtatagatacacatctatatcacgttttcccccagatcaagctgaaggtggccttggatctaggcatgttttttcccccatgcctagcattctttccccttttttgggtaacagt

SEQ ID NO: 1868 - DNA, 4001 bp, Homo sapiens
ttgcacttcagcctgggtaatgaagtgagactctgtctcttgggaaaaaaaaaagaagtctgatgctgccatcacctacaggtaaaatgtgaggagaaaaagaggcttccactggctttggctagattctatttgagaaatacaaacacatcctaaaaaaaataccctgaagctcacttaagtccagaggcccctcctccaaccaaccagctgagcagttcagaggcctggcccacttggcctggtggtccctttgtctagagccctgagcccacagtcccctcattccaggctgccccaggtccccccacttgccttccacactgcagctgctgactctgcctggccatgcaggtcccgggcgtcattcaagtcctttctcatgatttccacagaccccttgttctcctgtaaagaaaagaaggtcaccaggggtgggcagaagctctgggtcccccaacccagcccagtactgagggacatcaccccagctgactgcacacagtctgaccatcccagagataacctcgaagcccggttgtctagggcaggaacgcacaggcagtcaaaaggtttcttgggcttcacacctattcagaaggatctgggtgctggggctaaggggactgtctaggtgggtttaggagttctgtgtctgtaagtggccctgttcagtgtgagttcggcctgtaccaaaggtctgcacagcctgccctacaccctgccctgcctgagccggatgggggtcgctctgcccggtggcaggacccccaatgcaggaggagcacccagggacacagtctggctggcttcccctcccctgtattgaagagcaggaccccaggctggctgttgtctcctattctgtgtcccacaaccaacccgccatgggcaaggctccagactcccggacccgctgctgccagactctcagagcgggtttctgaaagatgggagaggggacagggggtgcaggcgagggctgggtggcccggggagcagacgagaaggtgggccaggcctgtggacacagtggaatacagaggggcaagaggcgtgatgtctcccccaagggaagagtgagtggaggagtcaatctgtaggaactagagggggtctatgagggcgagacagggcacagctagtgatgggaccacaaagatgggcgctggtgggggaaggacttcgtagaaggtagggggtggggagataaggcaccgcccagcaggggacaccaagacggggaaggggaccagactccgaagagacgcaggaaatatggggaggcaagccgcaggagggaggggcccagcacacgctggagaggggacccgtggcggtgaggggagggggacaatccggggacggggacaatccggggacaggaacagtggagacgggaagggcccagggctcagggggaccggggcgggggcggagaggcgcagggcaccgtccggggtggggcacgggaccccgcggcgcgcaccttgccgcgcagcgccttcctccagcgcggttcccactcgggcggctcggggcccgcagccatacggcaggcggcgcagagcgggccggcgtcggcgcggcacagcagctgcagcgcggcctcgctggccgggccgtcgcgcgcgggcgccgcggccgcctcctcgagcgccagaaggcggcggctgagcgggggcctgccgggctccacggcgcgctgccagcagtcgtcggcgcactcggggcacgggaagggcccgtcctcctcggcccagaagcgcaccacgcacgcccgacagaagcggtggccgcagtcggcgcgcaccggttcccggggcgcgcgctggcacagggcgcaggcggcctcggcggggcccgcagggagcgccagggctgcgggcggcggggccggcaagggcgcaggagcggctggggagggccggagacctagacggccggcgaccggacggagaccagcaacaggacgaagacgccaacgccggggacgcgcacggggcggggtcggggacgcgcacggggcggggtccggaccgcggagcgctctgccgataagatcctggcagcggtgtgctgcagccggaggtcctggccgcgctgcgctccacagacaagatcctggcagcagtgtactgcatccttaggtcctggccgcggtgggcttctccgcctggatcctagcggcggtgcgctcctccgccttgattttggcaactatgctctccacctgcaaggtcctggcagcggcgcacgtcaccgcgcaagtcctggcagctgcgcgcttcactctactgcctgcggaccggcccaagtcgtatcctgaaatcttactgggctgtcccttcctacttcagtaactcctgcgaaagagggaaacaaagttttatttttacttgaaggttccatttttaaaaggttgtttttgtaagctgctaggatctgagctgcgcgtacccccgcggtagctcgcccgcgtgggctggggacggggcgggaaatggcctgcgtgggcctcctccgctgctctcatcctgcacggacccgccctgcatgggcacgccctgcgtgcacgggcctgcccgcgtggacgtgccctgcgtgcacccttccttcagggacccgcccttgaacggccctccggacgtggacactcgtatacgcccaccctgcgtgggatctccctgcgtggacccatcccgctgagcctcttctcgcgcagcctccctctggccccctgggaagctaccctggttgtccgctgtctcctggctggggggagctctcattgattctgtgatgatgcatgacagaagagcatttgttagctttgctttgcttttctttcttttttgagacagcctcgctctgttgccaggcaggcttgagtgcagtggcgcgatctcggctcactgcaacctccgcgtcccgggttcaagcgattctcctgcctcagccccccgagtagccggtattgcaggcgcctgccacgacgcccggctaatttttgtatttttagtacagacggggtttcaccatgttggccaggctggcctcgaactcctgacctcgtaatccacccgcctctgcctcccaaagtgctgggattacaggcgtgagccactacacccggccgttagcttttctttaaaaaataaatttaaaggaaagaaataagcctttgggaagagcaatcttgtgtttttgttttttaattattttgaaaacaagcaagcatggttaaaataagattgtgcaagttttgcattttaaaaaattaatctgggccgggcgccgtggctcacgtctctaatcccagcactttgcgaggccgaggcgagcggatcacaaggtcaagatatgagaccatcctggctcatggtgaaaccccgtctctactaaaaatacacaaattagccgggcgtggtggcgcatgcctgtaatcccagctactcaggaggctgaggcaggagaatcacttgaaccagggagtcggaggttgcggtgagccaagatcgtgccactgcactctagcctggcgacagagcgagactctgtcttaaaaaacaaaaacaaaaaaaaatttttataaatctgtattccaagcaagcgcaggatctaatgaggtatttttgtctttgtgaagattttttaaatcgacttggaaatgcactagatgcccgtgggaaacatgaatagtaaaccgaggttatttctgtgtagtaaagattagaggcttccagccgagccttgctgatattgttgagtcaactaggaacttgctggagagaaaagtaaaaaatataaaaaatgagcaaacttcataatgaactaatcttgtgaatgagaaaatatcaaaaattataattaaaggcaaatagccaaattaggaacattgtaaccacaaatatacaaagagtttataaaattaggtaaggaaaagcatgatggaaaatacaccttgtcatgggatttttcaaatcacaaaaaaaaaagca

SEQ ID NO: 1869 - DNA, 4001 bp, Homo sapiens
gactcccaactacttaaatgagcccctcttcctgcgtgcaaccccttcatgggatatactgacagtaacaattagacttctaaaggcggggagggcgaggaaggtctccactgaatgcttcagatagcaaaatctggtgtattatgtctctgcagatattgcatattttaatttactgccctttaaaattcagcctacatggtgcattaaaaagactgtcatcaagaactcaagatcaaaggggttcagaaacacaatttctcctatcacaccaacctctgggcattcttctcagtgcccccattgagactctggacaaagaacatatctgtctacccctcaccctacccaaggcagcaaggtaagaacgacagagtgcctcccgatagcgtggcacagaacacatagtgctcagggtacccgagagcctattccccagtcacctccatcccaactttcagcggtggttgtcagggagaacacgccttcttctgcaatgctaagtctgtccctagccaagtggacacacccctccgacgcgctgccccctcagaatattctcattccctccttggccaaatatcccctccccactctcattaagagatactccccaccttggccgggagcggtggctcacgcctgtaatcccagcactttgggaggccgaggcaggaggatcacctgaggtcaggagttcgagaccagcctagccaacatggtgaaaccccatctctactaaaaatacaaagaaattagccgggtgtggtggcgggcgcctgtaatcccagctactcgggaggctgaggcaggagaatcgcttgaacctgagaggcggaggttgcagtgagccgagatcgcgccattgcactccagcctgggcggcagggcgagactccgtctccaaaaaaaaaaagaaaaaaaaaaaaagatactgtcctcacctccggacagagggcattcccccaacaaaaaaaccgcctctccctgtctcctaacttggacagctcccttcccctcaccgaatgcttagcagccacctcgagccctggggcagggggcggggtgtcgggtgcgttcacaccactagtctgggcttgcctgatggttaccaccccgccgaagctgccgccttgcgggtttccctgcttgggacacccacgcggggtccctgctgcccccagccacgcccctcggctgcagcccgccgccacccgcgccacgcccccgcgctcacccgcagtccggggccgggcaccagcggcagtcggggtccgaggctaggtagcggcgcagcatgaactcctcgtacttgtgcataagcggcgggtcggcgagcagcaagcggatgtcgtgcgggttgagtcgctcgctgcactcggggcagctgatgggcaccctgctctcgcttatctccaggcgcaggtagtggcggaggcagtcccggcacgagcggtgcggacagctgaggaggcgcggggcccgctcaggcggcagccgcaccaggcacagcggacactccacctcctccgcgcccgggccaccgccctccgccgcctcctcatcgtcgaacccaggctccgccgccgccgccgcggcctccgcctcggcctcggcggccggctcggcgggcagcgcctcgggcggcgggccctgggccgcggcaggggccggggcgggcggcggctgcgcagccgggggcggcggctcggcctgcggcttggcccgggcgcggcggccgcgggccgaggcagagaagacgctgtgcaaggtgaggcgccggcgccggccgccgctgcggcacttagggtcgggtgcggccgcatgtagcgatgtggagcgcggcgactcggagtccttctcggagcccatggccggcagaggccgaggagccaggggcgcccagcgccgccacagctcccgcctcagcgcccctcagccagcgcccggccgccgccgacgccgccaccaccgcctcaaccgccctcccggcgatagaagccgagcggcaacgacgaagtgattataaagcctccgccccgcgcgccgctgccctgcgcaggcgcttcgctcaaacacctcacaacccttgcgccccggtctaggagtgcgctgggcagggccgagcggggtggggccgagcgagctggggcggagctccgcctcctgccggtcaggtggttccagggccgccatgttgcggagactctcagagatcctagcccgctgctctccctggtctccgcctccaattccatcaccatgacacccaaggtggactttttggtttgccgttcctcacaggttgattgccacttccagtaaatgatggttcagttacattatttataaaaagcaggcaggggttgatcagatggtgactcccaactggttcaccttccaacatttctgtttattaagcagacggcataaattaataaagaatatattcattcactgagcttctacaaagtgcgaggcattagaaaataaaacagacaaggtcccctattgcaagggacttccagaataaagtccaaatttcttagtctagcattcagtgttctctatgtatttaataaaccctatgtatataatagtctatttctaggctcacttaccattctatcctcctggtatcttgcttacttaccaaacttgtggaaggagacccagcgttttcttgcctggcagtgcctttgcctttctttttctagttccccattcctctgactgggggaggatctggacccttaggcttcctagtgggaggcaggcaaacagcttcaacaacaggaatgtatcaggattacattcaattgcaaataacaaaagaaaaaaatagcttacgattgaaatttatttattttttttcctgagacggttttgctctgtcacccaggttggagtgcagtggcgtgatcacagctcactgaagcctcaacctcccaagcttaagcgatcctcccaccccaacctctggagtagctgggagcacaggtgcgccaccaggcctgcctattatttttatttttttcatggagatgaaatctccctgtgttgctcaggctggtctcgagctcctgggctcaagcgatcctcctgccttggcctctcaaagtgctgggattacaggcatgagccgctgcacctagccagaaatttctctctttccatgaaatataagtccaaaagtaggcagttcagggctgttcagccatcctcagtatttggcttccagtgttaaggtcacctcactatggtccatattccaaacagtgggaaggaaaaagggaagaaagatgcatcctcttccttttaagaagactgccttggggctgggcgcggaggctcacgcctgtaatcccagcactttgggaggcccaggctggcggatcacgaggtcaggagatggagaccatcctggctaacacagtgaaatcccgtctctactaaaaatataaaaaattagccgggcgtggtggcgggcgcctgtaatcccagcaactcgagaggctgaggcaggagaatggcgtgaacccaggaggcggaggttgcagtgagccgagatcgcgccgctgcactccatcctgggcgacagagcgagactctgtctcaaaaaaaaaaaaaaaagaaaaagaaaaagaaagaaagaaaaaaggactgcctcgaaagtcccgcacatttttgccaaaacatactcactcacatggccatactcagctgcaagggagcctgggaaacattctcttaactgggtacaatgtgcccagctaacaatgagtgctctgttattaataaggaatggtaagatgggccaggagctgtggctcgcacctgtaattacaacactttgggagacctaggctggtgaatctcttaagcccaggagtttgagaccagcttgagcaacatggcaaaaccccatctctacaaaaaatacaaaaattatctgggtgtgatggagtgtgcctgtagtccccgctacttgggagactgag

SEQ ID NO: 1870 - DNA, 4001 bp, Homo sapiens
tatttctatccattcaaacctgggagcttcacacaggcagagaaaaactccaaattcccagtattttgaaagtctgcatggtctacattatgttagtgattgtaactggaaatttttctatgcaacacactttaggacaactagcttatttttcaaatactcaaacggattggcctgactcgggcaatttttcttcgtaaatctgcctctactataattaacctcaaatgtggatgccacaaggatacctgaggaaaataactacaatccttacaaaaagtgagggaccatatttgctgtgctacccctagaaaaaggagtcacctataactacctattattttgctaaaaagtagtttaagagtacaatcaagatttttaaagatacttgttgattgtgaaaagtagaaatttcaggggaaaaagggaataaccaagagtcatattgctgctatttaaatactttataaatccaaggatcaaatttcactataagaagcaaactctcacacccacctcagttattagaatattcaacaactgcacttaatacaaaacagatagattagctaccaattagactaagtattccagctgatcatcttggaattaccaaaagtagattatgtaatgcaaatcgctcgtacattcgttttaaacatatcctcggtttagaacactgaaaccatgccttaatttttttaattgaaaaacagcgtattactaaaatactgagtgcatatgtatatccttttcacggcacttcaaagaaacctgacatcttcaaatcattttacaatgtaaagttacattctctaaaacttccgacagcctcgaaaaagatacccaaaggggcttcaaatagatgagtctataattgatcttagcgggcaaataactggaatgaacctcaaagtttgagatcaatttttactaacaccatctctgaaagcaagaaggagacttctgtagaaggtaaacgattctgaccagcaggacgtgggctcccggcaaaagtgggtactagcatctcagcgtaaacgacacggttcaaaacgcgaatcttcccgcagaaactaaccaagacaccccctccccccacgactcctcctgggtaagctcacggttttagaaagcagcaacagatactccagagcaggaggcggcactccaggaatgtgtgaagctgaaggggtctccccgaggaaccccgaggtcgaggagctcctctacactggaaccccgactccgaccccccagaaggaaggagcgatatctgcacaaagtgccccctaccccacccccacgatgcagacacacatccctagctgcgaggcgaaagcccagagaaaaaactcgcattccactccgtccgcctccggagtagggctgcagagaggctggggcccccgcccccggaggcgaggggaccgcgccgcagcgccggcctccgcgcagaggaaagggcagcgaaaggctcgcggcgaaggaaggaatcccggcgcttcgctgactgggtcctccgcaaaccagctcccttccctcccacgaccctcgaagacacgggaacaatgagaacccgcttcacccgccgtctccgccgcgagagcggccgggggcggcggcggcgccatgtcccttcacacccccgcggacacacaccccccccacactccggggcccccgtcagtcgcctgcaacgctgccgagtagacgcgtgtcccggcccgctgcttccgcgtccttcgcctccccgcccgccccactcaccggctcctgccccagcccagggctccgctggccgcggccggagcaagactctggtatcagctgccgcggacgccggcgccgccgcacaatatggcgagcctcagcttccgcaatggagctcgggaaatacaacaggggccgctcaatattcatgagagactgaggggaagccggctcggccggcgctgcggggagggcgggaaggagcgagcgagcgaggggcggaggcgcgggacgaggacgtgcacggcgcggggaggcccgcggcgcgagggagggtgcgccgccgcgtgttggcctggagaacccgcgccaccgccccgccctgggctggccggccacgcccccccggcgcccaccgcggtccgacgtagcccccgggcaacgcccggatgacggcgcagccacctcgtgctcaaccttctgcttgggttcttctgccctggcttcggcccaccctttacaccttcctggccggcttctggggtttgggctcagacttctttctcatgagttcgtcctcttaaacctgtcccacccggcggaaatcctcatcaggctttggtttgcagaacttcacatgaacttcggcacccttccgctctcgtacaacaaacatacacttttcatccttgcaggataaaactgcaagtgtaattgctcctgggaaaatgaccttccactctaaacttagcttaacattctgattgtggtcatcagctcttactatttaccttgctgctgctttattcctacctccttggccccttccagtgttaccttctgaacttgaggatttacgaagtaatagattaatagatgtaatcattacctaaaacacagccagttagtctccagtaaattatccgacatttaatgcatataaattatgagctgaagaagtaacgaagaattgaaagttccctgatctctatatgtactattgttgagatgtcatgttctcttgagaagataaccagcaataccagaccgtaaatctgaaggcatagaggcataaaccaatggactgcagtgggaattgggcaaactaggttcatagcctccaatgtgtgtctatgtgacttacgtagattgcgtagctcctctgcacttcattttcttcgtctgcgagatgagagaattgtattgaatcctaggtcctttccagttctttaacgctctgaaactctctataagcaattccaaataaatgacatgaatttacataggaatttggaaaagaaaaatatcaattccagctggtgtgtttggggatgatttcctgaggagccgggatttaagatggcctttgacgccttggatgggtggaaagaaaaaggacaggtgttaaatacagcacattatatatgctacctaacaatccatcaaagaaaacaagcattattctttttcagtggcttgaaagcttttgcctactatctataactttaaataacaagtgacagttatctgactctacaagcccttcaaggttaaactcttcctccaatgtggggggagaaaaaaaggctgggtgtggtagctcacgcctgtaatctcagcactttgggagcccaaggccaccggatcacttgagatcaggagttcgagatcagcctggccaatatggtgaaactgtctttactaaaaatacaaaaaaaagttagccaggtgtcgtggcacgcgcctgcagtcccagctactcgggaggctgaggcaggagaatcgcttgaacctgggaagcagaggttgcagtgagccgagatcgcgccatgacactccagcctgggtgtctcggcgagactgcgtctcaaaacaaaacaaaacaacaacaacaacaaaatcaaaataatcagggaagctctgcttctcccttcttgtgaaagtccactttctagaaacagtgcagttgcagaagcatctcccttcttccttcatgacgagtgcatgtgtagttcaattaaaggaagacaggtgttcataatttagaacttttgctctaattaaaatgcctttgaaaatcatgatgtgtggttagattaagcaattcaattgatgttgagaaaagtgatgatttgtagaaagcgcaggaactttatggatgaaagttaaatatagtgcttaaaaaagactcacaggagaattagtggaaaaacggaaaacttatgggatatctggattaaatgtgattaaaaagctagacctcaggctaacatccttaatatgaaaaa

SEQ ID NO: 1871 - DNA, 4001 bp, Homo sapiens
cctgcagccctggtatggacgcatgcaatgatggacataacaggccctacctgcagtccctacctcctgctaatcctctctgtacgtctgggtcacacattgctcagcacttgtccagaacgctggagcttttgccccagtcgggccgtcctcctgggattcccgatacattttctggcctccgcaggccagagtcccctgtgccttttacagcccagagggaacagcatgctgtccccacctcccctgggctgtagctgcttctatgccacttgggtagcagaggcccttcagggtcggcccaggcctgcaaactggactgcccctcctgtgcaggtccacaactccaccctgaattggggaccagtgagctctccccagatcgaatggccttagcctctgccactgtctggacactggctcaagtcccttgttctggacctcagtctccccaccggtataatggggttcacatttggggccaaggtgccctagggaggtgctggagaatccactgccaggtcgtcctctgaagacatgctgagtgcatgtgcaagcattggggactgtgcaaccgggtaccctctgctcctcacccacccgccctgccgcccctgcctgctcgctgcactccaggtcacagttggcacagcgcaccgcctccacgccatcccctgagctgtccaccaggaactgcagcagccggtccaccggcgggagcccgctgggacccttcagcaccgtctggtgtctgcagagaagcccaggccccgagattctgataccccttccccagggctccccacccccacccctcacattccaggctggagctaaaaatagctgtgttgggaggtggggtgcaccacagctctggggtctgctataaatatcacagccagcactcaccctgccctggtccctacccttgcccagtcctgggcactcctgcagacagtggggttggtcccctagtatcaaaagcagaagctgctcctcgacatcttctcacggcattgggcaaatcagagccactcctgggttccttgagcccacataactgaaactgtggttttgtggacctaagacttctaggacccccaagcgagtaaccgggagcgtcctgaccagtgctggagccccgcccttaccctctgacttttgatgggaggtcttgggccagtaactgcaatctccaggcttcagttaagctgatctataaaatggaccgaagcctgcaacttctggcggggagagctaaggaccgggtgcagtatctcccagtcgttctgcctgaagttggagccttactctcctggcacctgggtcccagctcgggcagagccaaccttgggcccgggggatggggtctggggggttttggggaactttgggacacttactggcacagcgggcaggtgaggcggccgtcggtcgcgcggccacgcaggcagccggcacagaagtcgtggaaacagtccagaagacacgggcgctcgtactgcacgtggcacagcgggcacaccagcgggtggatgctcggggcatccagggagctcgggccctccaggggcccgaagatagctcccgacatctgcagcgacagcgcaagcgggcggctggggcacgcacggagccccgcttgagctcccgcggcccctctgcccgggcgcccgcgccctccctatcgcgcctggacccgactgggcgtccagaggtcatggagtggggagccgctagggcccaggttagggctggggcctggagctccccggcgcagggagaacaggcagtgaggactggcgaggggcggggccttgtacctacccgctgggccgctttgctgggagctaccggtcctccgagcctctctcccgccgtccagcgctcttagtgcggctccgggccgcgctctgagacaccgcgcggtcgctctgccgaggagtagccggccctggaagttcaggcccgcaccgggcgatggttcccactctgcgcggggcctccctctgccgtggcctctcctacctctcctcactcccaccctcggaattccccgccgggtgtcctctgggtgacccgcaggcgacgcctcttccggcatccaccttccccagggtggctgctgccttgaggcgcggcggggccgaaccgacctccgcgctcgccatctgctttgcgcactggttccggcccggccactccacctccagcccgcggggaggagaggccaggacgccaaggctccagggacggtgccaggcaagggtgcaaggatcggactggcccctgcccggcatgacagagtccggagccccaagaccagagcgccgcgcagagcggggccggaggaccttggctgcggggtcttcaagggtaggccgggcgcggtggctcacgcctgtaatctcggcactctgggaggccgaggcgggcagatagcttgaggtcaggagttcgagaccagcctggccaacatggcgaaaccctgtctctactaaaaatgcaaaaattagccaggcatggtggcgcccttcgggaggctgaggcagaactgcttgaacccgggaggcggaggttgcagtgagccgagatcgcgccactgcactccagcctgggctacagagccagactgtcttaaaaaaaaaaaagagtccaaaccccaccccctacccccgctaatccccactcttccatcccatttgggtctgaacaggtcatcgccgcctcatttcctcggcggccaattgggggcgccagagagcagcggacgcccctccaccgactttccagcgcttgggaggcggagtgagacgccctgtaatcccagccctgcctttcgctggttgtgagctcttggccatgttactgacctctcagagcctcagcgctgggttaaaatagaactggtgtcctgataatgggtgaggccccagtggaataacgcacgtgaaatacacatactgggcgtccacttaattaaggccctatcctcattgcctgccaagttcccaaaagagggatgggtttgggtgggaggttgagaggggaggttcccggcctttccagcagtgccccctctgccgtctgggcctggcagatgcgtgttgatcccagcgttttctccagcgtgcgctcgcttgctaggtcgacgtgatcagtgagctttctccgcccgtgttctcctgagtgtcctgagagcagcccgtttctgcccctcttgcgattacaaagtcaagcccagagcctgacccacagtagtgctcaataaaggcttagaaaaagctcggagatatttgagctgttttcgttttgttttgtttaagacaggatctcactctgtcgccgcgtgatcatatctaactgcagccttggcttccttccacctcagcctcccaagtagctgggactacaaccacgcaccaccatgcccggctaattttttgtatttttagtagagacggggtttcaccatgttgaccaggctggtctcgaactcctgacctcaggtgatccacccaccttggcctcccaaagtgctgggattacaggtgtgagccactgaacccagccttttttttttttttttttttgtatttttagtagaaaaataaaaagtacaatgtgctgcacacatcgggggttttgctgtgttacccaggctggtctccaactcctgggctcaagcattctgcctgccttggccttccaaagttgctgggattacagacgtgagccgccttgcctggccttgagctgggttttgaaggatgcgtaggagtaggagtttgctaggagaaggaagtgaattctagagagaaactagctgttcttttgaggactgtccctagccctggttcttttttttttttttgagactgagtctcattctgtcacccaggctggagtgcagtggcgcaatctcggctcactgcaagctccgcctcctgggttcacgccattctcctgcctcagcctcccgagtagctgggactacaggt

SEQ ID NO: 1872 - DNA, 4001 bp, Homo sapiens
tttcctttctctcccctttgcccctcaagccgagtccggagcggaggcgagaggcaagatgtggctgctgggcgtcgtgggcagcgagtgcggtgctctccccctcggcggctcccgggccagtgggccggcgcagaccccagacgacccgggccggccaggtagggctgtgcccccacacctatggcccgggccccatgcacccacccagtgcgacgcgcgcctggctcagggccggaacacgggctctccgctggagctgcatccacgacccgagaatgcagggtgtgcttaacgggaagcgagagctttccccctgcctcctggctgccctagtccccgctacttcgggactcctgcgcgccctcgccagctggggtcgacctgggccgcgagctctcggagaggctcctggactgggggatgaaccgggcatcccctcggatggcctcaccaccgtgggcggcctcgcccggggggccacacggaagctctccgcccaagtttgttgtgccctggaagaaaaggctttctcttacaaagcacaaaggcgaaacgcccaggccgagccctgaaaagccccgggttggggggcgggggtggggtgggggaggccggaggctccggagtgcggtggcggggctgggttccgggcagagaaggtcgctcggcccgggctgacaagcgcggcggcagtggccgcaggaccgcagcgaccggcgtgctcactgaaaagttttgttcttaagtcagaagagaaattgttactcagtttaaggcaggtctaagataaaaataaaactacaagtagagtagtcaagtagccctcgtctccacgatcgtcctcccgccttgctcagtagaaccgctgggagagggggtcccgaccccgaaaatcccgggagatcccacgtgtcgggctactctacggccaggccggtccagcccagaggagtggggagtttaccggtggcgtttagaacggtccgcctctatgctagcacctgcctccttcctgcccgcagaggatccatccatcctaccccacctccctccctccacacccttcacacccgcccccgctaggaaaaagtcagccgagcacccggggtccagggctaaacagccactccccgggtatcccgcggagccggctgtgtgtggggtggaggctgtcggggtagtttctcattcggctcgccccttctccatccgcccgccgcctcgggctccccactgagtaccacccagccctggcctcgccggaaatcaacgcggggtacataggggagcccggaaatcaccggggggtgcaccagagagcccggcgagaaggcattctcgatatcgacccgaacaaagtgggaatggggcttattaagagacggagaaaagaagtcctgctcccttcccttgcagtgccctcaccctcccaacttgtccaattcccgcgtctggtccctcccccttgcacctccccccctccccaaataaaacacattaaggaaaactcaagacggaaagtttgagcgaggcagcgcacggagcgcgcagggcgccgatgccgagaggctccgtcgcgatgatccaagacgcgccagtccgagtcccagtccctgcccccgtccagagggaaccgcccgaatccctaggaaacggacccggaaagttagccaggttcctgaacaagccggccgccctcgcacccacccctcttgggtacgcacacacgtccacacccctttctgatctccatacttgccgtggaaattccttgggagaacggtcgcacttttcaggacacggagggaagcaggcggagagtgtggtgcatgaaaagtcccgggttcgcagagccggcggaggcagcggcggcggcggcggcggcagcggcagcagcagcagcagcagtaggcggctggccccgggtttgtgttcgcgagctgcctgggattgcatgtacagatcaagagactcagttggcgtgagagaaggagcagtgctgcctctcagcgctggatctaatcagtgaatgagcctccactctcccagggactcggagacacacacacgcgcgcacacacacacgcacgcacacattctctcacactcacacacatacaggcactctgagcactgaatacattagggcactaagggactctgggaaatgaagtccagacccagggcactcctggagaacagacctgctggccctcaccaaagagcttggaagtcttggggtcgcgagccattgtgaactaaagagagcgttggcttttgtttacatccctcctcccccacccgcaaaggtctcagtgaatggtttcgtgcttgttgttcttcctttcctgaaccaaaagggaccaagagtaaatgggcaaagcttgaagactgacatccactgctgcttaaatgacccccaaatcctgggtccctcaaaatctctgtcttttcccagaaaaatcttacctgctgctttgttcctggaatgcttctctgggtctttgactataataataaataataaatgaatattaataaaactgtaacttttggaggaggtgaaggcctagtatagcatccagatgtgagaataaaattttttattggtgttttattgatgtttatattacagttcatttcagatcatttcatatcatcctataattcatcaaacacaaagataaacaggggaaatggatagagaactaacattcctgagtgctttctaggagcccggttatgagactaaatgcctttacataatttcatttactcctaagattaattctggagataataatattaccactagtttatagaagaggaaactggggttgaaagggttttgtaatttgcccatgaaaacgtggttaacaagtcttggatagcaggtagttctagttctgaaagcaaagttcaaccaaaatcaaatcctggtttaagaagtcattcctggccgggcgcggtggctcacgcctgcaatgccaacactttgggaggccgaggcgggcggaacaagaggtcaggagttcaagaccagcctgacaaacatggtgaaaccctgtctctactaaaaatacaaaaagtagccgggcgtggtggcatgcgcctgtaatcccagctactcaggaggccaaggcaggagaatcgcttgaacccgggaggcggaagttgcagtgagccgagatcacaccattgcactccagcctgggtgacaaaaaaaaaaaaaaaaaaaaaagtcattcttttgttttgtagttaagtgtctaaaacctcagatttctcatctggaaaaaaaaaagggagggtggggagaaatggagtacacactgataatccactttacagagaaccacataggattataaattgtctaaaaagaatgagactcaaaatctcattcttgctattatttcattgtcctttttacttatgtttaacattaaggtagcatctaaatattaagtatgtttatgtatatgtgtgctgttggtattttaaaattttaattggcaactctaaataaattgttaatttgatcacttagagttctacatttacaactatttctataattcgtgatatcaggattatttgttgaggaactttatttttatttatttattttttttgacatggaatctcactctctcgcccaggctggagtgcagtggtgtgatcttggcttactgcaacctccgccccgagttcaagcgattctcctacctcagcctcccaagtagctgggattacaggcatgcccctccatgcccaaataatttttagtagaaatacggtttcaccatgttggccaggctggtctcaaactcctgaccccaagtgatccgcttgtctcggtctcccaaagtgctgggattacaggggtgagccaccacgcctggcctgttgaggaacttctaatccatgtttaatcattcattcatacaccagcatttattatgttaggctctattctttccactaaattattattt

SEQ ID NO: 1873 - DNA, 4001 bp, Homo sapiens
gctgagcagccgccagccgggccaggcactccaggcagaagacgtgggtgcaggagagctccttgggtgtcttgaagatgttgtcatagcctgagaaacagatggagcactccaggggggaggccaccctctccgagccaggggtgccaggggacctggggctgccggccgagctgggggacctgggcatcgaggctatggagctgctccggcgagggggtggcacagccgtgtgccacacctgctggcctgacgacatgtctctgagctgtgggacagggactgtggtaagcaatcaccggccgcccctttctggtggtgttttatctctccctcccctctctcgccccagagatcccagggaaggactctgtttcctgcgcgccactccagaaagttcctccggtgcccctggaggtcattctgccccacgtgcaatcctgtcctctccaccccatcacatggctgcaccggggtgagcctcccacagggccccaggcctgctccgggaatgcaggccgtgtgtaggggggtctcactgaccgctcggcagacacctcctgttggccctgccccacctggctggccctgctgcccgggcagaaataatggtgaggatgacaatagccacagtcgtcactgtttatgtcggagctctgcaaggctgggcccacatcacgggactcacacaacgccacagtgtggaaaaggccgcccagagcatgggtgactcggccagggccaccccaagggagctggcgggccctggaccctggcagatacggctctcaggcaggccagggactccaagtcaagtgaagtgagtttgaactcagatcccaggatgggtgcctggcttgggcggtgcaggcctgatttgtaggcagctatgtgagggtggggtgtgggggtctctgggtctggggaccgggctgagccccgggggctttgggacgacagggagggcccaggcaggggcaggggtcagtgcccgaggaaggtgcacgtcaggcacgacctgcggcctgcggggccggcttgtctagctgctgagggtctgatgtgcacagtgtgggggtgggacttggataagcccagccattccctctgggccagcccactgcctcatggtcaggtgatggtcagggcaccctcagccgcccactgagtgggtgtttcttctccctgacccaatcccacttcatggcagggaccctgggggacggacactgggggatgctgctctgcccctgggcatggctcaggtgggcatctcagctgacctgggaccctgctccacctcccgcccctcccctgcacccaggatccgctgcagggagccacaggggtcccacctggagggaagtgggcaagggtgacagtgagactcaagggcctggccgtgcgtccccgtggggcccaggaggctgccccagaagtgactcctggcactgccccgccccacccctgacttgccagtgagtcccagacaggctggcgggatgacacaggtcactgtgaccacctgagtcacacgccgtcactgtgaggccgtgagtgccccaggcaccgggacctggggactgtgctctgcggcctgtgtaccccacagaaccggttccttggcacgaggccccacccctccacgatggtgccccaccctgagcctgtgcaggtaaggggtgaacacgggctgagctggccttacctggtggccgggggtcagcgggcctgggcgtggtcctcctcgccggccacggttgggctccaaggccctgggctgccctgccgtggcagtgtctgcttcctcttctccgggcccggcccggcctgtgcttcacccagcaggtatccctccccggggccggccaccagcagctgtcccggtggcactggtctggcaggtgtggcttctgctctgtccaagacaggcggggacacaaggaatgcgtgcgccgtcacccgcacagagctctggtctgaggcaggtgtgagttgctgggtgtgggctcccaagcaggtctatttataccctatgggccaagggtgtggccgcaagcctcagggattggctggcttcatcctctccttggcgggccaggcagctggagggcagggagggaggggtgagggtcggagccgggtaggggtcagcacagccgctgcagcctgggcaggtctgggctggggtgtgtgcttggacaaagccctctctccctatagccccaggaggctggagcacctgctggaagctgctcaccgcagttccaggtccctgtggcccctgagctcctgggtgggcctcctagcaggggccctccccgagccccccacaacctatgcccagcctgcccctgccctttgctcactgctgcctgccctcacagcccattcctgccacttccctgcccacacccacccatgtgctcacctgcctcatccatacacatacgtggctgctctcacacatgggccatgtgttcacacgctctatgcccccgtgtccacaggctctcacacacgtgccgtgtccggaagctcacatatgccatgtccacactcacacacgccgtgtccacactcacacgccgtgtccacactctcacacacatgccatgtccacatgctctcacacacgtgccctgtgtccacacacacacacatgccatgtccacatgccctagcagactacaggactggtctgtgcaaagaccagggctggagctggttgagagtctgggggctgaggctggcagggctgggatggaggatgtgtgggtctcagaggagcagccagtggcatgggctgccccgtcccccgcacaccccgctgtgggcccgagggcctggtgtagagctgcacccccaggctgtccagctgccagctccccacctcactgaggcgtctctctcccagcccagtggacctcatgcaaggggaggtccgacccggctgccacagccccatccccgccatgaggcctgggccggacctgagctgggactccacacaccagcctgggggggtgccacactgggtggggctgggagtgagggacccaccctagtgggagagctggccgggccaccccacagactgccctcaggcaactcccatgcaggtgcccgccgacccctcagtagggacccagaggctcccccagggctgccgcgggcatcctggagcccaagggatgctgggaagtgggaaccaggactgcagaggccagggggcaacaccccgaggaggagcacagggacttgggctcaggaagggccggacccctgccagttccatgaggactctcagtcgggggttggggggacccctgccagttccatgaggactctcagtcaggggttggggggacccctgccagttccatgaggactctcagtcgggggttaggggggttcagagagcggatttgggtgctcagacagggaggggtggatgctcagagagcggggcgcgggctggggctgggctttcagacagggagggctggggactcaagagctggggaggggtgggagctctgtgaggggctccgtgcggggtggctgaggctatgggaactctgtggggggaggctgaggctatggggactccgtggggggaggctgaggctatggggactccgtgccgggaggctgaggctatggggactccgtggcgggaggctgaggctatggggactccgtggggggaggctgaggttatggggactccgtgctgggaggctgaggctatggggactccatcgggggaggctgagtctatggggactccgtggggggaggctgaggctatggggactccgtgccgggaggctgaggctatggggactccgtggggcaggctgaggctacggtgactccgtgcagggctgtgaggctacggggactccgtggggggtggctgaggctacggggactccgtggggggaggctgaggctacggggactccgtggggggaggctgaggctacggggactcc

SEQ ID NO: 1874 - DNA, 4001 bp, Homo sapiens
attttaattacatacgcagttagtttttctttatagataatctactaaaggactgggcaagatctgccaactgacaaatcaaatgtagtctgttggggaaactgttggaatacaaacgcttttgcttcttaaaaaccacagttaaacattatctgaaccaagattgtataagaggatcctgttgacaactttaatcgtcaagaaaaagtcatacctttatagctgctttttcattagggaatgtggcaaaagctgtatgtttctgaaacagagttaaggtacaaattacttccaatataatttcagtttctcacaaagaaatctgactttttaccagtggagtaatgtgacatgttaataaaatcacgggaaaggatgaaaactcaagaccatttaactgattactaatttcagtccagtggttttcaatactttttgagtcagacttgagatgaaagctatgcaacctctatcatataaagacacacgttttacacatgcaaatagttcaaaagaccaaaagtttaaagacctgttctacacagagggtcacttttaaccaactaaaaatttatttccttcatttatgacagatctaaagattttaaactttcctctatacataacaatgcgtagtttaaaaacattcaccaacagagaaatcgttcttcaaggtgcatatttcctttgtgctttatctttgtaataatgttcaatgggagaagtctatttttaaacataaattatacggattttaaaaaccatcagaaaagaaacacaaatcaacagtaaaagaatcactatgctaaggaagagctctggtcaatgcttattaaaagttactttaataattatatcgcacattctaattttgtctaatctgatacacgatgacctgatgtacttaaattgagccatatataattttttttttttaatttgcaggcataagtgacatttaaactgatcaaaattggtctttcttctaattcagtaactctcaacttgggctgcacattaacattaaaatcacctagggaaactttaaaaccactgagtcttgcaccatcgctattcctattttaatgaagagaaatctaaaatatctttggatataaagcaaaacaaagtaattgtgtaaattcctacacaggtactcttaacagccctaaaaaattgttccctaaaagatgtcatcgggaaatttttatgaaaagcctctttttctagttgaaattctgcatttaatttacgcaagtcaccaatgtagcttctcctctattttaatgaacgatttaacattggcttataaatgaagtaggactttaaaaaatcccttgatgcacatttgtaagaatactcttgagtccaggagaaataaccccaaattcaaaaaagttgtgaggctctcaggatggatccgaaaactcaatataactaagctaatttccattcttctgctttgtcgttctcacttgcccttttctgcagtgctatgactaatccagactcgagccgattaaaactccacttcgcagagcagatattttgataaaaaagaggtaggatgggggagctctcatcacacaagtccatcttccccactcgtttccattttactcttgtcagcgctccccctccccggtcacttcccaaatgccttcccgggagactccggaggggcgcgcccttaccagtcgccccttatctgacaggacccgcacagactgagccccgaagtacttcagcaagtcctctttctcctcagcagtaagctcagccggcaggtgcctgaccagaagggttcggtcgccccgaggcggggaaagcgaggaggagctcgtgcatccccttgatatcgcaagcggctgctcgggagctgccattttccttggagaagcaaaaacagaaatcgtgggaagaagtctcagtcaaaatcgcggcatcaacacaagctgggagaaatattttttccgcctcgcgctaaggattctggaaaccaggaaataccgagaaagaaagtcaccttctcgcgagaactgcgccaccgaaaagcggcaacccttcgaagactcttcggggaagggcgcggtgctaatgatttaaattccaggggtctccggaaagacttacaagcaaaaattggcccagagatgtgcgagggttaacacaagttgtcaatcaaagaaggaaacaggaaccccagccacttcagggaaagaaggttgacgctcaaggacaagaggactcacgactgcgcatgtgcgggctgggaccgtcacagggcggggcggggcgcacggcggggcggggcgcacggcggggcggggcgcacggcggggcggggcgcacggcggggcggggcgcacggcggggcggggcgcacggcggggcggggcgcacggcggggcggggcgcacggcggggcggggcgcacggcggggcggggcgcacggcggcgagcgctatctggagctgaccgtgcggctcttaatccctggccttgggaaagtgaattggcctgaatagcaaggaggagaacttgggtgtggaaataccgggtatgttcttacagtatttagatggtaaaatataaagctagccagttattctgtcaactcattagacaccattgtagggaggagaactcagtttaaggggcaaaacgttgagagttcagacttttttcttgaatcagtaggcatttagcagacggataggcccctgccagggttcatttcgcagaaatggcagcctctagggagaggtaacctaataaataaattattgcatgtgtgtgtatgtgtgtgtgtgtaggggtgtgtgtgtgtgtgtgtgtgtatgtgtgtgtgtgtgtaggtgtaggtacttttctccctattttacagctgaggacactgatgtacaaagaggttaaatcacacagctagaaagtggaagaactaagttttgacccttggtgttctgactgggggtctacattctaatccactgttctgcctagattctgaatggagtgaggcagggatcatccccggagggtcaggaatgtacccctcaccccatacagagagggccttgaggattctaaagagaggttttatgctagatgtagctgctacagtctggagaaccagagttcctcttacagttctttttgccacttaaataaatgttagagatacagcagtaagcagtataccagcaatctgctgtcatcccgcattggttggggaaaaggagagagacagatattaatgaaaactagaagacaaacatgagaagaaccttccccacacacccaccaaaatatcagataggtagagccagaccacgtagacgctgtagatttgttaggagccctttttatttgaggaacatttagaaactgacaaattctttaagtaggtgtgtgttgaggggagagaatcaaagtttaggtatgaaaatttctccggttgcaatgcaaaaaacagaagcagaaagaccagttggactactgtagaagtctggagaaaaacactaccataatagtttggtgaaagtggacatgtagagaaggaactggaattgagatacgttttagaagtagttgataggaacttgcagatgaagaatagtaagcaaggataaattctggatttttggcttaagctagatattatccatctgtagatgatgatgccatttactgaatgtgagaagattgaccaagtatagctaggttagaaactgtagtgggacattgggaatagaggaacatatattaagtttaaggtatctattcagtatccctgtttcaagtaggaagttgaatgtgtgtgtttggcattcttgggaaaggttaccacgaggtatggcatcaacctatatggtatttatatctgaagaatgacaaagggtatagatagaattgtgcccataatggagtcatgggacatgcagatgttgagaagttgaggcaaggaagaagaagaagacaatcaattcctgccctctca

SEQ ID NO: 1875 - DNA, 4001 bp, Homo sapiens
tctttgcttttttgttgttgttgttaaaacagggtcgcactctgttgctcaggctggagtgcagtggtgttatcaggctgtgaaaggaaaatctcttgggcccccaaaatcactaaagaaaactcaacctgggaaccgcttagggcacacctgcctcccattctattcaaagccactactctgctcactgagatggatgcatatctgatttgcttcctttggaaaggctcatcagaaactcaaaagaatgtaaccatttgtgtatcacctatctgtgatccggaagccgcttcaagtcttcctgcctttgctgcaagttgtcccaccttttcagacccaaccaatgtacttcttacatatactgactgatgtatcatgtctccctaatgtataaaaccaagctgtgggccgggcgcagtggctcacgcctgtaatcccagcactttgggaggccgccgaggcaggcggatcacgaggtcaggagttcgagaccagcctgaccaaaatggtgaaattttgtctctactaaacaatacaaaaattagccgggtgtggtggcgcacgcctgtagtcccagctactagggagggtgaggtacgagaatcgctcgaacccacgacgcagaggttgcagtgagccgagatcttgccactgcactccagcctggacgagagtgagactctgcctcaaataaataaataaaagattaaactgtaagcaagcagtttactatgaaacttgcaaccaactctacctgagagataactggcagccacagcctaaggactctccaggaaggattttctgactcttacagacataagccacataactccatcctcttatttccaatatttgccccgtcccgaaaaaaaattaaagagttaaccaacagtgagaaggccaaattattataatgcttatagcaccctaattccagttctcacttttactcaaattctttcgttaatcaaatccaggacttcacaggaggaaacaaaaacaaagataagagctttaaccgtggaactagaaggcaacacagaacaaagagctagatcaacatctggctaattctagagccaccataaagcagagataaggtggctgataatcaggtacctcggcccaaaagtccaagagggcactaagtgaagtgcatgaacaacaggtcatctagaaagccacggaaaatgttagaaacggcagtgtgcgatgagcgggaatgcggcgcaatctggacaagcctccagggccagggaggagacgcggaaggacggaaagggtgaaggatgcaccgcccagtggctggaggaagtccagaaggaaaccaggcagcccgggaggaaaagaggaagcaaggggaggaggcctagaggcggcgcgcggggagtaggcccctctagggacgctctggaagggtcctccctgtccctcctcccgggtggggtaggtgagggtgcagggcggctgggggccggaagggcaggcaggcagcggcgggcgcagtctggggcgcactcaccccgggtccctccccgacgcggtaggtgagcagcacctggaggcgctcggcggcgcggcagggctgcgggaaggacacgcacagggcctggccatagtgcgagaagggctgcgtgtagaagctcacgggctccgcaggcggctcctccgagccgggccgctcccgccgcagcgccgccgccgtcacctccaggcacgggtgcgagtccagccgcagctcggcggcgccctcgggctccaggcagcgcaggtccaggaccgcggtgccgctcagcccccggctccctgcgccgggccctggaggcccgaactcagcccgcaggtccaggtgcaagtgcagcagctcaaaggcccggaagttggaggccgaggccacgtccacagcctgcgcggagtgcagcggccgccgggccgcgccgctgccgggggaatgctcgccgctcgccatggccgcagagccgttgctcaccggccgggccgcgaacccgaggggagccccgccccgagcgccgcgggcccgcccccgccgcgcgggccccgcccccgaaatctgctcccgaccgcatcccctccctgcgctttaccgcccactcttctagctgcacccgtgcctcgggacttaggacaaaagaggccggtgggatcgtgtggcccacgtttgcccacccatatcctactgaggtgttccagtcgtcccggtggggcacccttctctgctgacccttcctgctgcctcatctaggcagtggcgtggactgagccctggctgggaaggtctgagttccagatctcacaccctgcgataggccagttgttagaactgtgtgtcaccttgggcaagtcgcacaagaaacatgaatcttcccgagcctttttctgcaccagtataatagagtcataatatctgtgtatctcacgaagtaatgtgagaactctaccaggtaacctgtctaacacactcagcaaacagtgaaaccctgcacaacttcacggaattcacactggatcgagcctcgtcccccagcaactccaggcacgcctatctttctattgttgggttaagggacaggaatcagcaccgcgcaatttaaggcctggctgtccatcgcatgtcacttctatttcccttactgtattgtaccgcttattgagctagggtattctccgctgaatactttgtttctcttctgtaccagtgggttgcaatgggccttctatgaataggagctaatcaatgatgatgtttttaccgttcagctaggaaatgagatttttaaaaagaacaatgtagggagtttttcattaagggaaatagtattccgttctgtgcttcctagttttgtagagttgaaattattttatttcatgaaataatgcttatggtagataatgactttaatattccatgtaagttcaatgtcagggttttttgtttaactccagaaaccttagaaacctgcttttctgtagcattgagaacagcgcttggtacatattagacgttgaatactcctatcttgaaattattcagtcttcgatgcaatgcacttttgctgagtatctgctagacaccagttgttaagctaagtgcctggggtacagtttgaataagtccggcacaattcctcttcctatggtgttcatagcctaactcacattttagcagacgcacaagaaaacaggtcacgacacttccacgtgctgcgcttgatacgggaagaaaaggatgctggggagcacaacgaagagatgcctagcctgatccttctagttaaatattgacagaggaagaggatgtcatccttagctaaagggtaaaagattttaggctgggtgtggtggctcacgcctgtaatcccaacactttgggaagctgaggcaggaggatcgcttgagcccaggagttcaagatgaggctacgcaacagagggagaccccctctctacaaaaacattttaaaaaattagctgggtgtggtgatgcacacctgtggtcctggctactcagaggatgaggtaggggtattgcttgggcccaggaggtcaaggctgcagtgaaccatgatcataccactgcactccagctggggcaacagagaaagaccctgtctcaaaaaaaaaaaaaaaaaagattttaggaattatattatttccccttatagccttacttcttcctgggaataccaggaacctcatttccacttccgcctccctgcatggctcccacactgtctagtttgcctcagaactggcctgtagatggcctgtaataacttacagtggagagattcaggaattcagagaattcaggattgtagaaaggggacactgtgggcacagcccacctctcccccagttcattttcattatttattatttatttgtgaatgcttagaatgcaacatatgttggacatttcaaaataatggccacaaattttccattcctgattctatagatttaaaagttacagggccg

SEQ ID NO: 1876 - DNA, 4001 bp, Homo sapiens
gcccatttttacttttcacccaggtgttgtggcgcaaggccagatgtttggcatcaccaagcaaaacatctatgtgaccaagctgtttacatttcattaggatttttcatcaggaaggtgcactccctgctgatgcacatcttaattacaattaggagctctatttacccccaggagctttcagattagcacgaccacattataggatccgtttcagaaatcatcctcagaaaatgctactctagcttccaaaaaccatctctaagaaatcaaaatttcacacaacttccttccagagtgtgttttctaccaagaaagtcagctaacttttagtaaaaactaattctgcattcgtagtctatgtagtgaatacatctttttcctctcaactgctaagtagcgcagaactttttcttttcctaaacacagtgctaacttaaaaatgaaagatgcatgataaaagagcagagatctatttatccgctcaggtttagggctgggagtgggggagggcagaatccaaaggctcctcaccccctcaagggatgcatgttaaaagtgaggcccgagaccccggagactttaatcaactttccccctccaacctccaaagaatgaatcggttgtctccacaggctcagccgggctcttccctctcattgtgtaccggctcagacgcagcaaggaccccagcttcccgcagcgaactaagacgctccggcttgcggtgaagtctttctctaactgttgcgattgtctttagagattaccaaaatcaaatatgcattagatggcttttccccctcttgtttgtaacacgcacacacacacgcgcgcgcgcgcgcgtgcacacccaaagcactttggagccgcaggccgcctctgacagcacattttgcacaaagtggcagcggctgcagcggcgcacaagttttggcctctatgatgactctcgggagggccggagggccgggggcggtggcgatgcgaggccgccggagccccaggaggacagggcttttgtttgcgtcgatccgcgagccgcctgggctctggcgagcaccactgaaaatccaaactccctcctggaccgcgccttccgggccggctcgcaacttgggggcaggatagacttgcctgaacaccggctggggcgcgctagaggtccagggagacaaggggggacgccctgcacagaagtgccccgatcacccccaggaccctcaaacccctccacgcttcctgtcagcgctgacaatcgctgctgcgcaccgaggaacgagtccctgggcgcgccccggcccgccgcggggctccggggcaaaccctggcctggcggggctccggggcaaaccctggcctggcggcgccggcgagccccgtggcgggtggccggacgcgccccggagccagcgcggcgcttcctgcgtgtcccgcgcccggctggacggcggaagggtggccacgggtcagggggtctgggcgggcgggggccggcgggcgcctcttaccttgggcagcagccccgcgtgcggccagcagcagcgcggccagcagcgccaggagcggcgggcgcgtcccgcggcggcgcggccggtgcattcctcctctcgctgaggcggcggcggcggcggctcccaggccgcgcgcagaacatccacgggctcttcccgggctcccggccgcctcgtcccggccgctggcgctcgcaggacgccggggacgtctgcaaagctctttgtccctctaacctgctccctcgcctccgcctggccgcctctggatgccgcgagcgcgatcccttcccagccctctggctgcagcctcgcctgggccggcgggtcagtcccaggctgtccgggtcgcaccagtgggcgtgagtcgccctgggtcggactccgagaacagcgcaccctgcgcccaggggctgccgtcccggggctccctcggcggcggcggtggcggctgctccagctctccacgctccctctctcgctcaacttgtcactttccaccaactctccagcccagcgccccagccccgaccaatgggagacgcggcccaggctggcgacccagcgccctctgctgcagcctctcaacgcccgcaccctccccgacttcgcagaaagcggtcgcggctcccgcgtctcgggcacgctccctcccctcccctcccccacactcctcaaactcgccaccgaaccgagcgccggggaccttcgaggctacttgacagaaggggaaaccgaggctcagagagacttatccgggatctcaagccagttcgtggctggacgacagtagacccaggttctagcagcctcagctgtgtcactgttagctgtgtgactctgggtaatggcacatttattgctatcatacaatttcccttttgctttcttcttggacccaagagttgagagagttcttacacaagtaatttatacttcgcctttttgtctttaatttgtagtctcactgaattcaatgtcatctgtactgcctcctggcaagatttattgaggattatctgtggttatttttgccaatgtcccatggttttttgaaaggtgtttttgtcttccgaatgtgaagatagaatactgtatcgatttatcttctttgtattcattattttttcaggccttctgaatctttgcatgtttgtttgtttgtttgttttttgtctagctgctctgccatgagccaagggatcattaaagacctctacaatgagtgtgtttttgtccatttctcctggtttaactttatggattttgtaattcataaatacccataatgatttgactttccctgtagagactgcctttgatcataaaaagtggtgagcgcctgctgttttcagggctgtgctctaggctctgaagatgcaagggtaataggacacctgtcagtcttgctctggaggaacaggaagaagcccatagtctctcaataatcacgtggccacttactaaatacctcctgtttgccttgtgttttatatgcatttgctcacaaatcctccattgacactaaaaagagtcattaaaagtatatacttcttagctgttttacatatattatccccatattacagttttagaaattgaaactcaaagggaaagtaaatgacttgcccacagtctcacagacatggggtagccaagccagcactcaggctgtttccactgagagagttaaagcctgtaaccagagcctggcacatgataagcactcactcgggagttgttgctgttgcagtagcctctaagaacccagctttagggttttaaaatgaacagtcacttcatggagggcgaggactctgtctcaatcatctaggtatcttgctggcctctaacagtacctggaatgcaataggagctcaattaatgaacaaaggttaggtcaccatttggaaaatattaatttctcatcatatttgttttataggggtgcatggaggagggacaaaatttcatccatactccttggcaccaggaaaagcagatccctgagagctgagacattagaagggggaaaaaatgcagcccaaagtatgtcccagcaggtcatggactccagactcccagccctttgccttcaggcaggtgaatgactaacccatgcgggacaaacagtcacttattcttctccaggacttcatggcaggagctgtgtcggtagttttccccctttctatcgctctgacctgaggtcaaaaaatgatagacagagaggccttgggtcaaccagttcattacctacattgatctgtcccccaagtttctctgcctgagatctattcaatcctgtcccaattatctcgcttcttgcctgaggaacttactgcacaaggttctcttgttgggaaacagtctttgatggtcagtcttagtatatcacagcccagaaatcagaggatactcagttacactgcacagtgctgggcagtcctctgttgtctacagtcaatacacacagttgtcagacaa

SEQ ID NO: 1877 - DNA, 4001 bp, Homo sapiens
caccaactgtcacctaactgctgtaattgtgtcattgtctatgaaatgggtctttcctgccaaattgtaaagccctgtgaaggcagggactgtgttggtcttatttactttgtaatttcattggaggtgcacaagaaatatcctacagccagagttaaatctctgtgggactgaaatctcttggttgcttatctatgcctgaaaacaccagggcttcagagatgtgggggttgggagtagggggagaggatgtttggaggaagaggaggggagagttgcaaatacagacccctctctggcttccacgggccaggcttccctggcctaccagcctgaagaggaaggcctcccttctctgctgctgctgcgtggccgggtctgggtggagattgggcagtagggagcatgagtgggtcgatgggggtcacatggatactcggacctccagggggagcagccgttgaggggagggccttagctggagcatggttggtgggtgggggggtgtcacccattcatgcagttaacatctatgaaacacctagccagggagcccctggaaagaggattcccctgccagaccttggcccatttcctacatccacatagcagctcatcacagaacacatggccagtcttttgtctcagaaagcccttcaaccatgccctataccccctatagcttccctaacctctgactctattctgttatttttttccttctgctgttcagtcttgacacctgacatacacacacacacacacacacacacacacacacacacacacagtgcccttctgcccgggagatgctccccactggcaggccgtggtcactaggctgtgtggaggcgagtggcctgatggcctgggctctgctggggtgagggaggagaaaagactgccccgaggtggcaaggccccacccagccccgcccacctccccttgctcctgcctggccccacccagcttcctccctgacgtggcaccggctcctggcctctagccttgcacctcagagcagtcctgtggtgggggtgctccccttgctcacccaggcagccagttcttcctccaccaggtggccctggagcttggtggctctggccctcaaactttcctcctccatgctcacagctgaccaagcctgtggccctgcgatcctgctctgagggggttcctgacttggaccatgggtggggccaaggacggcctgacattctgtccttccctgctgatggcccagtgccccacattctctgcagagatgaaatcccacatccctgggtgagtggcgaggaaaggaccaggctacgtggtcatgggcagctgacagggtgtggttccccctgccacactccccaagtctgtcactccttaaaggacaggtttctccactggtgaatgaacagaaggtggagcagccagcctcccggccactgctgtctggggtcctggccagatcaaggaagcagtgtccctgtgcctcctggggggtaagcccacacctgggagggcctgtccacattctgacccctcgctgggtctagatctggctcccctgacttggctcttccctccccatctaccctccaacctgtttcttccttctcccgcttctccctttctttcctgtttctctccttttgcgatttcttctcctctgtcatctccccagcccctcctcctgtttctcctccagtttcactccctgccaacccagggctttctcctctgcactcttgtccctccctcccctcctcacttcttgcccagtctcttgccatttctgccctcctctgaacctccagcagtctcttccacctgcaggcagggccatgggcctcttaccccgtgaggctcggtgctgtctctgtggggccctgtccatggggcagctcccttggtgccgtcctggctgccctggctgcccaggagggcagggagcagggcccaggggagggaggagggcggagggtggaaggcgggagcacctggccctccagcaggcagggaaaaggagtggctggcagagtgtcctggcaccaggaggggacatgaggagagaccagtggaccagtgcatggagccttgaggagaaacaggacaggagaaaggaagggaactagcatttattaatcacttactgtgtgctgggccctttgcaggacactttatgtaaatccatgcttttactttgtgtaaatattcacagcacccaccacagggaaacattattattccagattgatcagtgagtggagggattctcagagatattaatgattttgcccaaggactcacacaagaacaataaatgggtgagctatgatttggacccaagtctttgtgactttagaatcctgtgatttctacctaagacaggtgacaggcataggggagatggagagggcaggtttgggggactgtgtctcttctctaggatgcagtcagactcctcccagtgactgttcagttccctgaggcctctgcctgctcggcccctgcccctaacccttgctgctcttgccaggactccctgaccccctgatgcttctacgtgctcctcatctgttggggcaaggggcaggcctggaggagtgcctggaggcagagaagccatggtggggaagaggagaggagagatgctgcactggactcattgggagaaggagaggctcccagacctagtggcccacactgaggcctgcagtgaaggctctgaagggggccaagaggacgaggcttctggggatcctggtgctgcttttctcctgcatggcctgggcccagagtttgattagctgggcctgactctcctggttacccaacaagcaactggccaggggccaggctgcagcaagaggctccctggcacctcctcctgctctcgttcccagctggtaaacagcagagcaggagtcagccatgccacagcctcgtgactcgcccactcccccccacctggtgcacgtggcacctggcatggagagggcaagcagctgtcccttccctcttctgccgtctcgtctcgccatcctccactcctgcccaaccctggagcttcacactctgctaccatcagcacctctgttcttaggtagctcccagagtctccccatggctgcagattgagagataaaggtagaagtggagaaggacttttcaactcctagggtcattgacagtggatgagtagtgagaaagaggaggggaagttttggggaccttctgcactgagtctaagggtatgtgcctatgcctctgaggctctgattatcccccgtgttcttttggtaaatgtgggcccacgcatccatgtatgcatctctgcacagaacaggatgttggtctgtttgggggctctgcaccttgggcaggtttggagtgagaggtaaagtgctttgcagctcccttcccccccgcccccccagcaccctccagctgacaggaggagccagcaacatgccgggcgtgggagtgcaggggagatgccgttctgctcccctcctccccagaactcctcagttatcccccatctctctgtctctctttgctggctcctgcctgtctgtggctcttctccagctgtcccctctctatcttttctcctttttaggcctctcttcctcttgactctgggtctcccaggggcccttcgtgactacctcttctacaacccaccaattgcaggcacagagtggaggtcacgtagaatgcttgcggatggacacagagcatccccagacactgcaggcacagctgactccccagttgtgccactttgtgctactatgtagggtggggaggaagtgactggagatttagaagacagtatcctgacctctaggcctaggagtgtcacatgcttcctaggcattctctacctctcccctgccctaagcatggatagtttgagttttttttctccccagggcaagaagatcccttggttatccttatgggaagttccccctcttgtctaaactttctccctctt

SEQ ID NO: 1878 - DNA, 4001 bp, Homo sapiens
tcgggcccttggtctctgggtgtgtcacagtcccaagccccatgtgctttgacttttgccatcggcggttggaggggctggtggtggttggcactcattggggtcagataacttggggctatgagatacctgtaaatgtccaagtgagaaggaccagtggcactgaccccctcgttggaggaggccctctctcctacttccccgcctgggtggggctgtgtgtgtgtggtgggggtgggaataatggagagctggccaagtgtctccctcagcccctcctggggactcctgccccgctgctgggctagaagcacacctagtcatttcatcccagggttgatttgctcattaggggccatctctgggaagaccagtctgccagcgtttgctgctaatagagagaagctagaagggaaacggaagctccaaggggccctttcctctgtgtagaagctgttggctcttctctccagccctccttatccaccccagctcatatgcctgcactgtggcctcagtccctgtcacagaagtggaattcttttctttccttggtttcccttccttctaacctctgggagagctgagtctccatcatcacccttggggatgcctgccttagggcactgggctctctcttggccctgggcctttggaatgggagactctccatagttggttttgttgttctatcttaaaattcagctcccttgttttgcggatggtagaccagggcccagtgacttggcttgtctaagtctatatggctagccagtgataggcggcacaagtgcctggtcttacactgtcagtccaggggtctttccaggactcaatacggcctcccttctgtggcttgtgggaagaccccaggttgaagctggggctgcttcaggcctcagccacaggggcatggggcttcccttttcctccttcaccttgtgctctgagagcttctctggcttccctggcttcccttcacaacaaatacaggggacttcctgaggttgcccacccttgctctgctggaaggcacaggaaccccagacatctgcccaccaactgttggcccagggctccaagccaggaaaagggtgaggccgaggtctttccaatcccatctccattgccttgcttccccggtcaaatgggtgactgaccctggagaaccacacacacacatacacacacaccccacacacacacgcacacacacacatgcacacacacgcaggcatgtgcccgggtgcaccctgactggattccacatagtcctcatgtccctggattgggcagaaagcctggtggctttgaggcctggacgcggggattctgtgccctgctgcctgccaacctcagttgactctcgctgtcctgttgcttcagagcacagcaactgctctggcctccttttactcacaagcaggctggaggcacagagggaaacaccgtaacaagggaaacactgtaacaggagagtgcgttcagggcccctagtaattaccagcccccatcagataccagctgtgtaacattgggccaagtacgcggcctccttggctctcagtctttttgtaaaattaagggcctggatacctcagatacttttggaggttctttttggaactcaggaattcctcaacagtcctcttaccattgctgctgtcagggagccgcctggccagcaggactccccagctgctccacccatctcccaacagatcttgaccttgaccaggacgcaccctgctttgctcagatttgctcacactgttcccaagacatcctcctttccagaggggtgacgacagggtccaggctcccccgcccccaggtggccccattcacttacttctcatgactgagccttggctctgccggccttggctccctgtccttctcagcagggggtggtccaggagtggggtgcagctggcggcagaggcggggcgaggccctctcagcagcgcctcagcctgaagctctgcacctagctctctcccccagtgcttctggactggggggtttaagctctgcaccacacaggtggccaagtgacaaccccccaccccacccccaaggggtgcagtgagtaggatgacaggcgccccacgtggccaatctgggcctggggcagggtgtgaggggaggggcagccaatcgtagggggcgttggaaaattccaaaaccacatgcgacagccacacgcggtaaaagctgtttccacccgccagggtagttctggctggggagccagaatggagctcacacgagcctgaagccaaatttctactcctcctacccccgaggaccttccaagcctgaccctctttgccaggtgacttcagggacagggatgttttcagaggtaagtcacaggatgtctgcctggggtggtggcatgtgccacctgacaccctgtggactgccaacagccatacccagtgtggtgcagcctggggggctgtcccaccactcccatgcccacgctcctccctgcagacaccacatatatcttgcgctagggaatacatggaaatgatagaagcagtaataatcaccaggcaaatacccacaatccacagaaggaaaccagaaatttccttaggagccaaactgctgaaattggagtgtagataatgatcatcatcaccatcatcatactcataatcataataatagtgcttactattatgtgtcagaaatggttctcgatgttttatgtggataatctaatcctcacaaaatactttatgtgggccgggggcagtggctcacgcctgtaatcccagcactttgggagcccaaggtgggtggatcacctgaggttaggagttcgagaccggcctggccaacatggtgaaaccccatctctactaaaaatacaaaaattagccaggcatggtggcgagcacctgtagtcccagctactcagggggctgaggcaggagaatcgcttgaacccgggaggcggagtttgcagtgagctgagataatgccactgcactacagcctgagcaactgagtaagactctgtctcaaaaagaaaaaataaaaaaactttatgaagtagctaccattatcctcatttcgaggaggaaagtgagacacagagaggttaagtaacttgcccaaggttacacagctagtaagtggcagagtcaggattcaagcccaggcagactggcttcggatcccacttgaaggatgggagggtttctctggttcaagtctgcttttgagggtgtctcagcctgggaggtccctcggtatgtgagtctctctggagtgttttttggcctgggggaggggggtccttctcaggggccaaacaattccagagaccttctcagcctcttaggtgctttgtggggtacattggctttgagagtccctcttcagggcccctcagtattcaggctccctcttggtctggggagttcccccgggttccccatcttggacccccatcttggggttgtctcaattcaggagccaattttcagagtctctcggcctgggggaggccttaatgtctcctggattctgtggggcaaactcctgagaggtgtctgatcttgctgggactccagaccctctcatccaggcacaggcctttccttgccttcctgggccttcctggggcttcaggagctgggccgtggagtgggggagaggctgtcagcctggatcctcaggacaacactcttggggtggggacacgaggactggtgggatgggaaagggataaggaggtatagtcctggctgaggtttctgaggtcaggggttaagggtaggaatagggtttgacctctcccagttcctgctgctccgaaagtccccctactccccccacccacataaggtccgtgacccccctcccccagctcacccgcgtcactccctgacccgctttcctcccggggccctgctcagcatttccgtggggccctgtggctaggggcaggcgagacactgatcaggattatgctgagcaaa

SEQ ID NO: 1879 - DNA, 4001 bp, Homo sapiens
ataatattaagtctcacaatgacattttaaggtatgttagcccctcttcacaggggcaaaactgactcccaagccagttaagaaatgtgtccagtgacaccctataagtaaagcagcacggcaacggcagaacacacgtctatgacttcaaagaccacatttctttttttgagacagtctgctcttgctctatcacccaggctggagtgcagtggcatcatcttggctcactgcaatctctgtctccagagttcaagcgattcccctgcttcagcctccctagtagctgggattacaggtgcctgccaccacgcctggctaatttttgtatttttagtagagacgaggtttcaccatgttggccaggctggtcaggaactcctgatctcaggtgatccacccgcctcagcctcccaaagtgctgggattacgggcgtgagccaccgcggctggcccaaaaaccacactcctgatgtcgcctcatcccatttaatttaaaagcgactttgggccgggctccgtggctcacgcctgtaatcccaacactttgggaggctgaggcgggtggattacctgagttcgggagttggagaccagcctgaccaacatggagaaaccctgtctctactaaaaacacaaaattagccgggcgtggtggcacatgcctgtaatcccagctactcgggacgctgaagcaggagaatcgcttgaacctgggaggcggaggttgcggggagccgagatcgcgccattgcactccagcctgggcaacagagtgaggttccatctcaaaaaaaaaaaaaaaagaatgtaaaagagactattaatataagttcaggccaggagcagtggctcacacctgttaccccagcactttgagaggccgaggtgggaggatcgcttgagctcaggagtcggagaccagcctgggcaacatagtgagaccccatctctattttaaaaaataaaaataaatttaaaaaccaagttgagggcgttcacacaagactgattcattagctacactgatcaatttcaaaataaggccaacgacgggaaaagccagggaaacaggaggtggaaaatttggcaagatttcatttctgaaacttacagcacttaattataagagatgcagataataatagatcattatcgcatcagttcacgttgaaatcttccttcaaagcataaagtttctgtcatagatgactcagggacttcaggacaggataaaacaaaactaaatactcctttcaacctactgatttcttttcggcttgagaaggtgcgggcgatccaaagccccccggggactgcgtgtagccgccggctcccccgtatgaggagctgccatagctttcgaatccacctgttttgaacaacaggattagtgcctgtgccacgtcccacgcctccgagaaacccgcaggctcccggaggcttcgccccttcaaacactgcccgagtctccctaaccttcctcgccgccttcctgcgggtgacccccaaacgccccagctccgctcccgcccttcctctcccgctaccacacgcctctcggaccctaggctcgccctcttgctaaaacctcctgcgattctcttcctcctccaccccgcacccccatcattactgttccacatcttggtcacgattctccgcaaagaggccgagaaggtgcgggtctgggggaatagcggaaaaccacagaacgcggccgccactgcgccgctctggctacttttctctggcaccacaaacgccttcccgcgaatggcggagccagtcagctcccggggtgctcgcttcagccaatcggtgctcacggatgctacgcttgttcctgtctcctctgcccatgctccagaaaacgcgtactgcgctcccagttggctccaaaagcctccgcggccatctttacgaagggcaaaaccctccgcactagcggaagcaaggggctggcagagcggtatcgcaagaaatcaaccaatcagaacaatactaccgcgacgcagcgccgtgtgatcccaccctcgtcaagtgcgcgacttctgccgtcacttcctttgttcggcgtgctcaggttcgcgccaaactatcaccaatcagacgacgccttcatctaaagggctgtagcggagttttggcttcggtgtttcccacccacggtcgtgcgggaattgcgcacctcagggactcgcagcactagcctcacagcaccgcgtggagttgcttgttcttttacataggaggtcacattctcttcgtgtaatgccaccaatggtgccgattctccccagtggggctgtgagaaacctacgccctcttgcctatgacagacttgtgaaagatgtgagggtggtgcccctcgtcccgcacctgtccccatcccagtctcatccaggcttggcctctccagtcatttcgaccatttttcataattcttcatataacgtgcctcccatagggagtggaacattttgtcagttccttcctcaaaatactcatgcattgttagaattttatgttcatttatgtatttaagaaaaattagcaggtgctgtggctcatgcctgtaaacccagcaaatggggtctgaggcaggaggaccgcttgaggctggaagtttgagaccagcctggacaacatagtgagaccctctctcaaaaaatatttttaaaaattagtctggtgtggtggcaagtgcctggggtcccagctactggggtggctaaggtgggaggatcacctggccctggggtgtccaggctgcagtgagctgtgatgctgccactgcactccagcctaggtggcagagagagactgcgactcaaaaaaaaaaaaaaaaaaatagaattgtttatgccttctttgttcctggccctgtgctggccactgggattcaatggttaagtaagatagacatggcctttgggctccaggactgtgtgtttttttcttctcttctttttcctttttttttttttttcggaaactgagttttgctcttgttgcccaggctggagtgcaatggtgcgatctcacctcactgcaacctccgcctcccgggttcaagcgattttcctgcctcagcctccggagtagctgggattacaggtacgtgcaaccacgcccggctaatttttgtatttttagtagagacgggggtttcgccatgctggtcaggctggtctcgaactcctgacctcaagtgatccacccaccttggcctcccaaagtgttgggattacaggcgtcagccactgcaccctgctttcttctttcttcttcctcctactcttcactttgacattcagagcactgggcagaaatcgcatcgcgtgttttaattaaacagatttccctggttgcctcctctccacctccctcctgccccctcccctttcctcccacccatcccccttcctcccccaactccttcccccttccttttttttctttttctcttcttttctttttctttctttcttttttttttttttttttttgagacagagtttcgctcttgttgcccaggctggagtgcaattgcccgatctcggctcactgcaacctccgcctcccgggttcaagcgattctcctgcctcagcctcccaagtagctgggattacagggatacgccaccatgcccggctaatttcttttttgtatttttagtagagacggggtttctccatgttggtcaggctggtcttgaactcccgaccttaggtgatctgccatctcggcctcccaaagtgctgggattacaggcgtgagccacaggcctggctttgtgtgtgtgtgtgtgtgtgtgtgtgtgtgtgtgtgtgtaaaacagggtttcactctgtcgcccaggctggagtgcaatggcgcgatctctgggattacaggcccagctccctcccccttccttctttttttctccacctctctcctcctcctcctctctcccccttcctcctcctctttcctcctccaccctcctcctcct

SEQ ID NO: 1880 - DNA, 4001 bp, Homo sapiens
cttcatagtgcttatcacaatttgtaattatgtatttgtttatgttaattaactaattaatttattattatttattcctctgttccactaggcaagaactgtgtctattctgttcaccatatcttcagagcctaacacaggtccgacatatcttatactcaataaataatttttgaaagaatgagtaaattaagaccaaagccaatataagattagtgagtcttcacaaaataaaaatcatagctacatatgcttttaatccccttcacattctactcctcttctagaaactctgtgtgatatgtggtaatatcttgcctttttagaaccagaactagtacaagacagctttttaatgaaaatctggacttgatgtaacaaagaacagaaaaggtttcttggagtgacagcgaaacttggagagtgagtctctggcatataaagcaataaaaggagagtgtacctgaagcggtgaaaaacaaacaccttctacagacactcattccttcactagcagtctgagtgcttagtttggttttcttaaagcctggagtagaggaatgtaacagtctatgtgagaatttataggccttcccagatctttcccttccctctcatgataattttctctaaaaaaaaaaaggtaaccattattgttttaaaattggtacaagtaatacaagataagtagatatgccaatgtagttgtccatgtagctgtcataccttttagaagcatcttcttgtttcaaagtacttgtctgtttagtacctacaataaaaatacagtcatgtgctacataatgacatttccgtaaacgacggacagcatacagacagcggtctcataagattaaaatactgtatttttactgtaccttttctatgtttagatatacagttgcctacagtacttagtacagtaacatgctgtgcaggtttgtagcctgggagcaataggctgtaccatatagcctagtgtgtaagtaggctgtaccatctaggtttgtgtaagtgcactcgatgatggtcacacaaggatgaaatcgactaacaacttatttctcaaaatgcatccccgcagttaagctacacatggtggcagtaggtcaggtctacacaaacacattaggtacaagatagattcctacacaaataacaaactgtagaccaccttttcttcttttccacatattttatgtccaatcgtgtgtaaatcaaaatgaaataggaagggagagcaatttgtttttgcaaattgattactgtctaatttttcttggttaaaatgtatctctttggggattgaattttcttctgtatcatagttgcttaattaaccactcctgaaaatctgagatctgggtacttttaggggaaacctctctccgtctgccaaacgtcctctctgggggaagaggggagtccggcaccttaaagaactgggcacccaagcaatctggaaaggaggaccggtcctaggttcaaggccagctgccaacgctgccctagtcacttgccccgaaacccggggaccccaggcctgggttcccggggcctccactgtcctttgtctcagaggctggggccacagtccgcgtgagggaaatcttggaacactggcgtaaaggggtgaggggcggccaggaaatctttcccaggaggtgcggacggcggtgggaagctttcggcctactctacctgggagaacccctcccctgaagcagcctttcaggagcgcccgcgcgctgcggtctataactcgagatcggggcccagctttcagggtccaaaagtgggaagagatccttgctcctacctgcggcttttcgagagcagcggggagccccggccttgcggccggcagaagacggcccagcgaagtccgccatgggggagagtagtctgccggacggggacacgctccggcgtctcgccccgaggccccgcctccctacgcgtagcgcggggcggggccagaagagcgggctaagacgccggaggaggtggcggcggctgggagaggcgagggttctggccggtaagtggagttgtggagaggttcagggtggccagggctcgcggttggccgtgagccgcggcggacttggtgctgcgggccgactaggccacgcgaggtggtggagcctgcccacctaggcgagcaggaatcggaagacatggcttcctctgatgcagcccgcacgcgcgctggggtgttcactcgccttccagcgcgctgccctgaggaccgggctgactcgcgcccctactgagggcttggggccgagccttgccgccaggagaagcgatggtctcctcctgaaggccgccgttgtcttgtctccgtgtgatacagtgatttcactagctggattgatcactttggggactgcaactcctagagagaaatggaatggagggcatctgaatcttcaccccctatagataagcttgtgttgcaccccaatttttgtgaggtgagacattaaaaatgaaaaatcccctgatgattagaattttgatttcaggtccaccttttggaaattttttttcagaaaagaagtgctttgctttttaaaagccctttagttcgtatatgcctcgcctcttgggagtgctcgagaggttttttttgtttttttttccttcaaagtagctttcaaaactatgctcctagaaaacttaaaacatgcaataagggcttctaaaaaaacactttattttcttaggcaaacatactaagattcagtaataacatttcaactttaaaactttacattttctcctagcatgctattggaccaaaaaacacaacaacaaaaactttccattttctttattgtatttactaataatttatcacactgaaacataacttttgaatacttaagtgtaatatcacggatagttaacagtgtgttttgtatttgtagattttagcatcgaaactaggagaaataagaatggctgtagaggaacttcagtctataataaagagatgtgtaagtattaatttttgtaaaattaaatacctttcaaaatatgggaagggcacagattgtttttaattatatttgtggtcactcaaattgtttatcttctttaatccttgctttttttgacctgtaaagagcatgagtgggggaggcagattggattatttctccaggtgacatacttatctaaataaccttttacattttaatcctgatccttttcatagatttcactggtacagtagatttcaaggtcacttattaaagtatttattagggtaatcctaattttgatacgtgtgttatttacgttacatttatctagaatttaaacagatttccttttttcatagataaatcaagaagttattgtatttaatttttatttgcatatacttttttttgtttgttttttgggttttttttttttttgccagcaaatcctagaagagcaagactttaaagaagaggattttggcctatttcagttagctgggcaaagatgcatagaagaagggcacacagaccagctattagaaattattcaaaatgaaaagaataaggtgcgtacaatcttggtgtttacttttcagtcttgggaagagaataatcacatgatgctattcatccagtcatttatccatcaaacatttaagaatctacttaaattttcacagtagggaactgaaaacaaaaaaagaattagaaatatttaggccaggcgcagtggctcacgttcgtaatcacagcgttatgggaggccaaggcaggcagatcacttgagcccaggagtttgagaccagcctgggcaacagagtaagaccctgtctcagaaaaaaaaaaaaaaaaaagaaaagaaacagtcatatacttgaaggtttttaccatctggtcaaacataaacatgtaaacaactaacaataatgaggcaaaataaataattgctatagttgaagtaaagagtttttagaagaaacagaattacttctggtttagggagtc

SEQ ID NO: 1881 - DNA, 4001 bp, Homo sapiens
agtttttcaagcaaatggattatttcctataactaataatgatactgatagtaataattactgtctattgatcactttgtgttggatagtgggtgaatcattctatttacattactccacttaattttcacaacatcctcatgacgtaaattttgggtttttgtaggtaagggaattgaggctcagaacgtttaagtaacttagaggattcacagacagtgaaatgatagagctaggttagcatctacatctgcctcccagcagaaccaacattcctctaataaaatgggcatgaaacccaccaccctttaatactcccaggtgcttgtcactgggccttcatttattcagacaccaatggaacagacatttataggacatttactatgtgccaggcactgagctaggcactgacagtttgaagatgacaaaggtgtaatcctgatccttagggaattccaattaggtagcgtttttctgcattagagaaataaagtaaaggcgaatgaaagaaaatgggttcttgctataaaaagcccaaaccacctgatccctctccctgtgacccacagggggagtctgcactgagagacgccaaggaataggaagccagagaagagagactgacataaaagaggatggcttcaagatgggcgagaccaacctgttacatgagctgtgagcggcgaggacagttcctccacagtttcaaacagtttcttgtaaccaccagcaggatgctcaaccctgaaatggtggaagaataaggaagaagcccatgttgatgctcaaagtccgcagagatagaggcagagctgcaggagagaaggcactctagggctggctcaaagcctgttcactcctgccggtctagtctcagctgggtgggggtgggggtggggggagaagcgaaggtgagggcgggaggagcacgtgaggctgggggtggggaagactactcaggtatggaagggggtcccagatcactgctctgatgtcaagagacatgacctctcttttaatgtcaatggttacagtgaacttaatcctgtcctctgcagtttttccttacttcggaagacaaatcaatcaatcctactgccatcagttcacttcctgaaatttgttcctaaacagggtccttcccacagtattctcccaccctatcaacatgctcagctcacagcatcattgattttcttgcctcaaggagagacccatttatctccttcctaggggttgagagatgacagctttttgggtcaggtacctcatctttcattattcactcatattataccataattttttccccatcatctcatttctctaccaatccccaagacctacagtactttttcatcatagtcagaccaggagattcaggttctatatttttgtttactttctacatcctctgttcagtttcatgttgtaacttcaaagagtggaatctctgaccagactcaattataataattaccttttactaaacaattactatgtcctacataccataaaaagaactttgcatggtattatctcttttaaatctcacagtaacataatggagtaaaagctattgtgacatctttctatatacaggaaaagctagacttaaaaagttaggtaatttgtccaaagtcacacactaggaaatgactgggcaaggagtggagcccaagtctgtctgaaatccccatactcaagactgcttccaaaccccgggctaagtcacacaaaccccccataatttggacctgaattctagctagttgctttaatacataagcaggaaaaaatttccccaccaaaattcaagggtctttcctaaacaggtcattaatcaatgccttctcttcaggagcccttgaaatagcacatttatcatgaatccatgaaggtgttttaaaaaagtctcccagagatacttactggatagacattttcttccagttcaggatccagagttctggcaccaactgcagaatgaagaaggaagttctcagccaggggcctttttatgccttctaaatcccttaaaaggagttatggctttgggagcccttccccaccccttcagctgagggagggggaacagaagttgctttcagctctcagatccccctgatgcttggctttatttgggcttgctgttcccataacagttgtttggctgttttccagagacctcaatccttcccaaggagaatgagaacagattagaaagaaaggagctaggtgggagtggccagcgtcaggcctgagctgatcccagtcaccccactggaccttggcaccattctctggggcccacctccccctaatacctctgtgccttcattctcaccctcattcattaactcacttatttttaaaaatatctattacataccacctatgaaccagacagagatgggtattgtccctgtccctgtcttcacagatcttataactctgtaagagttatagtaaacaaagtattcaaccatgtttgattagtgctaagattggagaagtataaaatgttatggaagcacattgtgcacctctaaccctctctagcaaccttattgataccattcagtgccaatattcttccaaccaggttgaggacttttgatttgctgagaatgaaattctgcatatctttgcttgtcactaatgcctgtctgctctctgcctcaccttcttgtccattggtatatgtttggcactctgagagtatacagcatcaattcattcatatctccaatactctttcattaagtctcagttgcttgccagcacagacaaggtactgcccaaagaagtccttggaaaacaggcaagatatatactataccagctaacaaccttaacattttttttgagaaactcattaacaattttaaatttagtgtgcagttatggctacttaccctaggggtcttcttcaacaaaactgtataacaattaatccaagtgcttcccaagatatacaacagtagcttcatttccttacagtgagggcataggcatgtgatgggctccacccgttagggacagtggtagaagtcctaatggtagcacctggggcttagcatccataatatctctgcccatccaaggcagttgtagtgtctccattcaacagtggagcccggaatattgttactggctgggtagcctccaagctccatcctttagccatcccagagattgttagctctctaatatttacaatatttgcgttctgctttattagagttagttccattatttgcagctaagagccctatgcctataaaatgatggtagtataagatactaccatcatattttggggggtataatcacttttgttggatcttggagagtaatagaagaggagattaatatctatctttccacattaaaagacctgtttccaaaatatttcaaataagaaacttctcctcaaagtacaaggataatccaaatcttcttaaaccagcaataaaagcataaaatttttatttagaattaaagcaaatacttctgtatcacaaacacaatattaaacttcaataaatataccactaatttggagtgagcacttatttgcacaataccatacttttttttttgctatgagaatgctttattaggcaaaaccatatactatgaaagtgctttaaaatgcaacaggaggagatgtgaagacacaaagaacaagtgcctagtgacacatggatatcagaacacaccaagtaaagtatccacactgcttccaccctttaccaagaaaaggaaggatctaggccacctcctcctcgtcaccgtaggatgctgtggtaccacccaggaagaacattgatactggcattaggaacctccaggagaaaaaggaagtatctaagctgagatgggataaatatataaaagttagccagtcaaagggcaggtagaagagtgttcaggcacagcttgtgttatttataaaagtctagaggctaacataaggtgggaaaatagctaga

SEQ ID NO: 1882 - DNA, 4001 bp, Homo sapiens
ggaaaagcaattatgaagcagacgaggggcttccaacattctttgctaatgcattatttcttaagctgggtaaatgatacaaagaggtttattatattacttttgtatttcttcatacatctgaaatacgtaataataaattttaaaagaaagtaattcaacttaaatatcaggagggattccctaatataagatagaaagcaaacagctaaaaattttatttaccttatcgccaagagcctctctttcttttttaagttttttcttagctgccaacttttcctaaagggttaaaaaaaaagagaacaatactgagaaacaaccagttatatcacaaacacatactgaaactacaaattactaatgctatgaatactcgaactgggcggtctttgtaatctattgaaataagcatctggacgtggagttttctacctaaattactgtaagccaaatgagctggccaatcaataagatttctttaacaaagacctgctcctttaaaaaaatctaaactggcaagtttgaacatttaaaatttgagtagcttaacctttttccataaagcctcaaattaattaaagtatgtgatggtttccactgtgttttgttttgcctaactggtggcatcctaaagacgaccatggttatgctgcttgcttctcttgaaaagcactaaaaataggaatgggagctgagttttcaggttgttttccataaaaccatcaccagttattcacatattttataatcaaaatatacttctaaaatttagtaagagcttgcaaggtggcttaagattatctgtatttgtattgtcaatctatatattcttctggagatttctagatagaatgcttgacaaaataaaaaatattcttttttccccagcacctactgatcctcaatccaccaggtttcagattagaaatcatagctccaataagtcttccaggacatccctccccaatacgtgcataccagaatgagttaaacgccccttgtatgtattgaaacagcaccttgacactgaacatgagtaagaaccagtcccgggcctcagaagggccagtaagaggaggcagacacataataataatattgtgtgaacttctacgatgtgcaagaataagcaaacgttttcttccaattgcaatttaaccagaaatgagcactgcgaccttgacaagtcgtttaaacctctttacgtttcagtttgtttacctaccagaaacgtataaggataaagctgaaaagaacaaatacaattaccagaaactttacagtactaatttcggtaaggagctcctgcaggaatcagagaagcagtattttggatttattacgtattgcctccatttcagattctgcaaattaaccaacgctacctagacggaccaaagggctgagacttttgccttctgggccaggagggcgtagttttcactactaagccaactggccttacagctttccttgtgaatctagcgtcccaggaaagagcctatcaagataatcttccaccttgacgctcaggcaaaaggctgaacctagagtctccaaactagggcgaggggaccagaacacgtgggccgcgacgccacccttcccacggagccacagagaacacttttgagaccagcagacaaccacagatgtgcgccccgcgaccgccctaagcgtcaggaacaacgcgcaagcgcccggcagcccccgcctctcgcgtaccttccgctgctgctgtttccaccgcgtgaacattaagtgtcgccgctgtttgtttttaatctccgaaatgctaaagcctggcggaaaggcagccgctttcgggggttggaccccgttttccgtcgccccatccccagcgcctgcagcctcctgaagttcttcggcagcggctttccgttttagacttttcttcccgctgctgctgctcttatccccggctttcgccatggtcttggctcctttgcttccgtacggaaacggaaatagccttctcctgtgacccccttccttaaccttttacttccggggtcgcaaagtttttgacgctagatgtgttttgtgagttttagccattcaagaaaatagtaaagctgaggcttgaggaaactttaggcagtttgcccagctgtataaagagtgagatgatgagtttgggcactccttgcgcatctatgtgcccagccctcaaaataatggaacaacaacaaaaaccgtgcctggattagtttacgttttacttgagggaaacctaaaatgagcatacaaataaattatggtgagctacagagtaagacatggtatggaaaaaaaatagaacaggataaaagaagatgaagagacattcatctttttgagacggagccttgctttaatgcccaggctggagtgcagtggcacgatctccgatcactgcaaactcctcctcctgagtagctgggactacaaacacgtgccaccatgcccggctaatttttgtatttttgcagagatggagtttcaccatgttggccaggctggtcttgtactcttgatttcaggtgatctgtccgccctggactcccaaagtacgttgcaattttaaataggattctcagagtaggcttcattgaaaacgttacattgagccaaggtttgaaggaggtaatgggctaaactagttatctgagggaagagctgttaatctgagaaaagctggttatcaaggagaaaagctgtcctggcaaagcaaacagccagctccaatgctcctagtcagtagcaagccaggaaaggcaagaagtgttgagattggacaggtggtgtagagttttgtaaggactttggcttttattttatgtgagatgaagatctcttatagaattttgaggaaaagaatggtatgatcttaacatcttaaaagtatcaggctggtgcagtggcccatgcctgtaattttagcactttgggaggccaaggcaggaggattgcttgagcctgggagttcaagaccagctttggcaacactgtgagaccccatgtctacaaaaagtaaaaaaatatatatatctgtttgggcatggtgtacatctgtggtcccagctactcaggaggctgaggcagtaggatccattgagcctggaaggctaggttgcaatgagccatgttggtgccactgcattccagcctgggtgagagggtgagaccctctcaaaaaaataaataaaaataaagtaaaagcgtcattcagaatcttcttttgagaagagcctatgcaggggcagggtgtgtggaagaagggaagaaatgatagtggcctgaaccagggtaagtcttgtgtaggtggttgagaagtgattcctctggaaggtaaagttactgatggaactgaagggaggacatgaaagagtcaaggatgactccaagactttcgacctgagtgattcaaaggatggagttaccatcaggtgaaatgcgggaaagttcagatggaacaaatctgagaggtaagatcaagatttcagttttggaaatgttaagtttgagatactttttagtgatctgattggtggtgtcaactagtcagttgggatgtatgattctgcagcaggacagagaggtgtgggctaaagatcaaactttggaagtaattggcacataggtagtatttcaaaccattagaatgagtgtagatagaaaactgaaaaaagaagatcaaggactgaaccctggaggagtcctgcatgaagagatggaaagaaaaggaggacccagcaaaggagaaggagaagagaaaatcaagagagtagaatgtcatggaaggcaagtgaagaaagtgttttcctagtggttaaatttgctgtattcttcattctaattttatgaaaatgctttccaaatagcaacaagaaatcccttttgatttactgttaggagtcagttttccagaatctgccttaatttcaaattttatgtaccaatatctatatttcgtgttttgagaatccaatatgttt

SEQ ID NO: 1883 - DNA, 4001 bp, Homo sapiens
gatgccatcatacccccactacactcacctctttcccagaacaccatctccatgacttaaagagacattaagcattcatccacactcttttaagttgtggtgttctaattagtgtctcccacatctattaataagatttcatccacagcacagattttcccatttccagacatccagccatccttcagcagttaagaacagtcataacgccgaagttccaggaagggcaaggtcacaaccagaataggccgaagaagccactagtaagattatcatgttccaaagaaaacaaagcattattgacaacatctactatttgctgaaaccttattgtactgttatccatattttacaggtgaggttttgagaggtttattaacttgccaaacatcacagctggtaacaaaaagcaggagtggaatccaaagacttgccatatttcactgtcctaaagcaactacacatgtacaactcattttatcttccacaattataaagtattaccctctttatgcaaagaaaaaagcagaggtccagagagcccagagtcagaccagcaaatggtgaagccatcactcaaacccaggcaatctgtatacaacttttgagatagggtcaaccaggctggagtgcagtggcactaatataggccactgaagcctcatgctcccgtacagccctgttcttaatgcagcctatataaccctaactgctaatcagatctaatgatctttacttcgttcctgacatttccactctatctcatatcctagttacttaggaaaatctttacttgggctagtcttagcttaagatctgctcaaataaaatctagtgttccaatcccacacgccatcttgaataaaaaaaaaaaaaaaagacacctcttggccggctcatgaatttaatgctttaagtgatgccgactgtcactttctaaacagactcgacagcaggtaaatcaagaaacaaccaagcgacccaagcaggcaaaccctgtatgtccttgtgactactcacctttggaaaacacaggggtctgccctgtgagctgctccaacaccttggctgctcgcgtcagtctgtctccactctccccaacacagatgttgagacagagtttgcggatgcgaagttcccgcatggggttctccttttcaccttgatcctgctgcaacagggaagagcagcagtcaatacactcacagctgagggccctgagttttactactttctatctgcacagcatttttatttctgctcatcccaaatcgtaacgaagaccctgaatgtttaaaaggtataatgtttaggggacatcaagggaagaagacagctcggaacctatccttcctccacgaacggaacgggtgaagagaaaactcaggacagttattgagtgttaaaagatacggacactgagatcgaaccctaagaggctcagggtaacaaagagcgcccccattgtaaggccaactaaggggagtgagcgaagaaacagaacttaattgctcagttaacaggaaacacgtggttatgcgacgtccagcatcctattcggaagctgtctaaaggctggcaccttccctaagcggagcaaccgactaaggtttcctagcaccgagcaagtctcaagtccccgggaccaggaaaaggcccggacccccctgcctcagaaccctccattcaccccatctgcccccgctgcagcctcctgaccgtgcttctgagcactccgggcaagtgcccggagccgctcctaaaacgatggcagggaaagtgacagaattcaaccctgcgtccttggctcgaacggctctgctagttttgggccagcaggcattgcgggctccatattcctcgggctgcgggcgaagtagcccccgcaggctcggcctgccatggatggcgacggataaaggaaagcaaatccaggtcccagctactcaccgccatgatggagagcaggaagagaaagcggagcttccggccgagggccttatgggccaggaggcgggctcttttcccaggctaaccacagagatgaagacgaggaagagaggcgcatttggcaaagccctgcagcgtcggcttctcccttgtgggtagtgctagccactgcaggcgacgctggctgaagaccgggatctgggttttccaaaaatagtttttgaaagctcccgaatcagcacgtccttgagtttccggaccttgaggacgttctctcctcccagtgtcacgagctggtggtccttgtgtgatgagaacgccaaaactacattaaatcaatcatgcaaattatgacgcaaatttattctgtaacaacgtaaacaaatataatttatttatttatttattttttgagacggagcctcgctgtgtcacccaggttgaagtgcagtggcgcgatatcggctcactgcaacctccgcctcccgggttcaagcgattctcctgcctcagcctcccaagtagctgggattacaggcacgcaccaccataccggtctaatttgtttgtatttttagtagagatggggtttcaccatgttggtcgggctggtatggaactcctgacctcaaatgatccacccgccttggcctcccaaagtgctgggattacaggcgtgagccaccactccgggcacaaatagaatttatacaaacggaaaggagtggtggtttaagagtcccgagcttgaagacaggcagatgtggtcctgtctcgaccagctagtagctatgtgaccttgggcaagttactacagggtgcgtattcctaacctgaaaagcctgggaccagacggtttttagatttgggatttttccggattatggaatattcgcataaacataatgagatatcttggggatggaacccaagtctgaatatgaaattaatttatgttccatatacaccttatacacatagtctgaaggtaattttatacaatattttaagtaagtttgtgcatgaaacaaagtttgtgtacattgaaccatcagaaagcaaaggtgtcactatctcagccacccttgtggacaatctctggttggttggcctaaccatttttccagactgtaaatgtatatgctattgataagcaatactttcttacgcttattcacatataagtacttaacagcggccgggcgcggtggctcacgcctgtaatcccagcactttgggagaccgagacgggcggatcgcgaggtcaggaaatcgagaccatcctggctaacacggtgaaactccgtctctactaaaaatacaaaaaaaaaaaaaaaaaaaaattagccgggcgtggtggcgggcgcctgtagtcccagctactctggaggctgaggcaggagaatggcgtgaacctgggaggcggagctttcagtgagccgaggtcgcgccactgcactccagcctgggtgacagagcgagactccgtctcaaaaataaaaaataagttcttaacagcaaaatatatgctatgtcattaatacagtgaaaaagtaatgtgttcagggcaactaagcagcagaggagcatcaccagaaaacctggatcagctgtgaaacaacagcgacccaccccccctccccccaccaccacacccgaccccggccccgccaaccaggccaggtgctgtggctcacacttgtaatcccagcgctttgggaggctaaggcgggtggatcacttaaggtcaggagttcgagaccagcctggccaacggggtgaaaccccgtctctactaaaaatacaaaaattaaccgggcctggtggtgcatgcctgtaatccgagctactcggaaggctgaggcaggagaatcgcttgaaccgaggagaagaagcttgcagtgagccaagatcacaccactgcactccagcctgggtgatagagcaagaccctgtctcaaaacaaacaaacgaacaaacaaaaaacagcgaccacaagtggcaggctttcagtctccacctatgatgcagtgttttgattaaaagattac

SEQ ID NO: 1884 - DNA, 4001 bp, Homo sapiens
accacccgagtggcaataaggatgtaacttacaaaattggcagcatccatgattccatcttctacagggtgggtgcaatcaagagtgaacttcagaacttgcttcttttttttgccccccttcaccacaagctttttctaagaaaatacacaaatgataacagagatgaagtttcagtcagtcggaaaaacaagattaacagaaccagaaacgtcataggtataaaagtccatacaaatacaaaactaacggaagtgtgctccctttgccagagggccaagaggcatcactgcctgagtgccagaggtataatggggcagatgctgctgtacaagcttggggcctggggtcatgcccttttgatggggaaatcattctagcactcttgactcactcaaactttccagtctccccaatctctacaggcatgaaggtctcttagtttatgaaccacaataaaatgaacacttccttttgtttgccctaacattcccaatttcaaaaaaatactatttttccaaaattagagtgcaggcatacaaaatgccttgcatacccacaattttcatatgaaatcaatccttgtcctacatgttcagagtagggtcctgatccgtcttagctcatctcccttaatcctgtctcatccaccttctcatgaagggagttgcaaagtattctaggtgcctgtccactccagcttggacaaggttaaggctaaaacctagaatcttattacaacactaccgtcaagaacttctgacattttgattcgcttcatctatgcattagtacttccaaaccacccggcaaagcacatcctacaaggttccagtttcttcactcttacgaagaagcttgtgttaatcttatctctctacaaacttgacaccattaatgcacttgtgcatcgtaccaacctgtactttcacgtttaaaagctctgcagaactaaatagacttttccaaaaacacatcttacctcccttcatgtttaaaagaacttcatctaaaacttgtgttaactggatcaacttttcaaacatttggccactacaaaaatcactgatttattttttacaacgtctcttcgcagtaataatctaagaggggtactttaagatctattccgaacacacacaatcaatcaagagacctacccacaacgggcttgatacttctccatcaaggttttaaaccaaaaggcattcaaaagcccaaccagacagaaagagcagaagaaccggaaatgttaaccagggagtcccaacaaaagaggaaaagtaggatcttgggacgaagaacacggaaaaacaactttctcaaataacctaggaggagggcgccgcacagcccagtcccagcatagctaaaggagaatgcaatgagagccttctccctacaccactgcaacacccgtttgggtctgtacagtgcgccctgataaactaatttcctctggggacgctaaaaagctcctcaaacccaggcctcctctccgaaagcacgccgaccaagccgcccttccgcggattcgtccccgagtcttggccgtggacttccgaatgcgcggctccccagggtagcaggtcccgttcttcttccccgccctccacccaggtaatcaggcccccggccggggtccgaggaccagtggccggcccagaccgcagtctccaggctccagctccccgctagcccctagctggggccccgggcctccgagacctcccggatctccctcacgagcctcgggccgcggcctcctccgcctacaacgtgctgggatcggcaggggctctggcccgctccggccgacctgccagcccaccccagcaggacgctgcagggcgccgtccccagcgagcctgggtagatgccgggctcggcgaggcccacgtgcctcccctggagccgaggcctcacgcggagccatactaaccacaggagccatggcggcagcggagttagaaagggaggtgagcgaactacgcagacgcaaagagcccgcagcgcgcaaggcacgcagggtccaggccgcactaatcactttgccacgcccctcgtccgccaccttttctcttggttatgtacgataggggagcgattggtttttcctgaatgcaaaacgcgtcctctcccaggcctggagggtttctggggaaggaaggaggcccggcgggctgtcccactgcgaacgatcggaggggggaagccagactggacgagcccaaagataaataaaggggttggctttactttttgaaagtcttgggaagaaaaaagaaataaggaaattcactatactgtaaattaccagctagtgggatggaaatcgaatctactaatttggggaagtgggaaaattccttgtagccaccgggaaatttcgttcagaggtcccaatgccagaccactatggcttcctcaaaaagccccagcttggaagctcatgcccaggggctgtctcccagtgcctgtcctttttgctgtagccaggccgccccctcgctgatcaccactccctagtttcccagcccaagccttctagtttcccatcccaaaccagtaagtagttgaggaccaccaggagatctggaaaatgcagattccaattccagcggtctcagtggcctgaaattctgcatttctcacaagctctcagacgatgctgatgctgcgagtccatggaccgcatgtggagaagcaaaggtcctcatccccaggcccacaggtcccttgaactgggctactttgcacccagtcacccgctgcgtcctcacggaattatattccaggatcctgaattgtaaatcactcagtggcacacacactctccactccctttacctggcttcagtgtactcacctagcaaaagtccaatcaccagaagagactgtgctgatgggtctagctttcaactcaggcctcaagccggttgaccaagctccaaagccagctgctgttcttggctctataatgatcaggctgggcctctgcaaacacttctgctttccagctgatcccggtttggctctatcaatagggggctttgcttcctgcttgctcctgtcctgtctggtgtcatccactcttgcttctttatcctggaggtggcagttggaacattctggaagcagcagtggaatccagtctgcacttattccaacatttgcagaaccagcctcgttttctcctcagagacaccagccctagcagagcagcaccctctcctcagatgtctgagtttcacctccctgtgcccctcctcaagcatctacattttaataataccacctaccagtggtagctacttcctgcagttgctactgttagtattataccccgacagttacctaaacacatctttatacctagttaacaatcctttatattaaattctctcagttaaaaactataatgtgttgtcttttgactggaccctggctgataacggaccctaagcgagccctcagggctactgacaatcctaaatctctcccccaagggactatttccctttcttgttgtttttaatagagacagggtcttgctctgtcaccaaggctggagtgcagtggtgtgatcatagcttactgcagcctcaaactcctgggctcaagtgatcctcccaccttggcctcccaaattgctgggattacaggcataaggcactgcacctggcccaaaagactatttcacacctcagtcataatgccagccccttcttcctaaacctccctctcagcagttgacttttattgttctttcctttttctttcttttttttttttttttttctgagacaggctctcgctctgttgcccaggctggagtgcagtggtgcgaatacggctcactgaagccttgacatcctaggctccagcaatcctcccacctcagcctcctgagtagctaggaccacaggtgtgcaccaccatgcccagctgcatgtttttttgttttgttttgttttgctgttgtagagagttggtgtctc

SEQ ID NO: 1885 - DNA, 4001 bp, Homo sapiens
gcagcctcaacctcggggctcaaacaatcctcccactgagtagctgggactacaggtgcgccccgccatgcccagctaattttcttacattttttgtgaagacaaactctcactatattgcccaggctggtctcaaactcctgggctcaagcaatcttcccgaagtgctgggattacaggcatgagcgcaaccaagagcattttttaaagtaccaagttcccaggttccaattctagacctactaaaaggaaaaattattcactggatgcttttggaggtgctagacagcccttctaacacacacaccatgtgctttgcttcccaagcacaatttctctagcaataaaaaaaggggactgtctagaatacaacttacctgacaaatgatatctctgtttgtcacacgaactatcatcctgtatttgggtgtgttgtatttatttttatcttgtatcaccaagcgtttccgagcataataatcagttttaccctctgaaagaaaaaaataattgtagaaaggatactccactgcatctgcaaagcagattaatattgtaaacacaaaaaggtgacagtacctcgtcgtcttctaaatttcacttggtatctcttaaagtaggccttattcttaacaactttaacaaaccccttaaagaaaaaagaatgttattaaaactttgatgtcttagcctatgatacttttgacataaattaaccatgtaacaaagtaacacttgaacttcaagagtaaacagacaactgtcacttgtagaatcccaggtttcacaagcaactagggtcaagaatctttttcctctaccttccatgtcacagactagtagtttcataaaacaataaaaatgaatccttagagaaatatggaataaaagaaacatacaaaatgcaggccccaatttattacatttaacaggtataaaattattgttatattgctttcaaaaggttttaaacgctttcaatttccatatttgtttcttcaaggaccagcaccggtaattgtgccaaacttttgcgaagcactgctccagacagcaatcagtgatgccaaacgtcggtttgttcggaacacgctatgtcccacttcgaaaacctagcctcaaataacaactacgtacctctctcgcttcccatgttatgtttttcaaaagcctaaattacctgccacaaagcttaactgggcaagagcacattcagcagtaattcccccactaaaacagcactgttccccatcagctaaagcaacatttcatcccacccttggggccctaccccaataattaaaaactcatccggcgacggactctagaggaagaggcaggaggcacgtattccatgttaaaggagcttccggggcccagggacccctcggcctccaagctccactgacaattttggcttaaaagccacttgctcagcccacgggcacaagcttcctaaatctaagacttgccggctccgacattctcctggaaaacccacgaagtactcggtactcggaggtcgagtgggacccgaggacctgcagcccccctccattctggcgttccccagctaggctgaggtcgactgcttgcgacctctcacgcccggccgcttgccagcgccccctcacactagacggcagtatccgcactcaggctgtctactaaactcacccttctccccaatccgccgtccaagctcacgcaacccttcttcgccaacccctccccccaagttcgcgcaccgggcggcagccatttaaggccacgctgggaactgcacctcgaccaagtcagagctagcaatctaacgccatccggcccctgcgacgcgcgagacgggccctaggctggcatacgggcaagaaaagggaacctccatgcatctaaagccccgagaccgaggcatccactcaccatcctgcggaacagagaccggcgtccgctgctcgacagagacctgcaggcccagcggcgctagggggtgggaaaagggccacagcccttgcgcaggcgcagtatgtagcgcggacggtcacgccagtgacgtgtgaaagagagagggcgtcggccacaaggcgttttacgttccgccccctgctggaaggagggtgaatgcctgcccaagctctccaggttccaatgctcggggtatctcacaggatccgtgcggtgaggaggagcagggaggattactggagcctttcgctttctttgctacagcgttttgttttgttttgttttgttttgttttgttttgttttgttttgttttgttcataacgcattttgcttttctaagcaggaaaaaaaaaaaaaattaaataggacaagtttgcttgggagccctcttgccttctctgggctactcattctggtccaagagcatatggacccaccctcccatctcacccccaggaagccttccctgagagccccaagcctgggataggggccactcctctgccttcctacagcagctttctactggcttcagcccaccacagactgtcaacttttcgaggtgggccctgatgtccacctctgactctccagcacctagcagggtatcagctgctcaccgttagagctgggagaagggacggccaaccaggatgacagggttaagtgactccaaaacactgccactagaataaatcaggattaggatgccaattacttctgattccaacttgtaattccttatataataggaaaaataaacagagttcgctatggccgatgtcaacagagctctagaggagaaaacttaaaacacttttcacaggaagtgtgattctacttttgtggagccacctttgaaagggtaaagaaagaggtattcaattcgtatttatagaaaatatttaaaaaccttcattttggtggattatcaagttattagcctaccaaaggtgctccatgtcttggtcaggccctgcttacactggaggcaaaagcatcaggaaggaaagtctgcctggaaacaggccgactcctaacttctgcatgttttagggcaagggttcataggaagacccacatactattcatctgaatatttagaagttgtgggccgggcacggtagctcaggccaggtgcggtgggtcacgcctgtaatcccagcgctttgggaggccgaggcaggcggatcgcgaggtcaagagatcgagaccatcctggacaacatggtgaaaccccatctctgctaaaaatacaaaaaccagccgggcatggtggcacgcacctgtagtcccagctactcgggagactgagacaggagaatcgcttgaacccaggaggcagaggttgcagtgagccgagatcacaccactgcactccagcctggcgacagtgagactccgtctcaaaaaaaaaaaaaaagaaagaagtcatgaagcaggctggatgtgctggctcaggcctgtaatcccagcattttgggaggccaaggcaggaggatcacttaaacccaggagttcgggaccagcctgggagacttggtgagcccctgtctctataaaaaataaaatccaaaaaaagaagttatgaaacaaacaacatgttaaattaaatatactttatcatccttatccctctccttcttaccttataaatccataacaagaaaattaaaaatatgtatacctattccccttggtcacagtcaggggtctgtggctagcatggctggttcagccagtgcagttggtgacaccaggagctagggggtaattgtccagcatcctcagccaacagcatcttattcaagtggtaaaagttaaaaaaccaccaatagtgggatgaattaacattataggttcacacctgtaatcccaacattttgggaggctgagccaggaggatcacttcagcccaggagttcgagaccagcctgggcacataagaagacctctatctctagggaaaaagaaaaaggaaagcaaagaaaaaataaattaacattatatgcctcctgatgcactgagaagaacaca

SEQ ID NO: 1886 - DNA, 4001 bp, Homo sapiens
ctcctataagatttgaaacgttctgcaaacaatccatgctttaacagagctcgtttctgcagtaaagcagcaaaatggaaaaatctccaggataaagacaaaaaaaacataactggagaaaaaggtactacatattcaaaaagcacatttcctgtgcacattacccatgagatcaactcaattgtgtaaaaaggtatttcaggtaattaaaaagtaacggggccgggcacggggggctcacgtctgtaatccctgcactttgggaggccgaggcaggtggatcacctgaggtcgggagttcgagaccagccaggccacaatgatgaaaccccgtctctactaaaaatacaaataattagccggacatggtggcgggcgcctgtaatcccgactactcgcgaggctgagacaggagaatcgcttgaacccgggaggtggaggttgcagtgagccgagatcgcgccactgcactccagcctgggcgacaagagcaaaactccgtctcaaaaaaaaagaggaactggacacgctttatatttgaaggtattaacgatgatactgactactgtatcgcagttgtttctggtcagtatccaagaaacctgtattttattgcagcaaacacaggtacagggaaaacccggtggtgcctcagatctatgtagagctcatgctgcttcttaacattcatccaggtaaggctctccttactacacatcacaagttttagatacattcatccagacaaggcactcctcattaaacatcactggatttactactgcttaaaaccacagctcgcctaccatcaggaaagccagaaatcattaacacgtcaaggcctgtaagaaataaacagacgctacaatttccgcgaaggttcggaaaaatcaatacaccttacaaggctctgaaatattaaaaacaatatacgtaaatctccatggatctgggcccaacggcccaaggtcacaacaattcaatggctaaaaaacccaagaaatgagtctcctgcaattcaggacaatcctggctaggaatggagtctgggtttgggaccactggggtcaaacctttaatgtgaacaaccccaaccaaatgctgcggctccgtgggaaaaccccaagcgtttcaggccacacttccttccatttccccagtcttcccttccctagtcacccccaacactcacatctccggagccacttcatccaatgatagacgatagtactgtggtgttttttgttctctatacaccaagacgacaagccttgaatggactccatggtgttggttaccgactggaattttcgatccaacgaggactccagagcccctgccgaagaggccgacgaggaggaggccttactgctgcctccgccgccgccggccgccatcttcccggtttgcacaagcgctgctgctcctctggcggcggcggcggcggcggcggcgggagcgggcaaaacaatcactgcgagtgcgtgaaagccgtaggtggggagggaagctagggggtggggatggtgcacgcgctgggctcttctggaggtacggacgggaacaccagctgctgggcacgctggcagctcctacacgctgcaaggaggggctgcgggtctcggaggttttatcaatattgttcaaggggtcgtgtttaaaccagtcagtaatcacggaaaaattacgcagaaaacaggacctgcaaagcctttcaaaacgcctgacgccgaaactaatcgttttatacttttcggctctcagtgctaaggcccttccccgcccctgttcccacactcctgtgagccaggtcgggcgttaatatcttaaatgtaatactacccgactgccccttcagttgcagaaatctttctttcctttagactcgctagcacagaaaaggtccaaggctacctagtcaggattttttttgcaacgcaatagcagcaaaggggcagcaacagtatcgcgcacgcgccacttggccccacccccctacccctgcttccttctcaaccttgaaagcagagggaggcgtgatggcggggcaacctgaccaatcaggagtggagaaccacaagcgcgcgcaggagctctgaagcccccagggcccaggaggcgctacgattatttttgcgcctgcgcagaagataagcgtgtaacgggatggaaggaaaaactgggagggatgggtgagggagctggtataactaaggttagccgggtgggggggttcccctgccccgccctttgctgcttttggccgctctcttgggtgtgttcagctcacacaacagagacagaaaattcccaccactgagaccactgttagtcttcagggggctgcagccatcgcccccaactcctcggaggagcaacgcgcgacaaaatggctggcagccatcttgcggcaccacaaaagatgcgcatgcgccagatccagtgagccattcactacgcagactccgacaccaaaccgtatttattgctgcccatagaagataacattcacagccgcttgaccatttaggttacaggaaaaggaaataaatgaggaagtgaaaggaaattttcctcataaaatttttcgaggcgaaaaaagaatggcaagatgtgacctcattttcgccagctatgatacaatcttaaaattgcataatacattacagttttcaagagtcttacgtaactattatatgaaccttatacgaaccattttatcgcaggtatctatgtaaatcctctgagctaatttaaaggctcctgtgttcccactaaacatatacagttttaattcttttaacgtctcctcactgcggccatgcctcttgaggcagggaacctgttttgtcaagttcatgtccactattcattaattcaacgagttgttgaacctcttgtgccaagtactgttttagatcatggggagcaaaacagacaaaaatccgttccctccgggatttagtggcaggacaccaccaacaagtacatttcagacagtattaaattctgtaaaaaggtgaagcagggtaagggagaaaggggtgtgtgtgtgtgcgcgcgtgtgtgtacgtgtgcacggcacgcacgcgccagtataagaatggtggtatggtgaaccaggaagtcttctcgaaagaaataactcgatctgaacattgagaaaaaagcaaccaagcagatatgcgagacggggagcggaacatgctggcattaggaacagcaagtgcaaaggctctaaaatacagtctcgctctgtccctgccaaggctagagtgcagtggcactatcatatcgcacagcagcctcaatcccccagactcaagtggtcctcctgcctcagcagcacaagtagctgggactacaggcctgcaccaccacacctagctaaaaaaacaaaacaacaacaacaacatttttttgagagggggagtctccctatgttgcccaggctggtctcaaactcctagcctcaagcagtcctcctgctttcagcctcccgaagtgctgggattataagcttgagccgccatgcctggtcctgaccccacattttttttttttctgtaactctagccaaagacccacttttttatagactatttttagagcagttttagattcacggcaattgtgtggaaagcacaaggaattccatataccacctgcccccacacatgaataccctcccccattatcaatgtcacgcaccagaacgatacatctgttacaactgacaaacctacactgacacattatcacccaaagcccatagtttacattagggttcgctcttggtgttataccttgagtttggacaaatgtgcatgtatccaccattacagtatcatacagagcagtatcactgctctaaaaacctctgtgttccacctattcatccttccctcccccttattcccctagcgactactaatctttttactgtcttcatagttttgccttttcccgaatgtcatataggtgaaatcattcagtatgta

SEQ ID NO: 1887 - DNA, 4001 bp, Homo sapiens
gcaacttctacattaagtttccagataaggcttctgagaactataaataaagcatcctaagctgtttcttaaaactggtatgtcagactgtattgtaaagagttaactgtcggccgggcgcggtggctcacgcctgtaatcccagcacttaggcaggcggatcaccaggttaggagtttgagaccagcctgaccaacatggtgaaaccccgtctctactaaaaatacaaaaattagccaggcatggtggtacacacctgtaatcctagctactcaggaggctgaggcaggagaatcacttgaacctgggaggcagaggttgcaatgagtcaagattgtgccactgcactccagcctgggcaacagagcaagattccatctctcttataaaaaaaaaaaaaaacaccaaacacaacacttgagatagtatcacagtttaaaaaaaaaacaaatttatccaatgagcctaggtggttaaaaatgcccccaaagggacttttaaagtacttggccacttacgtgccccaaatgactctaatattctcctcttcctggttgccccagaatacttgagacaggaacttcctaacacttaaacaagacaataaacaggatttatccaaaatgtgtttattgagatggtttcccactcatcttgactcagagtgcttttagtgctgcttcctcctgaaggaacatcctggaggaaaaagattcagagattagctgtcatcagtacaggtattctgcccacctctcccaaaaaagcagatgcatgatgatccacccacagaaagctacatcttttttctcaactcttagctacctgcgcatttgtatcactggttacttcctatcaacttaagcccttttatcacccatttatccccgctttagacagtagtgctttgagattaatacatagcttttggtagtatctagttaaaacaaccaaatccaacacttcttgtctaaaaatttacattatagatgatccctgtcactgttaagaccgaaaaatcctaagaaatgtttccatttctaaaaatcaaactcaaagccccaaatcacattagtaaaccatttaccttctgtaagccttgcttttcctcctgtaggctggcagaggacagtggagcagccaacacacaaaactaccgtttgtgcatggctaaagaccgtggtgattttatagcatcctgaaagaaaagcagataacatttttttcctctattacacccgtctttcctgcacttatgcccaactcatcatccattacattgtttcccaacacaaaaaaacgtaggggttgtatgtgaaatgtgatgagagatcacggtgaaatgaatcactcctcctaagatgcaaaactttgccagtctcatacattcaaattttaagagtatcagggaaaatattttccacaggcgaagaaactgaagctgctgcacagcttcaaggatacgagacagctaacactacaacattttccaactgttgaggtccagtgctttccccactacagcaagccgtctcctcacctgggcatttcacatccatgaagtaggaattggggctctgcaccaggcgtttcttcttgtgtttcctcttctcctcttctggagagggatgaaggagatcctttgcgagctaagagggacagaaatgcagagatttagaaaccaacagcgaaaatgggatggtcgaaaatagcccccactgtcacacaccggggagagctcgcccctcgccgcccctggtgtctgcgcagctgggccgccatcttatctcctctccgctcccgtctatgcgggtggcccgtgggccgctgcggtccctggagttaatgtcctaagaagtgcagagggtaaatgaggaccctctacgatccgaaatcagcgtgaggggagagttcggacagaacagcgagatctccgccgaaacctggaccaaagcactcacaggcatgttctcgtgtgcgtaggtcgtcaccgccggaaaggagcgaaagcggaaatcctgccccttatatagagcacactacaggaaatgacgcaaggatcttgtgccaccatgtttggaacgtcttactttgatccgccgcagtggggagacaagggagctgccattttcggaaggtctttaactgttagttgtgacacatatgcgtcaccatgttgagagggttaccttgctaatttgaggtcagcgtttgatcactatccagggataaatggacacttttaaaattttgtgccataccttgacagttggagcctaataaataggaaaggttgaggaaaacaccagggagaaggagccatatccaggacttccgtcctattttttaaatacctatattcttaactctttttctattggtttaatttaacagtttaggccgggcgcagtggctcatgcctgtaatcccagcacttagggaggccaaggcgggtggatcacctgaggtcagcagttcaagaccagcctggccaacatagtgaaaccccgtctctactaaaaatacgaaaattagccaggcgtggtggcgtgtgcctgtaatcccagctactctggaggctgaggcaggagaatcgcatgaacctgggaggcggaagtacagtgagccgagatccactccagcctgggtgacagaacaagactctgtcttaaataaataaataaacaggggagacatggtttggtcagtgaaaagaaatagggaagactcaaggagataatgagaggtgagagaatggacaaaaagagattgaatagtttagcttgagaagggacaagcatggacacggaaggtgatggggataagtgaaagatgccttctttttttttatttttatttttattttttttttagacacagttttgctcttgttgcccaggctgtagtgtgatggcgccatctcggctcaccacaacctccgcctcccgcgttcaagcgattctcctgcctcagcctcccgagtagctgggattacaggcatgcggcaccatgcccggctaattttgtatttttagtagagacggggtttcaccatgttggccaagctggtattgaactcccgacctcacgtgatccacctgcctcggtctcccaaagtgctgagaatacaggcgtgagacaccgcgtccggcctttaattttttataggcagccagaataggctcgagagagactcccttgaataattttttcttgcccgggcgccgtggctcacgcctgtaatcccagcactttgggaggccgaggcgggtggatcacgaggttaggagatcgagaccatcctggctagcacggtgaaaccccgcctctactaaaaatacaaaaaattagccgggcgcggtggcgggcgcctgtagtcccagctactcgggaggctgagacaggagaatggcgtgaacccgggaggcggagcttgcagtgagcggagatcgcgccgctgcactgcagcctgggcgacagagcgagactccgtctcaaataataataataataataataataattttttctttgccggtcgcggtggctcaggcctgtaatcccagcactttgggaggctgaggcgggcggatcacgtgacgtcgggagttcgagaccagcgtggccaacatggtgaaaccccgtctcgactaaaaaaaaaaaaaaaaaaaaaaaatttagctgggcgtcgtggcaggcgcctgtaatcccagctactcgggaagctgaggctggagaatcgcttgaacccaagaggcggaggttgcagtgaccagagattgagccattgcacttctgcctgggtgacgagcaaaactttgtctcaaaaaataaaataaaagtaaaaacaaaggttgggcgcagtggctcacgcctgtaatcccaggcctttgggaggcagaggtgggtggatcacctgaggtcgggagttcgagagcagcctgaccaacatggagaaagctcgtctctactaaaaatacaaaattagcagggggtagtgc

SEQ ID NO: 1888 - DNA, 4001 bp, Homo sapiens
ctggagaagcagaggcccagacaggctgaggactgactgaggatcacacatcgtttctggagcgaagctcctgaggaaattgcgtccccctgccccaccaatcccaggaagtccgctggtcttcccctctcacagacctgagatgttacagaactcaaaactgagatgagtttcccagttaaacctggctccctggtgaagctggcccctgcctcaggattccctaaagagaagcaggaagtggtgccccaggatcgagctcctgggtgtccaccctccctatcagcataaagtcactccccagcctctcccagccctaccttctcctttggaggcctggtcccaggggcgtgcctgggcaaaggaatccacctctgagcaccacccccaggaccttgcgccccggtcctagtagcggggtggcagtacaggggctgcagagggcagtgttcctcacctcagagggtgagtcagcgagagaacctctgagcagcctagcagtgcctgtaaaatccccatggcaggaatcccagagcaatttactccaaattgctccttcaggttggttacctaatcctgccgcgcccaccctccaatagccagtgtcggccatccctttaaaggggcagcacaccctgggggctggggaccctgggtgctcaccctgatctaagcctgtggtcctgagaggcaggacacttggtggctgccctaggtaagagagggcagaggaggggactgagacaggggctccaggcccaagctgggagaaagtcatctcagctcctgggctcaaatgaggtctccattccctccctgcatacccccaacaaccacctgggaaggagaatatcacctgcttccttcccagcaagaggttaaggaggaagttttccaccagctcattcaggggcttgaccttgaccctggggtcaaaaggcacaggaagaggtggccttctgcacgcttagggactggagccacagagccctcaagggaggtcaggagctgcttctgagagagaaggagctgggttgtctggggagtctgggctggcagaagccaaactccccaagggcccagcccttcctaccggaaggggcataagaagggaggcaggcaccaaggtccccccacgccctgccaggaatcatcttcacaaggtctaagggctcttccccactctcgtctccacagcctggggtagggcacacaggtgtcctctggccctagcctcagggcaaagaaaaccaggagttccagccccagacgggtggtgccatcccacactccgcatccgccaggggtcaagaggagcaatccttctaggctcagcagcggtgaagccagaagcagggagctcttggcggagggccctgggagaagtgggggtcccataacccctgtctctggtagaatcccagacatctggcactgaagatctccccgtctgcattaatggaggaagctccgacagctctggacagatgccgggacgggtcctaggtgtggggtgaaggcgaccagatctcagcgccccataggatcccctctcctggctatggcggggaggtagtcggcgcttggcggaactgtccctcgcacacgcacacccgggcataggggggtggagccggacagtgggcaagagatcggagggcactcgcgccctcgcgggcgcccgccggactgcagcggcgcttcgggccgccccgcccctgtgaggatccgggctcgccggccgcgggcgcccgtcccccgccccgctcactcacctccgggtccagaggcactagctccatgagcggccagggctccttgagctgggcgagcggcatctcgccgccgccaggtcacccgcgctcctccggcggccccggctgcgccgcctcccgggtcctggggtccctggctctgcgacccgaaccgccgcgcccccccgagcccctcgcgctccggctgggccgtccgccgccgccgccgcggcactagcacttcggctccctccgtcacccggcgccgccgcgcccattggctacctgcgcgggggcggagccggagaagccccgccccagcccccgcggcgcggcattcccagcgcggacccccgcccccgccgcgccccgagggccggccccgcccctgccgcgagcccccggcccgcgctcggctccgccggagaggccctgctggctccttcccttccagtggtgtacccctggacacaccacaccagggccaccgttctcccccgctcagctcttttggaatcccagcccagatgttccttctccttccaacgggagagaagcaccttatccccgaccccagcacacacattcacactgggttcctgggcctgatctaggctgaggcttggaaggagcctgagacccactccccttaggccctcaactcaccaggccctagagatcccctatcctctaatttctaccccgccctgaagctaacactgtgatctccgggcgatctcagtgccccaggccaagatgggcatcagcagttgttaccaccatcaggacccatagtgccaccacagagtgattgattgatcgattgattttacataatgtatataaatattacatatataaataaatatgtataaataaatattatatatatgcacatatatgtatgtatgtgtgtatatagtgagagagagagagacacgaagtttcgctttgttacctaggctggtctctgactccccggctcaagtgatcctcctgcctcggcctcccaaagtgctgggattacaggcatgagccaccgcgcccggccaagagtgatttcttaatatgcgtttttgcaatctgtgctctgccctatcacttgaagggggtcctttcaggtcaggtctccctggagtcacctgcagccccagctctggactagtttgggtttgcgactctctgaggagggaccaggctcccaggatgaaccgaggcttggtgggacttggagtgaaaggccagggagactggttgccccagagagattcagcctccacctaaagagccttaggggtccgggtgtgctgagatgtattcacatgtgaggagtgagcttgctggagggacaagcttgctggtttcgcaggaagactggtcagttatttgcaaagctgttctaaggcaggggaatgggaaggaatgtttatcaaaagcttcctgcgagccatgtgatttccttgaatgattaccaccacctagtttacaaatcctgaaacaagctcggaaagatgaagtgacttacccaaggtcacacaagaggttgagaacagactagggcttaaaaaaatcaaagtgtcacacctgtaatcccagcactgggaggccgaggcgggcggatcacgaggtcaggagattgaaaccatcctggctaacatgatgaaaccctgtctctactaaaaatacaaaaaattagtagggcgtggtggcaggcacctgtagtcccagctactcgggaggcttaggcaggagaatggtgtgaacccgggaggcggagcttgcagtaagcggagatagcccccactgcactccagcctgggcgacagagactccatctcaaaaaaaaaaaaatcaaagtggataaggatttctccagaatccacgtgctcccccttttccatggctttcccagggtaggacctcagctgttgaactgaattttgagtgaaaggactttggaacccaacaattctgggtttgaattccagctctgctaccttcttaacacagggaaactcattttatgcctctaaacctcaatttctccatctgtaaaatgggaattataatctcaatctttcaggtatataggacaagattcattttaattcaataaatttacagctatatattttttatttgttttttagagacggagtctcgctctgttgcctaggctgcagtgcagtggtaaaatcgtagttcactgcagccttgaacttctgggctcaggcgatcctcccacct

SEQ ID NO: 1889 - DNA, 4001 bp, Homo sapiens
gccgggtcagtggtcacactggttcccaggccaagtggtcagtatccaacccaaagcccactaccaaccatcttcacaccctttgtaagtccccagaactctaaccttggctcggggctcccttctgaacctctctgccatccagctctgtggccctgcctggactcaccctctcttgcctagcccagctgcctccctgggctccctgcctcttcactcacgcccttctctcaggcccctgagttaggggccacagaggtctcccccagactcttctagcatcaacagtcagaatgcctctgcttgaccagcttggtagttgagggccccgccccctgacaaacacattgcatttaccctattaccaccttccagaccttcacagccagtcactagcacttggcttagggggaggaggattggctggcgagggatagctgagaaataggcctgtttctccacctttgaactaggtgctcctgaagacagagctgtctcccttgccagacccaaggcccttgaagtctgggctgcctccctcagccaagcctgggttctgcacagggaggtgtccccactcacctttcagcgttgccttcttcagcaccttcatagcatacaggtgcccactgtcaggccgggtgactttccgcaccaggaagacctgagaaggcagagcaggaagcagggcagaagatgggagaggtctgagtccaggctgacctctatcttctctgagccccaagctgacctttttgctctccctgggtaccaaggtgacctctgatcctttgggcccctaggtgacccttgacccccacctctaacatgacgagtgttgccttcacagctatgggctcatgactcactttgccaaaggatccctggcccagaaccttgaggagctcgaaatgggatggatcagccttctcagagccagccttgacgtggtgcgtgatggagatctccttgaggacgccctcatcctgatggagggacagagctggtgggcatggtgggccccatccaggcagcaggaggctcccctgcccaagtccattcccaccagaccacagcagatggaacctaaaggcccaatagacgacttccctgaagggctagcctccagggtcatcgatttcaaaagagcctcaaagtctggggaggtcaaaccagaacaggcaccgctcctattgctcacgatgctctggcctggttaggcccaaagggatgcccaggcatggccaggctgagtcaaccccaggctctggctgagacccagagacctgccccaggtccgcccgtggggcttccctccccctgttgttttagtgttgccacaataggaagtaggcttgttctcatatggggaggtagagctgggccttcgttcctggtcaggatgggatgaggggatccctctggtcagcaggacagggctgacgtgcacaaagacccaagagtcacccaaactcccccatcaactaggtaagtgctggcctggggcaggtcagagttaaggccaaagactgcatggctcaacttcccaaacttccctcatacaaacctactggaagccccttgccaggtcctagcctttccaggactctaccctccctccaatctgctgccattgccttgaagccctgaagtgcctcctcacttccccaggaagcaagtctgggcagggtccagtcaccctgcagggccaggcctgggccaggacagcccaaagccagcttatgttaagctggcttcccaggcacctgctgcaagggacacagccaggtcaggaccagacattcgggcacactcaccgagtcccgctgggggccagagccagggccagggacaggcagagaggtctggctgatcctgggccgctgcttcctgggaagccaggggatcagggcccagagccgcagacggggcggcttgggatcctgctccatccgcccagcagggccacggcaccatggcaggagcaggcagagtccggggctgccgcagtggtggccgggaccaaggcggatgtgcagggtaagggcgggggctgggcctggcccagggcagccaatcactcagggcctgtggtttcccagcaccaggcctacaccctcaccacgttcccttcctctctctccccctctcctcagagcctgagggctgccctctggccgttcccccatcctccctgtgggcctacaaagggaaagtcccctgccaatgcagctgctgagcagactggtacccaacagcagagaggtacccaatagcaaacaggtacccaacagacaaagacaggtgcctgatatgtggaggcagacgaagagagacacccaacaggcagaagcaggcacccaacaggtggaaacaggtaagaatggcatccatcatgcctgtaatcccagcactttgggaggctgaggcgggcggatcatgaggtcaggagatcgagacgatcctggttaacatgatgaaaccctgtctctactaaaaatacaaaaaaaaaaaaaattggccaggcgtggtggtcagctcctgtagtcccagctattcgggagctgaggcaggagaatggcatgaacctggaaggcggagcttgcagtgagccgagatagcgccactgcactccagcctgggtggcagagcaagactccatctcaaaaaaaaagaaaaagaaaaagaaagaatggcatccaacaggcaggggcaggagagaacacatacccaacaggcagggatggaggataaggacacgcacccaacaggcagaggcaggaggaattcatatccaatagaaaacagatggagacacgtacctgacaaggggaagcaggaggggactcatatctaacagacagaggtggacagagactcatccccaatgtgtgtaggcagatagggacacaagcccaacagccagagacagatggggacatatacccaataggtaaagacagatggggacatgtacccaacaggcaaaggcaggaggaacacatctccaataggcagagacagaagagaataccaacccaacaggcaatgacagaaggggacataaacccaacaggcaggctgggcgtggtggctcacgcctgtaatcccagcactttgggaggccgaggcaggtggatcacgaggttaggagatcgagaccatcctggctaacacggtgaaaccccgtctctactaaaaatacaaaaaattagctgggcgtggtggtgggcacctgtaatcccagatacttgggaagctgaggcaggagaatggcttgaacctgggagggggaggctgcagtgagccaagatcgcaccaccgcactccagcctgggcgacaaagtgagactccgtttcaaaaaaaaaaccaacaggcaatgacagaaggggacatgtatccaaaaggcagagacagatggtgacacaaacccaacaggcaaagacagaaggggacaggtatccaacaggcagagacagatgaagacataaacccaacaggcagagacagaaggggacatgaacaacaggcacctaacatgtgacatgtacccaaaaggtgaagtcaggcacttatcaagtggagacagagattggaacccaaccacagacagaggtaggcagcaaagagagacagcgggagagtcagcgagccccaagcagactgacaatacctagggcagataggtctgacacctggcagacacacgggcaggcagcagggcagggatccccaggaaggggttaagggcagagctgtgggttcttgctgctgtacctggggtggggaaagagatgaggggagacaatctgcaaactcccaccactcaggagaggactctcgtatttcttgcagacccacctctgagatctcccatttccctaggattttcctcctatgccaagacctgagggggacccagacagtagctgagaggactatctcctgagtgcaatctgatgtctttgactctgatcatatcctaaaaactgttatcctc

SEQ ID NO: 1890 - DNA, 4001 bp, Homo sapiens
ctgtgagagaaacattacgtatgttgaaaactgttctgattccatacactatgtgttaggaaactaagcctagattttcaaagggcccaatgactagaaaggtttcaagagtggtataataagggcccctcactctcacaaaatttcttacacaacctgaaactaacattccacccatgtaacaaccttaagtgcaagcagggagcaacaaacatccctctattctccgaacagcaatcggcaatagcaggtcaggtcttctcattatctttatacagacatgttcatctatccctccttctcacatttatctgaattgtgcaccatttccatacatcacgtgccactcccatgccccaaactgatctatttaacctttaagattcttctcaggctgggtgtggtggctcatgcctgtaatcccagcactttgggaggccgaggcaggcggatcaactgaggtcaggacttcgaaatgagcctgagcaacatgcagaaaccccatctctactaaaaatacaaaaaattatcagggcatggtagcacatgcctgtaatcccagctactcgggaggctgaggtaggagaatcgcttgaactcaggaggcagaggttgcggtgagcagagatcatgccattgcactccagcctgggcaacaagagcgaaactccgtctcaaaaaaaaaaaaattattctgaaggcctgctttacatcctccaaatgtatattgaactactgttacttaatctgtacctctcttctttaaaaattgataaagttaattattaacattttatataacttggagttaggcaaaactggtttcagatcccagacagatctgctactgccttgcaatgtaaagttgggcaagttactaaacttgctttaatctatttcttcctcattaaaatgagaattaaattgggtgatgtgcataaaatgcctactatacacatatattcatgcacacatacgtcacatacatatatacttatttaattttgatttattcttactttcctagaagatgcagactctctttaaaactcaaggcaaaagcaatgaaacataaagtgggtactaaaaattggaccagttagttgatgtaaaggagcctcccaactttaaaatgtgccctcatggtagctcacacaagccaccctcagcagatttttttcacgtctcctactgaaaaacatgaaaaactcaaaggtttgacaaagcccggatccacagttcctaggttggtggcctaacactgacatctgtcccaagaatctgtctttctcacagcaaacctgataaaggtcaagagaaaaaacaacttatattacataagccaaacaatacataaattaacactttttaatctgcattatcttcctggagcaagcaaaaccacttctgcaaattgcgaactcagaagagaaagtccaaacgggatgggaactgagtcatcaatttaaaaccatcaaccactgactgccccacccccagaaagaggactctaccacgacctactacagtgaagccctgggcatatcacactcagccactactctaaaaatcccaacctccgacacccaagtcccgccagtaggagcagcacccagtcccaccctcggctctgagccagagtcaggtaccctcacatcagggtccccaccccagatcctcaggtcccaatccaagctctaccccagcccgacaccggcactcacccgggcggtgaccttatatactgtgtagcccctcgggtgtcgctggggctcggtgacagtgtagaaacgggccaggtcggcactccgctcccggtaagaggtcatcctcccgccgcctctgccgccgccgccacccgcccgggatcatgagggaaacccggcgccgccgcggtccaggttccccaacgcagcggcgaagcggcgagggggcggtggctccaaggcggctccacggcggcgcctcagctgcacagctctgcttccgggtcagcagagaagcttccgggccaggctatctcccgcttctagggggaggggagactcctccttagattctagcccctttggggcacctgggactggcctgtagttgaagactaaggggtcgcgctgccacccccgtcactgcggagacctcaggcctctccactaaagacgacctcttgtacgctagctccgtcaccttttatgagattttatgagagttggtatagccacgccacaccgggagagcgtggtcctccctgcctccgccccgccgtggtacaaacttaagtggagtgttgaagggatggagagataccatagcctagcaccttctttccttacctattcacagcctatcattttaaatacccacagcaacatctcattctctgagacatatcccttacttctttctaagacgaatttccttccattgagcgcctttctgtaacacatctgcacagcaagcccccaacccaaaaaagctcccaagccaatatcaatcttttaaaaatccccacaggttcgaaaatctggagtccgcctctggctagaagaaagaaatatgtcactcgacctctccgagtcactcactacagtttccaatttcagctgaggttgttatcaacgcttggcagttcctttatctttttgtgatcaaggttccttttcattccacaaaatattcatgccaagtctttgccattatcctaaagactctgttcctcttccttttgcctccctactctccgcaccaccactcttctttacagggaaaaaagaagaggaagaagcagctatggcccttagtaccaattcctttgtcttctcacatttccatgccagtctgaaacgtacacatatcacttgctcatttttacagctaatgactccacatgtgatctgaatcccatcctctttggcaaaccttaagacactgtttcaatgacattccaaatctcctttctgtatgtttaatctctttctcaccactggctccttcttttcaacctacatatatctaagtctattagtcattcattaaacctgaattcaccacctactatgtgccagacatgatgccaatttggcattggagttacaaagatagtccctgttctccgaccgggcgcggtggctcacgcctgtaatcccaacactttgggaggccgaggcgggcggattacctcaggtcaggagttcgagaccagcctggccaacatggtgaaaccccgtctctactaaaaatacaaaaaattagccaggcgtggtggcaggcgcctgcaatcccagctacttgggaggctgaggcaaaagagtcgtttgaacccgggaggtggaggtttcggtgagccaagatcgcaccattgcacttcagcctgggggacaagagcaagacttctctcaaaaaaaaaaaaaaaaaaaaaaaggtagatagtccctgttctcaagtaccatctagtaggaaaaataaagacacaaaatatactgtgataagtaccatggtgaatgtatatatggagtactaaagagcacatcaattcaggatggaagatcgcctaaggctttctgatagaagactgagtcttggaagagagatgggagttagccaggagagaagggagtaaagggcattattcattttgccttcttttcttcctttctttctccttccactcaccgtcaaagttgtttaagttgattttaaagtaatctacatcaacattgcatcatcacccatttattcccatgtccaattcaatctggtttcacctctatattgctactctgaaactgctctgaaaacagtttccagtgacctcaatttgcccaatatttctggattttgaaagtctctgaccatttctacctttttaaaacttttgtatattcttagcatatgagtcagcattatttctcttttctcttttatactcagatgacttgctcttttttcagtctcctttgctggtttctattccttccaagaacttttagtattcttgtttc

SEQ ID NO: 1891 - DNA, 4001 bp, Homo sapiens
acaaatggccctggcacactcctccaggttcttcagccccatgaggccttaaggagaaataagggaactctcagcctttacaagccatggggcatcagttcgtcttccacaaccccctaacccacgtttctagttatgtttggcaacccgcagtctttaccagccccaatctctcaggctgcagagttcagaaagatcagagcaggtcgggcacggtgactcacgcccgtaaccccagcactttgggaggtcaaggcgggtggatcacttaaagccaagaatttgagaccagcctggccaacatggtgaaaccccgtctctactaaaaatacagaagcagccgggtgtgatggcacacgcctgtaatcccagcttcttgggaggctgaggcaggagaatcacttcaacccaggaggcggaggctgcagtgaaccaagatcacgccactggcactccagcctgagcaacagagacccaatctcaaaaaaagagattggagcaggacagcctgggtggagagaactccccagctaccttaagatctttcagcaaggagaaacttcaaatgccttggtctaagccacagactacttgctaaaagcacttgaatctttttttttactgagagtctcgctctgttgcccaggctggactcgaactcctgacctcaggtgatccgcccgcctcggcctcccaacgtgctgggcttataggcgtgagccaccgcgccaggcccacttggtgaatcttaagaccgtttaggtgcgttttcccacccactcccaaagggcctcactcacactctgagccccaggagaaattccccacgtccaacctcagggcacggtatttcttgttacctccccgcacacggactgtgtggatgcggcgggggccaatctggaaaacacaaggttacaggaactaggttaccaaggagagcaaggcaagtgagggagaggaacctgggccgggaggaggcaacagtcagtgtaactatgacaagtccttgcattggcaagtggcacacaggtgaccaagacggccacaaccacgcctaaggattctttttcatcaccctacttgcctccaagaggaaagcctgaccccaaatgctgaaaattaagcctctgtaaaaaaaacaagactaggcttctgactatgacgcgaggcgccaccctctccagaagctcaagtccccacacagtatccttctctctgaaatcctaagctccaggtttgggggcctgagggagcattccctctttggtacttacttatccaacagctaaagggggacaggacacccaggccctactacagagaaatcagagcccaagaaagaacgcacaactgtcacacggaaagacccgagcacgctggagagcgggggaaggcgacctcccaggcggacaggcccacgctcgcacccaccttggtgttggcagctgggcgccccaactcatacttccgcttcttgtggtagggctttctcttgcccccggttttgcggcgcttgtgccagttgtcccgagagatgcctgcatgtggaagcggggaaggaagcttgagccactgtgactcggtgctagcgactcgccagctcccggagacccccgcgccgggccggtcgcacgctcagctctccaaggttggcttccccaccgcgcactcgggagtatgcagcattaccgagttgtcatcatacacgtgcggccaggccggggcctcctcctcgcggcagccatgttggcgccgctcggagcccgcagcccgcggcccggaacccggagcccagagccttcgcagcccccagagacgggctgggcggccgaaacccgagggccaccactcctcgtggctgtccctggccgggggtcggggcgtctggactcctcagtaggctgtgaagcaggatggggcctgattgagctcaacctcccttcacccgcctcaatgcagagcgacactcacccatcgctcggcgctggctggaaagagaaaccgcaaagattcacggttcggtttgtaaaacgctgccccgcccctttactttacgttgtttctgagcgccgaaacaacgtcgggcgacgagacttacgtgtcagctgccgcgcctagggccacgagcctaggagggtctcgcaggctgctgacctctgccgacccccggcgactcgcctccgaccctgggctgggggaagggggtctgcggcgtcggcagatctgggcgtgtttagactagtttcagaggctgctgcggtcgtttaggatgagatgtgggtgcggctgcgttgaaaaagagtggaaggcaatggaattggaaacgagtgtggacttgggttttgttttgaagggtttggtggtagattggacatggggattgagggagagggcggtgtcaaggattcctaagattgtcacttgatcaatcggataaatattggggccatttactgagatggggtaggctaaggtaggagctgttctggacacgttcattttgagatcttgctaagtcatgttgagtgggactaacagataggaagctgaatattaatgactggtcatccttataagggatctgcaccgaagatgttattttgggaatcgttggcttataaatggtaattaaagccaccagaatgaacggaacttaggaagagagtataaaggagggatcagctaacttttctgagctagaaggatatctattttttaattaaaaaaaatttttaggcctggcgcggtggctcacgcctgtaatctcagcacttttgggaggcggaggcgggcggatcacgaggtcaggagttcgagaccagcctggccaacatggtgaaaccgcgtgtctactaaaaaaatacaaaatttagttgagcatggtgacgcacacctgtaatcccagctactcagggaggctgaggcaggagaatcgcttgaaccagggagctggaggttgcagtgagccgagatcgcaccactgcactccagtctggcgacagagcgaaactccgtctcaaaacaaaacaaacaaacaaaacaaaattagccgggcgtggtggcgggcgcctgtaattccagcaactccgtctggaggctgaagaaggagaatcacttgaaccgggaggtggaggttccagtgagccgagatggcaccaatgcactcactccagcctgggtgatggagtaaaactctgtctcaaaaaaataaaatacacaagttattattgattatagtcaccctgttttgctatcaaatagtaggtcttatttatgatgatattttatttttgtacccattagccatccccaccatccccacttccccctaccctcccactaccctttctagcctctggtaaccatccttctactctctaggaccatgagttcaattgttttgatttttagatcccacaaataagtgagaacatgcgattctctttgcataagtgtgtttttctgtgcccagcttatttcacttaacataatgaccttcagttctacccatgatgttgcaaatgacgggatctcattcttttttatggctgaatagtaatccattgtacatatgtaccacattttatccattcatctttttttttcttttgagacggagtcttgctctgtcacccaggctgcagtgcagtggcatgatctcagctcactgcaacctctgcctcccaggttcaagcaattctcctgcctcagcctcctgagtagttgggattacaggcatgcgccaccatgcttggctaatttttgtatttttagtagagatggggtttcaccatgttggccaggctggtctcgaactcttgacctcaggtgatctgcccacctcagcctcccaaagtgctaggattacaggcgtgagcaaccacacctggcgccattcgtcttttttaactttaattttaattttttttgagacagtctcgctctgttgcccaggctggagtgcagtggtgcgatgttggctcgctgcaaccttcatc

SEQ ID NO: 1892 - DNA, 4001 bp, Homo sapiens
atcccattccatcacaggctatatcctagttgtttagccccttttgtttttcactgcactgtgagatcctagagggagggggagctgattttattcatgtttgtatcccttgtgcctaggggcatagagcaggtgctcagtgactctttattggttgaatgaatgaatacatgaaaagatgtgtggatagcactaaatgaatacattaaaagatgtgtggatagcactaaatatagaaatcaaagtatgaatcttaggttttcttctgagaaattattccctgttaccttgaagttatactctctcctgttcaaattcagatacaaggaggtgtgtgtgtgtgtgtgtgtgtgtgtgtgtgtgtgtgtgtgtgtatgctgggagagaactactaaggagctgcctgaaattccttttcttacagggcagagcaagcccaaataaaacaaagcatccaaccctggtgcaggtgtcagagtcattcacacttgatctcatggggctgtgtgtctgtgtatcttacctggaggatgtctccaaactcagccaagagcagttgtttcaactcttccttgcatagtaaggcacagtccccattccctttggcatatttgtggaatacgtcaatcacactgagtatgctattcaggagttgagccattttgacaagtacgggtgaacctaaaagaagaaacaagatttctcctgccgttaggataatgaccacgagacagcatttccagagggaaagtgacccctctggatctgggagaaagtttaagaagtgagagagccccttcttagctgtaccccttccttgccctgactcacagtcggggaccaaatctcattgctatagtgggagatggtgcaaacttggttcccttgctataaaaagagacaatttcttaaaaaacaaaaaatgcattgcaggtgttttacatatcccatcctctactccagacaggattcacctgattgaaaatctcatattagaacaaaaggaggggaggccaggaagcccaatagaggcaggaatagaagccagcatagtagggcataattttcgactaacaactagcaaactggagggggcactaaatagatcccactgaacaggtttcagtcttgtaatgagcctttcttaagcaaggaagaaggctgaaagtctctcttcacggtctaaggaagctttctgggaggctaaattccagcaaatgcttctggcctggatggttttgggacatgcttataaaatgaaatcaatgaatataaaagctgttacagataaaaatagcaagtgggtacatagccaaattaagggcacagattataggaggtatatataatcagttaggtccacattggccatgctgggagacttgggtcttttgggatctaaatctcaattacattttttttcttgtggaatgaaaattccagttagtgggtttataggcctccaaactgaagccctatctgcagagcatgttgaattgccaaaagcatacaaacagtgatgtctataagaaaataagtgacaaataatggatcacatgggacaagctgagtcccttgttgtaattcaatgcaatgagacttgagcattgctgggcccatggtccagagccttggccctaaactattcggtctttcctaacttgcacaaaaagtaaatgctccactatgggagactaagctattcatcaattgttctagccctcagttttgggatgcctaggacacattgaagtgaaggcatttgcattttacagacacagaagtagtccaccccagctattgtcatattctcagatagagccagaaaaaggaagcagaaggtaaccaaagctgttacccacaggaattaagtctcagacctccccagcctggtgcattatagggctcttgagagccttgtagatactaccaatgctcccctatgcatgtcttacctgcttgaggaggaaggagcagaagattcaggagtcagagaggatactggggacctaaaaactcatcctatttataggggttttaattatcctaccaggccatcccaggagacacccattctgtggcaaagcctgaatcactctggtcccagcccagctcagcccagcttgacctctccctctgcaaactgtttggtttatttacttcccccacttgctcatgaacctgtttgtcactacagtaggtgacgctgtttaagtcccagtcccatttaattaagagaatgtgtgtgtatgtgtatgtatttgtgctgtgagggtcccaaaagacagaggtgttggctgagttcatccttaatatatgtcacttgccaatactaatagagggcaacagtcagctcatactgaagaatgctatctatgtggtcacttacaaacatatgtcaaagttggaactagagattctatttatttggccagaatatagttcctggaagaggtttcttttagactaacctttttcttgtgctggtagatatttggctattaacctattaacttattttgaattactattattttttcatttaacagctccacaggctagttgggagaagtagatacatggtcagttttggggatgaggggctccaatggtgcaacttctaccacttaagccttctaagacttactactaaaaagtttgaattgagggacatcatggaagtttatgatatctgtgagagagaaatgctgctagagaccccagcttctgttcacttcccatctccgtgcccttggatgccagcacagtgtcttgagcatgggaaattcttagtgaatatttttggggtaaaggaattattggattatggaagcactgaagaattgtatgtaaggtgcaaaaagctgtagactcacctgtatttctacgtttgtctcacatctagatccctgtttggactttttcctatgtatccatcagccaatccattattattaataacactaactattacttactatgtgttcaggattctacaagggaatcacaacagtgcagaaagattttagtttagttggaataaagaagcttcacatagaaaaatattttgaactccagggataggacatgctaagtgctgagtattagaaacctaggcgcatgtggagtcctcatggctgggcctggacgtcccttaggaggtgagcttcatgttgttcctgaaaggattcaggtgggcagagaagaaagcaaagaacttctgagtggggagaagggaagaatcaaaggtactaaggtgagagtttggattcgagtgagctggtaagtctgtgttgagcagagggatttaaaagagcagagggatttaaaagagtagacttagaaaattttggaactgaaagggaaatctagcctcttaattttacagatgaggaaactgaggttcagctagattgactgtatttgccaagggtttcacgggctatgactaaagccaggcctggtttacttgtttcctcactccagaccgatatgctttctgagacattctctgaggcagatttggggcctactttagggtttattttaatgagaaagcagaagtagggttttggctaggaaaagtgacataatcaaagcattatttagaggaagaatctaatggctctgttgtagttggtcagatgtctcagtttgtctggcactaaggagtttcccaggacatgagactttcagtgggataattctgggcaatctggaccgagttggtcaccctaaactgtggtgtacaagataaattggacagaggagtactgggcagtgagaccagttaggagtctattatatggcatgggtgagaagtgacaaggacttcgacctggacgcagtagttcaaaactataggaaggtagatggataatagcagggataaagggatgaggtctggggacagattagaagaggggcagggaaagtgggaacattaggtgagattccaagtctttaagtctagataactagtagaactatggtacactgaa

SEQ ID NO: 1893 - DNA, 4001 bp, Homo sapiens
gtggtgcacgcctgtagtcccagctacttgggaagctgaggcaggagaatcacttgaacccaggaggtggaggctgcagtgagtgaagatcacaccactgccctccagcctgggcgatgagcaagactccataacaaacaaacaaaaaaaaaaggatcacaataatcacaacctacacagttctaacataaaactactttgcctcttactgtctagaagagaaaagtgaacaattactctcaaggttttctcagtaacaaatgtgaataactgaaattagtttactaaaaacctacagtcaacgtacccaagttttgctgtagaggtgaaaatcaaggtaaataaaacacagtactccagcaaacctggaagaacgctgctttttaaaaagatcccatctacaaaatatcacagattcagaaagaaaaaaaaatcacagatttattttggataggcctttgcaacagagtggagaggtgaaaagaccaggtgcctgctgatactagttttattaccagctcactccgcgtataatgggtttggctgatggaggaagtcaaccttgcctctatttaaccctcactaaacagtgtaggccagcgtggtgactcacacctgtaatcccagcactttgggaggccaaggcggatgatcacttgaggtcagcagttcgagatgaccctggccaacatggtgaaaccccgtctctactaaaaatacaataattagccgggcgtggtggcgcgcgcctgtaatcccagctattcgggaggctgaggcgggagaattacttgaaccagggaggtggaggttgcagtgagccgagattgcaccactgcattctccagcctgggcgacagagcgagagactccgtctcaaaaacataaacaaacaaacgtgtacagccctccatttgttcatgaaggcccaaaagtgaaaacaaacagactaggtctgcaaaatattctcaaagtctcagatttttaaaaacacacccctacagggggaacagcaccagtaattacattcaccaggccacaactactgaaatgggtgcaatctcactacccaattcccagtaatgctacagcgaagtctccttcacatcagtagcgagaattacaacgcccagtgtcttagtcacaactcttcctgacgctgctccctggggctctgctgggaatcccgaaacactcaggtcacctgaagtgagaacaaatcaaaacgggccaggggagggagtccacgaagttctccaagtgagaactggagagtacgtctcagtttcgtaaatgacacaggagctgggtcccagggggcggaggtcttgggcggtgccaccgggcacctgcctcccggcaaccagtttcgccttcagcgctccacttggcttcagctgacttgggcgtggacacagaggtcggggtccccgcgcgggccgcgcctgtgcgctcgcaagagtggaagagaaagtgcggagggacggagcgcaggcgggccccggccgccgccctcccgggcgtccccgctaccggccacctgagaaccggggagggggcgggggactgggcgcagccctgctcaccttctggatggaggacttgccgctgcgccggagtcccatgagcagaatcctcggcttggagctgtcagcgccccccggaccacagccaccgcctgcccctgccccaacccctccgcccgccgccgccgcctcctcttcctcctcctccacgccgtagccgaagtcctttggaaacgaatcggccgcgccgtaactgccggcgaggggcgtctcctccgccccgtactgcagggacatggtgctggagccgccgccgcccgcgccctgacaggccaggccaggccgagccaggccgccgcctccccagtccgcctccgccgccgccgccaccaccgccaccgcccccggcagccgccacagtccggcccgccccccggagcccggctctcataggccccgagccgaagcccagccgcttattggccgcccgagctgctactcgagagcagcagggtaggtggtgccccgtcacgtgccggaatcacctgactcagagccgcggaggggggaggaggagtcacgaggagggcggcccggccgcgcctctagccccggctcgggccctcagccctccgccccggcccgcatacaacgctgtctgcaccgctcccctgccttcttccgggctcccagagcaccgctatggagatgctctcccggcatttgaggaagaattgattgtcctcatcctgcaactgtacttgcccaaccgatatttattgatgcctgcagtgtcctgggtgcctaccaaggggcacagaactggatccgacgcagaccctgcctgccttcaggttgcttgaagatgaacagagagatcggacctctgcgtaagtaacctcgctacgaaatattatgtgggaaggtcacggataaataatgctcgggagttgaatgagaaagcgtctgagcagatctaggtggatggatagattgggatgtgcaaaggtatgggggagccagccacactgagggcaaacctcaaccaaggcagagtcatgggtcaccgtgatagtttgttctagcaggtagctggaccctgatgggaaagcagatgcagccaagctagaacatcttatcttctttcttcagtaagtcgccgatagtggatactgctgccacttcaaacccaacgggactcaatttgccctccttcccgccttgtcaaagtctactctaggaattccatcccccatagaacactgcctcttctatgacctcgttcagattagagaccaaagtattgaataatgaaagcaaacaaaagcaaatgcttgtcaccaaatatgtccgagaaatctagaggaatttttatttttgataatcaggctctagaactggaagtttgagaagaggatcctcttaaagcacagccctatacactttttaaagtacaggagtgggggtgctcccagccctccaaggagactgacttcttgattatgaaggaaaaattcgcacatgcgggcaggtctgggactttggttttgtctgaacccagaagttagaggtaggatacacccttagaggtcatctagcccaacctctcacctaaaacgaaccaactctatagtgtctaatagacatgcagaatgcacttaaatagttcgaaggtaaaagagctcaccatctcgaaaggcagccaactccactgtggtaaacctttgtttaaaaattgttaaagccggccgcgcggtggctcacgcttgtaatcccagcactttgggaggcagaggcgggcggatcatgaggtcaggagatcgagaccatcctggctaacatggtgaaaccccatctctacttaaaaaaatacaaaaaattagccgggcgtggtggcgggcgcctgtagtcccagctactcgggaggctgaggcaggagaatggcttgaacccaggaggcggagcttgcagtgagccgagatcgcgccaccgcactccagccttggcgacagagcgagactccgtctcaaaaaaaaaaaaaagtcttaaagccaaaccacactccctgaagcctataatagaataaaataggaatagtcttcacctttttcatgacagcccttcaaataccagattgcagtattcattacccactaagtcttctctgttccttgctgaacatcctcagtttcaaccattcctatcgtgctgttcaatacaactgatatacatgatagacatgttctttatctgcactgtcaaacatgtagccgctagtcctatgaggaataagcacttgaattgttgctagtgtaactgaggaatttttttttttttttttttttttttttttgagatggagtctcgctctgtcgccaggctggagtgcagtggcgcgatctcagctcactgcaacctctacctcccgggttcaagcgattctcctgcctcagcctcctgagtagctgggactac

SEQ ID NO: 1894 - DNA, 4001 bp, Homo sapiens
gattacaggtgtgagccatcgtacccggcctgagctgggatttgaaaccaattttactctagagtccttgttcttaaccattctgcgattgcctttctgtggcggaagagcagtgagtgcaaaggtccagatgcctgccatattggcagaacagaaatcaggccagcagaggtatagcacagtgaaatgtgtgagagaataaaatgggatagagttcaagagacagtaggagccagaatatgggttttataggtaatagtaaggagttaggatttcataaaagtatctaggaagcaagggattgtcgtgatcagatttacatttgaatgctatcaatctagctgctcagtgaagaattggtaatggcagggcagaggtaagcacacagcaagatcggttaggaagtagttcagaagagaggtgatggtggcttggcctagggtggcagcaacggaggtggggacaaatggatgaatttgggatctattccgaaggcagagccaagaggacttgttgaagaactggattgtggatcaatgaaggacagcactgaatcaatgatggcctctgggtttgtggtctaaacaattcagtggatggtggtgccatttacacattctctcatttattcttcacaataatccttcagactgggatccattgtatagctgaggaaacccggactaggacaagttgggggttagggaggcctaaggttaacatcataggggaggcaggattctagactaagcctttttgattccagagccaggactgtctactataccacaaaaccacgaatttattcaaagcttggatgaataacgtgtgttcttggaacacctgacatgctccaagaagagttcaacatagttgcagcatggttccaatgtccacgcattttattaccttggatctgggaagattacaaaaacaatctaggtaggtactagaaatattatttatgcagtgagccgagatcgtgccactgcactccagcctgggggacagagcgagactccgtctcaaaaaaaaaaagaaaaaaaaaaagaaaaagaaaaaaaaagaaatattatttatgtcagctgaaaaaaaaggagggatcactccagttttaaccccttcttgtacagaaaaagactgaaactcatagaaggaaagagatcagaggctaattctccagattctctccctgacgtgggcacctagccaaccacacgaccagagacatcccacccacgcccctgtggcctcacgatgatgtaggcatccaagatggaacggtagagtgccaggacacgggtgaggttaacagctagctgcttcctcccctcatgagagaggcctcgggcggagatgcccggcatcccggggtccagcagggagcgcggggagcgagaacgcagtgaacagggatccagggtcagtactacgcgggtccaggacccggacggggctcaactctgcaggcagaacaggaagagttttgggtccagtctccgacgctgcctttccgggatccgatgctggagtggaagatttgaggcgccccccagacgtcacaggtcgcgacgtttcacagtgagaaggtgtcagcgtcagagacacgtagggcggggtaacagtgcagtgacgccacaaaagcgtgccgctgagctcagctcacaacgaggcgggccaagttccagttcccgccccttgccgtacactcctctcctcttacggaagtgaagccggaggtgtccggcgggctgcagttccggtttatcgcggccttcccacaccttcgcgttgtaccaccacggggctagaggggccggggagcgcatcccgcccccgcccccacccacgccgccccctcctccgccgccactgccgctcctcacacactcggaatcactggcctcactacctggggtcggggcggtgcgggtgtgcgcgcgccgacctctggcgcgttctaacccgcgcgcctgccttcccgggcttcgtcggcgcgcaccgatttccgcatccggctccggacgcttccggtcttagctggacccgtctgggaggtaggtttgtgagcgtgagagatcgatctgtaccgcggggatccgaagtatgcttatccaggtgggctgcctcaagcctcgatcccacccccgcgctggtagatggtgtcaaggtccttgcgtgggagaaggacttgggtgagatgcatgcggagattgcccccaattccggcctggagccaagggaaagggatgcctggatttgtgtctctattggtggtccacgctgcggatgcctgggtagcccagaggttatctacgccatacttctcactgtttttgagcatacctagatgttcctttcctaggcggagtatagatcgcacgtgttctagcctcttagactcagagggttcgagctctataagcccctccactcccttcattttacaaatgagactcaaacctagagcgcggtaatgaccttactaagaccaaatggctggtgaattgggcttcactagaatccaggcttgctggctaacaccaatgctccctccatcatttcatgttatgttttcatttcccctctgtctgagagattgctctgatgtctttccttccataagtcctacggagatcgagcttacctcatttttctcccaggcctaggagctcaattaccaggatcactttcttccccagggtgtactacagacctccacatgttggacagtaggattcagcagagaatgagtcccacatcctcttttcatccataagccactcttcccaactactcttccgccttccattgtccctatgtctactttactgctcaatctggattttggggaacctcctcccaaaaaggcattagaaggaaatgccaagcaccgaaattttgtcaagaagcggaggctcttagaacggagaggctttctgagtaaaaagaaccaaccccctagcaaggcgcctaagttgcactctgaaccttcaaagaaaggggaaactcctacggtcgatggcacttggaagaccccttccttcccaaaaaagaagacagctgcttccagcaatgggtcaggacagcccctggacaagaaagctgcagtgtcttggttgacccctgccccttcaaaaaaggctgattctgttgctgctaaagtagatttgctgggggagttccagagtgcccttccaaagatcaatagccacccaacccgctctcagaagaagagctcccagaagaaatcctctaaaaagaaccatcctcagaagaatgccccacagaactccacccaagctcattcagagaataaatgctccggagcatcccagaagttgccacggaagatggtggcaattgactgtgagatggtgggcacaggaccaaaggggcatgttagttccttggctcgatgtagcattgtcaactacaacggagatgtgctttatgacgagtacattcttcccccctgccacattgtggactaccgaaccaggtggagtggtatccggaagcagcacatggtgaatgccacacccttcaagattgctcgaggccaggtaagaagcatggggcttgatggtggcagggaggtggatggagagaggtctaaatcatttttcagcaaaggatatcactatgggaagacaccaacgtttgtggagggagggaggagaatctatcagttgttgaagaaggccccctgtcggtggaagaagcagtgaaagtcaggaaggtacaattagctggtgtcacaaacttcattggtcaagatctattttagccgggcgcagtggcacttgcctataatcccagcactttgggaggctgaggcgggagaatcgctcaagcccaggaactcaagccctgtctgggcaacatagcggaactcatctacaaaaaagttagccaagtgtggtacatgcctgtagtcccagctactcaggaggtcgaggctgcagtgagctgagatcacaccactgccactgcactcc

SEQ ID NO: 1895 - DNA, 4001 bp, Homo sapiens
ccaatttggccaggtgtgctggctcacacctgtaatctcagcactttgggaggccgagacgggtggatcacttgaacctaggagttcgagacatgcctgggcaacatggcaaaatcccatctctaccaaaaaaaaaaaaaaaaaagaaaaaaaaaattagccaggtacagtggtatgcgcctgtagtcctagctacctggggaagctgaagcaagaggatcgctttggggggcggtgggggaggaggtcaaggttgcagtgagccctgtttgtgccactgcactctagcctgggtggcaaagcaagaccctgtctcaaaaagaaaaagaaaaatccaatttgtaagcagtactgacattttgctccaaatatagcaaatatagtactcttcccttcttgaacaatagtgtttgaactagtctaatgaatttaaaaaatatcagaaccagaagttctaattttggcccaacaaatagtttgttttccttaacaatgtggcaggagatgaagactctaattacctaggaattgcagtagcatatgacactttcttcttggtcctggaagtccaggttaattcattcatttacttaaatatctgtgaaggacccacaaggcaataggaactggggatacagtaggctctatttttatggaacttatattccaattgggaaagcagcaaatacatacatcaaatggtttgggcagggttgagaaaaaataaagcagggcaataagtcaaaaagtgaagaaaagaaggcaggaagaagagtagtggtggtacgttacatagggtagtcagggacaagtctctctggtaaggcactggatcagaggctggtgagggagagacatgccaagcatttgaaaactattctaggcagcggagccaacaaatgaagaaaccatggtgtgggagcatgtttaaggtgttaaacacaagcataccggtatggcatgattacagttagtggtttgtgaggggcatattggcctatgacagacaacctggcccaaatcatacagcctaaggattttggatattatatactgagatgagaagccactggatcatctcaaacagacagcgggcataattagaaatacgttataaaagaatagctctgtctgttttttgggtatcagctggtacaaaggagcaataactgggcagtaggaagtcagggattacctgcaattccttgtaacctaataagctggtgccaagaatgatggtaaagaggagcaacagacacagcatggttgaaagcctcaaaaacacatccttccttccttttattatcaagcgtctctgagagacatagttatcaaacactaccagtttttaatcgaccttaaccaccaaactcttctttcattcactattatttagtctctaaaacacgcacacatctaccgcacaaaaagtcaagtacacccccttcttcctcttacctcttttaaccttttgcttcttacaccctatgagacccattcttctcctgttttcaagtaccctcttcctttcaccctttgctactgtaagtttctcggtagctgcaggtgtttcacccattttattataattaataatggtgaccctgaaaatacctagtaaaagaatgtggaaactcaaaattacagttgacagcgttacttctctgaacacgacttccccaagcctcctcactaagccaaagtcgcccctctgaagtggtgccaagataaaacccaggtggctagcagcaaatgaagtcgcaagcgctgcttgacacgaactcagccccgcctttcctcccagacaccaaagctcagccctaccacattaccttcactatcagaagtgtctgtggcctcgtcttccagcaccgacgctacggctccagttaccattttcatcttcttctttggggtctttttcaggttttcttcctcactcacacgtgagtccggagcggcggctgccatttttctgcgccggaagcgtcacctgacagttgcgtccggtggcaaccagaggaacttctgcatttagtgccggtaacacaaggttccggggcggggtcgtctagcccagagttccggggccggagcctcagaatgtgacttggagagagctctgaatggctcggtgtgtttacgcgaagtccgttccaggacgaaaatcagcggctgaatggcctcagccgactcctccgctagctcgcctgtgccctggtcctccgccccagtgcgtccccagcccgtccccagcccagcgcggtccactttgatttcctagcctcggcggcttcccttgtctgctgccttaatgttggtttagtgtcctcctcaggtgtctcttacgtgcccactgaacgccgcagcagctaggacgcgggacagatccactgggggccgataattagaatacgatcgtatcatccccccgcccaagataacacgcgagacctttcttgcaaaccgaatagactcaccttctttccctggggcgggtgttgaatccaaccgcacccttctccctcggacccggctggggcctggagggtttctggcgcccgactgcgcagtgcagaccgagggtgcgaataccttgctatccgcgcgaggatcctgcctcccacccggggctagcttttctctgaagttagcctctgtcaccagctcctagttccatcgaagcacctaccacagtcggccttcattttcccccctaaaatgttggcttctcgcaggaggggaacgtatttcatttaccatgtcccctcaaggttagcaacagaagttggcctgaagtgaattttccaaaaatatttttggaagggatgaatgaatcaatgaatgagtgacagaatataactattgacaaagttaatgactcagatggataatgcagcaaacctttactggctagacttgttctaaaggctttccccaaacttagcgttttccctttcccctcttaaggaggttcatagattgtgatacccataagtcaaaaacaaaaacaagaatcctcattttgacatattccagtagatgtttatgtaggaaataaatatatattcacatcctaaaaactcaatacaacatttttaaacttggtttttaatttttttgtcttttaagagagagagggtctagccgggtgcggtggctcacacctgtaatcccagcactttgggaggctgagataagtggatcgcttgagtccaggagtttgagaacagcctggccaacatggtgaaaccccatctctactaaaaatacacaaattagccaaacgcagtgacgagtgcctgtagtcccagttactcgggaggctgaagcaggagaatcgcttgaaccttggaggcggaggttgcagtgagcggagatcgcgactctgcactccagcctcggcgacagagcgagactctgtctcaaaaacaaacaaacaaaatctaccaccaccaccaccaacaacaaaaaattgtgcagaaaaaaaatgacattttgaatacagttggtaagagatgagattccagtttaaacctttaaaaagtgcaggtattgaccaggcgtggtgactcatgcctgtatttccagcaccttgggaggcggaggcgggaggatctcttgaggccaggagttaagagactaggctggacgacatggtgaaaccccgtctccactaaaaatacaaaaattcgccagccatggtggtgagcacctgtagtcccagctactcagctactcaggaggctgaggtgagaattgcttgaacccagaggggcggggaggggcaaagattgcagtgagccaagatggcaggtatggtggctccagcctgtaatcctggcttctccaaggctgagatgggaggatcacttgagtccaggagttcgaggctgcagtgagccatgactgcactactgcattccagcctgggtgacaaagtgagacccttactcttgacaaaataaaaaggggtgcactttagaggtgccctttaggat

SEQ ID NO: 1896 - DNA, 4001 bp, Homo sapiens
aaaaagagagcaagatcattgcatattggtggtgaaaactggcagtcctgtcatcttgccacaagttctactcccaagatttggatgccaccaaatgaataaaaatttaatgctattcaataaatacttattgagcaattatttgcaacgaactacagtattcggaaatagcaccaccaaaaaaaatgattagccttaagactcaatacgtggaaagaatgcaagactcacaaaactttaggttgaaagattgtctcattaacatgtaataacctaactggtccagtactaagaaacaagtatttcaaatattcctgaggaaaaacaactagtaaattatataaaataatatataaagtacaaacatacggcataatcaaaagcatcacatttcttccacaaagaatataaataaatgctacaggtacttgggaacaggaagacatcagttctggccaatctaatttttctagaatccacatttaattggatactctgacattttctagtaaaatattcttgagggctattggaattaacagatccacaaagtgtgctagacagaatcaaatgcaactgaaattccggcctctactatctactgcacaaattcccacttttcagaggcactgttggtcctatttcctagtatcaaagggtagagaaaaccttccacatgcctattctaagaatttaaatagctaatatgaaaactttaaaatgatttttacctctagattaaaaagaaccaagataaactgcgtctgatattttaccttgcagaagctaagtcaaccagtgagtcgtgtaacctttatatgaattccctcctgaaagactggaaccatacccctgactattctggagcaagggagagcagataactaaagctctccagcaagcaaaacaaggagaagggattttaggaacatgccttttctttggaaaggcattttttagtaccccacctactaatctaacgcggcgcggaaaccttgcagaatttgaaaacaaatgctgagaggctccgggggaccggtaaagggattagcaactgacagctcggcctcggagcgagaagcctcaagtagttagatcaaaccgtgtcaacgatctgaaatccagggtccaccccagtgagcttagagaagtacagcagcagaaggtaagcaggggtttggcgtctttcagtcctaaagatgcgggatatcggaactgagagagacctagaacccaagccgggcagtttgcctgctctcacctctcttgggggctttgatcagaggcacccctccagtcctctcgccgttttcctgcttgtccttgtgcttgagatcggttccgcaggagctgggatcaccatcggggccgcggtggtgatggtgcttgtgccgctccttgtggcccttatgcttgggcccggccgcgctcaccgtcagaggcgagaaggtgaagagggccgaggtgcttggggccgggagaggggcagcgacagcgggcccggcgggtgccagcgaaggtggcggcggaggcggcaggagaagaggctcaacagggcctgggacagttggggctgcattcgttggcggcagcggcccaggatgttggcggctgcgacgccgccggtgagggggagcgagagggggctcctggctcggccgcccccgcttctcctgagaccccccactgctagatcggcgctgccgtttaactccccgcggggagaccccagcatgaggtttctccttcccctctttgtccggctcctcctgcgccgccaccgcccgtactacgcgcaccgctccgacctgcgcagccatttcacccacaaacacacatttaaatggcccgaccgcccccccgtccgcgcatcgcgcaagcgccgcccgcgcactgcccgctgggcattggagtctctcctccgccctccacttgtcggccgttcttcgtccagagatgaacatgccggaagcggccgttcccagcttttctccgcaggcctctccaaccgagcttctattgtaaagcaccctatgccgcgcaaagcgtcatgggagctgtagttccgccgcgcccccgccgcgtccccggctctgagtggaggagtggaaagggagcgtgcgcgaagtcacgcttctggctgcgacgcaaccgccgctgggcggtgagttgccgccaaccgccctaacggccgaaacaatgttaatggctttcagagtctggcggcgcgttcccattatcatcttcctgtgacccttcctcattttacacggaggaggtggtctccacagtgattttaaatttaatatttctctcataacctttgtgagataaaagaatcttcatccttttaactttgacgagggatgaaatgaaggtgaaaagaggatttagtaatatgtaaaataagggtggttttgctgtaaaaatatgatagggccgcaattcagaaatgttttcaagcatctggggcattgctatggttacaactacaggcctacgaagtcaggtgcgagaactgcttggagtcctggtgaggacggcccctcctcgccatccggccacatcccctctaatgcctggaaatgtccagcatttattttgaatatatccctacagttgcgaaaaattgtagatggaaaaccacgtttaagattttttataagtttttttttttcaaatcttaaggataagattgcataaatttgaaaagtgtgcctaccggagaacacaccaaaaatcatcactgctcactacggatagttgttgctcagaaattcatttagaatttcatcctcgctttagcttttacctggggttcttttaagtatttatttagagacgggcggggcggggctcggtgtctcaggccggtaatcccagagctttgggaggccgaggcgggaggattgcatgaggccaggagttccagatcagcgttggtaacatagtgagcctctgtccctacaaaagtattttttaaattatctgggtgtcgtgacacgcgcctgtagtcccaggtactcgtgaggctaaggtgggaggagtggtcgcaccactgcactctggcctgggtgacagatctagaccctgactcttaaaaaaaagagacaaggtctcgctctgttgaccaggctggcctccaactcctgggctcaaggaatgagtagctgggtctacagatgcactcatggtgccctaagtaactcatggttacctagaattcttttagtatatttgtttattgataaagacatttggaagtaattgattacaatgatatatactcagcagataaaattactgtggtttgatttcactagtttctggagaagtattacctaaacactactgcaatgaagtcagtttaacaaccaaaaagtttattgagtgtctgttggatacattgtactacaagagacagataataatacttcattcaatttgccctattggacttccaaatgaaaaatactgaagaacaaatgatgtttaaacaatactacatgtttctaaaagttataaataaagttatttaaataaaaatatttttaatgcattaggggaagtcaggtggattctttgtaaaaacaattacctgccaatttatttactacataaaattagagttgaactagattttcttatggcagatccatattcatatagaaattcattttaaactagtatttctgattggttagataaaaattgcacatgatctgaaagatcctgtataaacatatacaatttatatcttttgctaccaaaagatagctattatatttcattgattacttttctagaattggtaatttaatgactttggttaaaacttatcaggatttcagttgaattccttgttacattcaaataattgtcattatttgcacattttattctaataaatataatttctcattttcttaatattccagttttccacaacatttgggaagatttacaaggtatactccatttaggcaaaaataactgtcagg

SEQ ID NO: 1897 - DNA, 4001 bp, Homo sapiens
atctttaaaaaaaatctggctcaacattctgcttgcaggtttctatatatactgtatatgtggtgagtgtgtatgtgtgcgtgtatatagagagagctttcttttgtttaaagggaatggagaacggtctagcccactttcccacagtcatgtaggaactacgatgttttttgcgagcaaaacaagaagtgcaaggtctgcattcccaccaactcgatgcaaagctccaagagcttcctgcaaagtaaagccagcacggagaatgcggtcaatatctgtggcaggaaaaatcaatggtggaagaatggcaggacttgatgatggatggctggtaggtggttcatattcaagtaatggcctcgaagcatcaggacagacattttctctggtttcaggcctgtctgttactgaattctgtatgccctgacctaagtctttaaccaatatgaaattggatgacaaagacttagtttgctcagaagtctgattgagtgcatcctcctcacctgctaaaagtttgggtgaaatttctacacctaaggtgcagtgtaactgattggatgttttagctgaggttacagtgacagaacggttcttatttatggattccctagatttggggacaccttccttatcggttgacaggccatcacctagactcctgaagtttacattttctacagcttctcttccagtgtcagatgaagtacctgttaatttttctgtctccactgatacagatatggcctgatgaaaggagacttgtggacactgttcattctgggtaagatgctcattttgggtccatctttcagaaaggtctttaatactggtttggccctcagctatggtttctgattgacagattacttcttcagatgtattttctgaagctggtttactgctaacaaccaaaagttcatgaagttctttcaaggctgccgttatagacgggcaagattcttctgctgactccacagaaggctgacaactgccacagagacttggagaggagtaatggccatattctttatttgttccaggtatttcaacattagtttctgggggctgtaaatcctgagtggaaatggaatcattcaaaatttcagatgaagggttacattttgatgtttctacttccatcaagggattatctaaagtgagatccaatgcaccaatgttcttgacattggcattctgcctgcctgttgaattaagcaaagtaactagggactgttgagctgtatcgatttccataaatgtttctgaatttgagcagccactgcattctgaagatggaatacttttcttcgcacttggaggatccacattctgtgggagcccatttcctttcatcgtagcttccaaatcaacaattttgtgttgattctgttgcctttcttcaggaagctcaaggtcccctatgttacaaagatattcttggtcatgtgaagctttttgttgtgcaacctcatactgttcattccctggttcttcgtgctgctgagggtcactcacttgactcaggttctgattttctggatgccaatccttttcacctagaaacatctgtggttcatgcatcctagtagatgtgacagataaactagcttcctgtcttgtatggagatgaaatttgaggccctgggtgcttctttcagcagatttctccagattacctgcaacagttatttcttcggatgaattctgcataggcatagctggactctggtctgttggagcatggtctgctgaggaagcatgatcagaaagatcttgtaaagaaagatgttctttcttttcagagtttagctggaattcagctgaagccttcaaagccttcacagctttaggttcaatgcgatctgagtcactgggcttgatagggcagactgaagcagagacagagcgagcaagactcataggattaccaacatcaggactctgtcctgaagaacgggcgggatggttaaacccatctgaagttggtaatgatgacattcccagtgaggtagattctttaccacttttctctatatggaacacaggggaaaggaaaaagattaattagcaggtgactaatgccactaaattaccagaggatacaaatctaaacagcgtagaataaaataaggtcctcaaactcgggtttctcttacacaaatagaaatgattttaaaattactttctcattgtggtagacattcacagcatcagaataagaggtagacatgttcttaataaaatctgcatactgtaattcaatgtgattaagtatccattaatatgcattcacataatggcggggttagtgctcaggaatgaaggacatttatgtttctttattccctagtctagtctacaactctagaatagtttctccaagtgtacttttttcaccacttgccctaaaaccaccagggacgcttgtgaagtatgcagaccctggggtaccatacttgagagtaaatccaggaatgtgcattttcaataagctccttgggtgattcttaaggatattacaaatcctgagaatctttgcaccagaatgattctcatgttaatgcacttttcttgtttcaaatgtgaacactgaggttacaaatgagaagtcttaaaccaggtatacctggacagagagggaattataaagagaaataagaaataacataatgcttggggacagagaagcaaatgttctattttatttctagccaagctttccaaaaatcatggtaaaactgggtgagcatctgactcagaaaacaaaagtaaactaatgatcagcagattaaatcacaatcatcatcctaccaaataatacaactctaaacttaaaaggcttataagtttttatcacatcaatagtgtgcaactaagttaagaatatttaaatgttttaaagaaaggggaatgtggagggagatggttcattaatagtttttcaactggcaatgactatttagattcactgctaccttagaccacccaaacaagacggctcagtgtaagcatcatagtatcattaaacatcatttccagctcttcttttgccaccaatccagttaaaaattgacctctacgcatgtaagtgtaagaatttttttttttttttaagactgtgttttgctcttgttgcccagacaggagtacaatggcgccatctgagctcaccgcaacctccgcctcccgggtccaagcgattctcctgcctcagagtagctgggattacatgcatgcgccacacacccgactaattttgcatttttagtagagatgaggtttctccacgttggtcagggtggtctcaaactcttgacctcaggtgatccgcccgcctcagcctcccaaagtgcttggattacaggcaagagccaccgcacccgaccattgtaagatctttaattaaaaatcaaaaagggctgggcacagtggctcatgcctgtaatcccagcactttgggaggccgaggcaggtggatcacctgaggtcaggagttcgagaccagcctggccaacgtggtgaaacctcatctctactaaaaatacaaaaattagccaggcgtggtggtgggtgcctgtaatcccagctactaggtaggctgaggtgggagaattgcttgaacccaggagggagaggttgcagtgagccaagactgcaccactgcactccagcctgggtgacagagtgaaactcagtcaaaataaaaaataataataataaaaaataaaaatcaaaaggtcagtaacaaaaatgacttcaaaatacaatctattattaggacagatgcaactcaaatgctcagtactaaatgttaacatccaacaagagggcttgatcttaaaaagcagcaaagcagttatattcaaaaggctttaaatcattctaataaactactggttaacagcatgagaagacaaagcattgtttcaggaagctattgacttcccatgaaacaatcttaccttacttacactttaggagtaaaaaggaaaactgca

SEQ ID NO: 1898 - DNA, 4001 bp, Homo sapiens
tgaatgatacattcaggtgcataaacccagctgttaaaaaaaaacccaaatgtctgcagttaaagtaaaaacacaaaaattaaaagccatcactgccattcctctaagttatggctgcttaatcctatctgtggcatagataatatggtcagtggattctatgatgttcccagaaaatcagctcaaccttcactcaattctcttccactcaacacaactaaatgcaaaataaatacaataacagccaaccttcagtgaacacccactgcatgccagaacctgcttggtatgttacaaacaccctccttattaatttccccagtaactctatggggtaaatactgtgattatccccattttacagaggtgggacttgaggctagagttcacttattcccagccatacagctagcagtggtggagcctgggtcacttgcctgggtatgtgtgaccccaaatacagtgttgccagccatcatgggattagagggacagtggccatattagagggtcttttttttttttttttttttgagacggagtttcactcttgtcacccaggatggaatgcaatggctcgatctagggttgctgcaacctctgccttctgtgttcaagcgattctcctgcctcagcctcccaagtagctgggattacaggtgcccgccaccacgtccggctaatttttgtatttttagtaaagatggggtttcgccatgttggccaggctggtcttgaactcctgacctcaggtgatttgcccacctcggcctcccaaagtgctgggattacaggccactgcgcccagccttctagagggtcattttttgaatttaatataatttcttttaaaaaaacaaacaaacagttgacttattcacaaattttggttctagctatctcactctctggtcttaagtcttctggcaccttgcttctcctggccagagctgggctccacagctgattccaggcacctctgccggcctgacagctgggccctgcctgggtgagtcagtttcaccatggggaacaccagcgtctcatcccagagacagcaggacatggaagaggctcacctctatttattggggtgtgatcttagccaagtctgtaccatgtgctgttgagaggttaaatgggcgtgcactgtgtaacgtgcccaacagagggcctggcaccaggggagtgctcaatcaactgcatctctggtgacagtggttgctggcaaggtttctgctgtttccatgttcctggctctgacgatggaattagctctaaggagatttaggtgtgggggtcccagagctagggctttcagtcccccaggctgaagactgctgaagactgcagtggagcaggccctcactgccctgcctctctgctctcctcagggagcaacaggtgacactcttctccccagggaaagacaagtggcgggctagaggaaagggggaggcacttaccaaacacccgccggcggttcttgcgcagaatgcaagccaggtactccttgccctcggcactctcgtgccagtttgggacaaccaccgaaccgggcacgggaggtctggccatggctgggcaccgcgacggggtagggaggtgacagaatgctgagagcagggagtgggaaggggagtgacagtaccaagccgggcctgtgatccctcttaactgccctctgactctcccggggggccccagaaagtgcagtccctcagccgcctctctccttcgcaatgctccctggggatagtcatcccattactgcccatggagggtattcacacagcccctctccccttgtcacctccgggggtcagacagccccgcttctcctctaccttctagatcccgactcccagggctacctagccctccccgtcagcagtcccggcggcgaaccgacctgggtgccgaaggcccctttaaacgcccacccgcactcccgccgccccagcccgccgggcccacttccgccccgcctgcgtccgccttctgcgcgtgctggcagctccggcgcaggtgcgcgcggcgcatgtgcggaggttgttgccatggagacgccggaggttgggttgggcgggttccgggaggcgttcgtccctcctacaacgtccgcagcctgcgccgcgcggtggctctggactaggccttttcctctgggttgtggatcctcttctctatgactccgtccgatccctagtctttcttccaaaacatcatgaaaccccccctccaggagcctttcatgcttctctgtgtctcagtttcctcttctataacgtggacgtaacatgttattccctccatagcagtgctccatatgtttagttatgattgttgctattattaatattattgctctattaatcctgcttggcaggacctctagatgacttaaacatctctggcttcactgatggggacacacaccagctcagagaggtcaagggacttggctcaagttttaaaaaatgagtcagaggcccgctggattgtatttttcattcattcattcattcaacaaatactgagcacctagctgggaatacagtggccaacaagaagtccctgctctcctggagctgacttttcagctctgaaactctgagctcctctccaccgttccagcactggacaccaggcctgttacccagaaggtgggtgctcagtaaatgcccactggttggaaagagtgcaggtgggtcattactgagagtttgtctattacatttaatttttaccattatctttccgcaatgccttcaagtagggcaaatcactgttttgaaaggaataatttaggagttaagctttacctaaggccacccaagtgccagacagtggggactttacaggggtcacctgatttaattctataaacaaacctgtgtaaatagtattaccctcttgtactgacgaagactctcagaaacataacgtgacttgtctgaggtcacaccgcacagctagtcagtgtgaaaccgactcagaacccacagctggctgggtgtggtggctcacgcctgtaatcccagcactttgggaagctgaggcgggcagattgcttaagctcaggagtttgagaccaacctgggcaacatagtaagaccctgcctctacaaaaaaaaaaatacaaaaattagccgggcacagtagtgcacgcctgtagtcccagctacttggaggctgagatgagaggattgcttgagcccgggaaatggaggttgcagtgagccgagatcatgccactgcacttcagcctgagtgacagagctaggccctgtcaaaaaaaaaaaaaaaaaaaaaaaaagaacccacacttacctgactctaaagtacttatctgttctgccagtttgggttttgtgtttttaaaactttgcccctagccactaggagggctgttcctagggaagcagaaagcagccagaggactacgaactcacagatttttaaggcccattatgtctaagagaggggatgaggatgtgtaagacaaggtgctttctctcaacttgctcacgctgtggctaggcagaaaaaccagatgaataaccattcctacaggattctgcaggtggaatcctttgcccatactcccaggtcacatggttcccattcctgcagctgtcacatctgcccagtcagggagattcacagctgtccagagctctctccatgggccaggagtcactcagtggcagggctctgatctgaattatttctggatttccagacttcacatccacccatctttggctcgtggagggctcagtgagcgtgtgagaaaatgaagcaacttggcagaatgaacgtgcctgttaatctgcaacccagagaagatgtaaagtcctcttggggccatgtgcggtggctcacgcctgtaatcccagcactttgggaggctgaagctggtggaccacttgaggtcaggagtttgagaccagcctgggtaacatggcaaaaccttatccctaaaaatatacaaaaaa

SEQ ID NO: 1899 - DNA, 4001 bp, Homo sapiens
gccatgggctatatggcactggcagtttatgtttttgaggctcactctacacagatagaatggggactgctggcagtgcctcaggttattggtgggggtaagaaagggcatttctctctgccactgtgggggtgagggattcacacttgttagatgcctccctccacctgccatgtgccaggtcttcgtttactcctcacaatggaaggaggaaggtagaattatttccattttacaggggaagagacctggccctgaatggttaagtgtcccaggggttacagacccagttagggacctgccctcaggtttgctacccaggactgggtgtggggagggcggggcaacccgctgggagctgctgagtgtggggcacaacccagcttggggagtggacctgcaaagtggggacggggctggtggcagaggcagagctgagaagggagaccaaagcgagaggccacaagggcctcggaggggagtatacaggtcggggagggggacacagctggaggtggagctgagggcagaaactcagccccgggagggggctggaatcactttcaccttcttgcctgcaataccgtcagaataaagtggtactccatcaggggcccgatacagacccaaaaatgtaaactatctagataatttcgcattagccctccccgggccgggctacaggctggagagttttggccgcccagcaggctggcaggcgggggcagaagaattgcgggcggggggcgggacaaagtatgtgcctgtccgacctgtcgggattagcctgtctgtcggagccaagccaggtgctggggccgtgccccccctccaaaagcaagggcagcggaggatggcttcttcacccctccatcacccccgcaagcgcgcacattcttcttccctcccccaccatcccgcagaggccccaacaggtgccgagggagacgcggacctgaggttcccctggctggccctcaagagccaagagagctgtccacgtctgagaggccagtttcacaagaaaactcctgcccccaagcacactcactccaagtctgtcccggccctccagggagtcccgggcgaacatagcccccacctctccccaactaagcgataccatcggttcctgagcgccagaccccgagggccagggagccgcgccacttcgctgcgcaccgggggccgcagcgcatgccgcctgccacgtcgaacccaggcccaggctgcggactggggtgggggtcaccagagaccgtgggacttgggggaatccgagccaatgagccccaggatcaagaacttctggattggaggcggggtataaacagggctggtggacttggggaattcaggactgcgagtgaggatgatcacccggggctgcgggatggaggggagttcgaggggaagaggctgcctgctggattgagggccgacgggggcggcagacttgcaggaagggtgcaggaggtgccctgtcctgatcgccgaccggagagcgatcagactccccttcctttctgtctccccccacgcacccagctagaaccagccccgacgggagggcccgccgcgccccagctcccggggaagggggcgctggggagaaggatggggcagctacgaggggactcaccttcgtgctgccagtcgcgacgggggcaggcccgggaggggcgagggcgcggcccgctcacccgcccgctgcgggactgtcctgggcgcccggctcgcctgcgctccgcccgcccgttcccaagttgctcaatctgcggacggctcacgccctcggggccagcgccccacccggcgcatcggtcctccggggcggctcggagctgccctcgttctccgcagcacccgagcggatgccctactctggccggtcgctccgggctctctgccctgcgctggtgctctccgtcgcgcctccgctcggccggagctcccagcccggagaggggccagtcctctgcgagcaccagggagggaatcccccccttcgcagtcccccccgcgagccggccccccttccagggatccgcaagaaaaaatggactggagcgccggcccgggagtccacacgtccttgcccgaagctggcgctctgcgctccgagcgcggggctggcggagggacaagtccccaggaccctggggcagaccttctgcttttgtcccctgcccctccccgcgccccggggattccacgcagccagagaacccgcaacaactccgctcatcttggcgtcagaacgcggccggagaccctcatgaaaaccccagtttccccatcaggaacctggaaagtgacaaggaacaggctccacagagcctggtggtcttgaccacaccctctcccccttcagggtcaaatcttctgtgcatcttcccagttcagaagaaataccaaggctatcagatcctgggcaccgaggtgaggacacctccagaggcagctggtaggtgagagtgagggagatcatacaataacacttagattcatgtctggctctatcacttaccagctgtgtggtcatgcctaggttactgaacctctctgaatcgcaaggcttcatctgttctgagggttcaatgaaatgaaggctacaaacttctggttaatggtgggaaccccatacatgtttgtggaatgagtcttgaacggctacagacacctgcagtgacccagatgatgttgaagtcaagcccgaagaagggagggaaggagactcacttcttagagtgacaaacagctgttctccagcttcacttcagattgggaaaggaaaatgggctaaaactgtagttagtgggagttaagctagagcagaaaagatgtactgattgtgtgtgtgtatagggggggtgagtaatcaagacaggctgtggaatctccctcttaggagagaaggggggagccctgactattgagttaagggcacagggtcgtttacaatgacaggaggatggatgtaatgacccctagagtgtcccaatggccagggaacagggatggtggatagccagagaaagtggagcagttgggtccgaaatgcccagtgtctgggttcattcagccagagcattgccaagtttgcaggaggcaaacagtcatttccgagttggtccaggggccccctccaacctccaacccccactcaagtccctcctctctcacctctgccctgagccttccctgcgtctaaccggcccttggctatgctctgtgtctaatcaaacagccccaaatgccgaaaactcaatgtttattttattttatttttttacacacttgcataactctctgacaagccacgccaggcattgggctttttgtttggttttattttgttgcatttaggaaaaaaaagagggagagagagagaaaagagaagaaataacacaaaccacacagccctagaagctgtcctaggccaggcagtgggctcgggtttcctgcctgaggaaaagtctgtggaagttggggggcctcgttactaggctcaggaatgagtgagaaagggaagaaagccacctgggtgacagaagataacgaattagaaccatgtgacaataatgggtgaataagaaagaatgtttcttgtgcacctaatgtatgccaagcactgtgttttgcacatatattctgttacctaatttcgcaactattgtagttcctttcttttttccttttttcccataaatgtaaattctgatcctcagagacgccaagtcaattgctcagagacacacagcctgcaagtggccagcccagttcaggttatgccaaatgagttgtttccctgggaaagctgtgttgctctaaatttgcatatgctgttcattctgcttagaaatgtctttttctcggccaggcgcagtggctcacgcctgtaatcccagcactttgggaggctgaggcagtcggatcacgaggtcaggagatcgagaccatcctggctaacacggtgaaaccccgtctctactaaaatt

SEQ ID NO: 1900 - DNA, 4001 bp, Homo sapiens
cccccttactaaatgcagatagaaagtaccacagtgtttgagagactgtaaaccccaagtgtgcgcgagggttccatatgcatcctggcaccaatcccccgagtgaacagagggacaactgtgtaactttattcactgaaaattctattctccagctcatttcttgctgaaaagaataaaattcttaaattatctcaacaattagttttgttttcttgactaaaggcctgagcgtcctattattttgtctttttgttgtacttaattttctctagctaatagtgatattattttgctttctcttcaaagatgtatttctgaaaaccaggtttttctgctgtagattctttatataattatcacaaccactgaaccaatactgatacactactaaagtgtatttctaccaccacccccggctaatttttgtacttttactagatagtgagctatgttggccaggctggtatggaacgcctggcctcaagtgacccacccgcctccgcctccgcctccccaagtgctgggattacagaggtgagccgccgcgcccggcctcctaggtcacttaggatactcgacaatccaattttattcagtaataatgtcaactaaaagaaggcgtgttttgatattgttcttcccaatcacgttaacttagaacctttaacttaatcataacatttaaaaggctccacccactaagaacagtcagccaataggaaaaaaagttccctacatcctgagccatttaacatccagttgacctttaaccctaaagagaatgctgtccacttaaatacaggtaatgtcctccctctttcctccaaaaagatttcgggcactaaaggaactaatattgaaactacacagcaacgttggttccctagcctactcatatactgccaccatacattaccacaaatggaaaggtaaatgacccacccacctttttcacttaagcgaaagggggttctgctccgcgacctcgtcctggatctgtccctccatctgctgtgctcctccgggtacactgtgcgaccaaagccgtagtagcgctgtccccgcgcgatcgcgtacgcccttccgcagtacgaccttccccgagagcgcgacctgctacgggaccgggaccggtaccgcgaaggagaccggtagtatctcctggtgaacccgtagcgcctctctcggtaacggcggctgcgggatcgcgaccggctccgcgagtatgaccgcgagtagcgcctgtacttccgctggtggcgccttcgggaacgggacctggacttgctcctccgactcctggacgaaaaccggctcgagacgcgggaatgggaccgagagcttctggaaaaagagcggctcctagaccgcgacgacagccggctggacccgcccgaccgcgaggtcgagggcgaatccttctcctgcggcgagcccggccacatgtcgttcacgtagttggacatcttcacctgcggctttagcctgcgctttctccggaaaggatcccgcaagcctcaactcaggacttcctaaaaaaccaagagagaaaaaacaagtcgagtcgcggaagccggcgcctggccacccggaagccacagtcggggaacctccgggaggcggagccacggcgcgggcggcgaccgccgcgacaggaaccgagccctagaaaccccgctcggcgccctgaggccgcggccttgaagcgaaacgctgcgttccccaaacgcggggcccggcacgtttcccgtccctcactcctgagagaccactgcggtggtcctgagagaccccgtcagcagaaaacttaccgcacgccgtcgacgcctccctcacgactgagagaaaggctcaacagacgccttcctttcggaacgtaagacgaagtggggcttttagtccctgctttcgaacggcgaattccacaacctccacctcctacgtccggatgcgcactgagggactacgttagcagacgcgtcaaaagtaccagaagctggcccccggcgcatgcgcagagatgttccgtggtgggcgcggctcttctcttgcccaaccaccgccctgcctcctccctccccaagccgcgccctgtgcctcgagcgcttgcctccagggtgcgcatgcgcgatggggctccagggggaggtgtttgatacatcagggtgtcccgttgcccttggcttcccccctgatctgagataattgcgggaccgacccagtcaccagaaaacttcgaagatggaacggccccgcgtggggctacaccaggctctggcctcactgcacgggcggggctggacgtcagtgccgggcggggagtagggccgggagaggagcggctgcaggctggagagggctcgcagccgggctcggagctggggccgtctgacgggctggtgcccacagggtcgttgccgccacccaccggcaagtcgcagacccggcctgagcctccctggacccttcctggcctcttcctcctgtcctaggtaccgcggcgccaggagaaggcgaccgcgtccacaccccgccatgacagagaggggacctcaccctcccccggaacaccccaagacccctggaaatgcagtattaacgtagaaaagatgttttacttccatgttttggctaggaaggtaataaggtcgagacaaaataaaaagactcaaaactgacctttaatctggggataataatgaagtctgcgatatctcttccaaaaactgtgtttggtgtgagtgtaaacaaaggtgactattttacttctagggatctacaaatgggatgcatttcaaacacttcttgtaataaagcataacaattgccttgaaaattgtgggttaattgcctttttttttttttttttttttgagacagggtctcactcgcccaggctggagtgtggtggggccatcacggctcactgcagcccaggctcccgaagagctggaactacaggcatgcaccaccatgctaatttttgcacttttttacccacgggatctaactgtgttgcccaggctggtctccaactcctgggctcaagcgattcttccgcctcagcctcctgaagttttgggattacaggcgtgagccactttgcccagcctatacacttctttacaagtacattttgacaaaagccactttctttagagggagacacaaactcactcatctcttgttcatcttcaccccacatctccgcagttcatccacatctcctgaggatgcatcatgatggaagtagttcttaaacagtttcttctctaaatctcaagacagtgaagatacaatgcccatccatcagaaacctttgccgaaagttctcataaagctgtgtgagtggacagaaaaataacacgaggccagtcgcggtggctcacgcttgtaattccagcactttgggaggccgaagcgggaagatcacctaagatcaggagttcgagatcagcctggccaacatggcaaaaccccatctctactaaaaatgcaaaaattagcttgacatggtggcgggcgcctgtaatcccagctactcgggaggctgaggcaggagaattgcttgaacctgagaggcggaggttgcagtgagctgagattgcaacactgcaacccaacctgggcaacaggagcaaaactccgtctggaaacaaataataataataacaacacgagtttcacatttgacaagtataaaaatgatgtgttggggaactaaagtatacttacgatacagttttgagctcttggttatgaataggaaaggatggaacaagtctccgtagacagttcaaagtatcagtcaatgtgtgcctaaaaaatggtgaccagaaaaatcctaattttttttttttaagacagtctcgctttggcgcccaggctggaatgcagtggtgtgatcttgggctcactgcaacctctgcgtactgggttcacacaattcttgtgcctcagtctcccgagcatctgggtttacagacgtgcaccatcat

SEQ ID NO: 1901 - DNA, 4001 bp, Homo sapiens
ttgaggccttcaggtcataatactgcatcaaaacgtgtgcattcagactgcctacatccccacattttatgacaaatttataaaactgcaatggcaagaaaacagcaaggtctaaccacagtaagtgccacatcttcagtgtcagcttccttttgggtttttatgcacctagactacctgctagtatgtatcattttaacacttccttgcagaccagttatttctgactataaatacataccctgatatattgctgcaaattagaagtgtgctaaagaagaaaactaatagttatttcagtgccaccagtctcgcttgcacttgactgaacaatctatggtgcctgtatgggctgaactatgttccccctaaattaatatgctgagactgtaaccctccgtatctcagaatgtgactatatttggagatagagcctttaaagagataattaagttaaaataaggccaccatacaatcttactggtgtccttataaaaaaaaaaaaaactagaacatacagagacgctaggggcaaggtacacagaggaaccaccatgtgaagaggcaaaaagacaggcctggagcagatccttttctcatggctctcagaggaaaccaaccttgtcaggaccttgatcttggacttccagcctccagaactgtgaggaaataaatttctgttgtttaagctccactctgtgtgtggcattttgttatggcagccctagcaaactaatacaacacctacagcctaatgaattggattcccctgttggtgaactggagggctgcaaactatgacaaaggcaattaacattaacatatcagtaattgccttttggtaatttcaaaactgtagacaaaagactgagaccgctgatttattaaaatgtaataaatacagaatacatacaaagcaatcagtgtggcttcaaacctgggtcctcttctagcaggtgcatgtacctgaagctcaactagtggcatgcccagctacccagacagaagaaataaggtcaaatgtcaaggtgtttccctctccacaacagataattctggtcataacagctctctggaggtatgaatgaaggctgggataacacatctcaggattctttcctgttttatgattctaaaactgacagcagaaccagaatgcactggttataaaacagggtttcctctggcgtcacaagcatttctgccctatctatcttgccagctcatacgtgctgttcggatatttggaatgcccggtgaggtgagaaaacattttaaaagctagctcttcagcaaatgacactatttagtcaaacagagaaaactcgagaccatttctaaactcacccctccaggctttcaagactttacaacccaggccaccgcccaggcagagtgccccgccctggatcgcccatacctgcgtctgggaccttctgggttccaccactcggactcccgatgccccagcccggcagcccgaccccccgatcccccagcttcacggcccaactccccctccagccagatttacctcaggcctggcgtgctccggccggctcggatcttctgcacccgcaaggggaggcctaggagacagctcaaggccgtagagactctcaggatctggccgccctgcaaaggttggggtacagggagaagagaagtaagcacaccggtggtgagagctcccctccttagttaggctgcagccccggccgcttcgctctgtactcaccccttccatgatgctgccatcgacctccacccgcggccccgccatgggggacaccctggggcccagcccgcagcgacaaagcctccgccagagcgggagaaagaagagacgttggctcccgcccagtagttcagaaaccttggttcatgcctggggcgcaggagcctgacgagaaagcggaagaagcggcgcctctcgggacactggagtcagcagaaacgaacccccgggttcgcccagttccgcagtcagtgcgcatgcgcgtagctcggcttaaaggagccgcgctgggaacactgcggtcggggcgaggaagctgccggggaagtgagatgacggtcgcgggggtgcccaggagccctgaaaaacttgtgccctgggcacggcaaaatctgcaggttgcagaaagtctcaactgtaagataactcctccagttatcccgcaggcttgtgctttatctctgttttgtgggtaaatatgtgtttatatctgttttctcgaggatcctggcataccccgaggtgccgacttttagagctgaagatgcaagaaagattgggatcctgcgatgcaccgaacctgtctctcgaagtgtgtgcgccctggtacattgatactcttggcctttggttccttgcggtgtgcgtgtttgtgtatgcggagtgtgttatctttctttctagggtgacacaccatttatttgagaggcgggaaaggcagaatcactagtttaatattctgaaaagccaaagttatgccattttgcttgagagtgagtgcaagctcttgactcccaggaacagtgcagctaacaattcacctcaggcgagggcagaagcaatagccagcttcttggttctgcctgtggctcagttcctacataattgagtaccaaataatatgtaaacctctagggaagcaaaaaagagtaattcagcttctacccccgaagttattggaggtataatggagagactgagacgtaatcaattacaatgtcatcctcaataataattaacatgtactgtatttagagtttattatggggacaattacaatatattaataatatactgtaacaataacaggcaacacttattgagcacttaggtgttgtgcactgcatgcattcataacatgataaagtacttactgtttttactgttttacagcttcctgtgttaaacaatttgctacaaggtcacacaattttaactagaagactgagatgtgaacctgggtggtctgatgtgaacaccactgtctggtaatcccaacgctctgctgctttgcgacagagaatgttttagggaacacacagactatgtacttaaccaaatctggaatttgccgtaagatattaatcagagaagtaatgatacttgcattttaaaatgaaggctttggcagtaggagaagggtgaataagaggcttaagagcctgaagggagaaatgccaatgatacaattatccagcaagaaataatcagaagttgaagtaaggcaatgatggtagggatggaatataaaaaagctgtacccctatctgacatctttattgggggaacccgcccccaatatttcaacgtaggttctttctattttccataagtgttggccagctgagaaataaagagagacagtataaagagaggaattttacagctgagccaccgggggtgacatcacatatcggtaggaccatgatgcccgcctgagtctcagaccagcaagtttttattaagggtttcaaaaggggagggggtgtaagaacagggagtaggtacaaaagtacaaagatcacatgcttcaaaaggcaaaaagaccttactactagtaagggtctaacaaagatcacatgcttctgagggaacaggacaaagggcaaaagcagaactacttataagagtccaacaaagatcacaaggcaaagggcaaaagcagagctactgataagggtctatgttcagcagtgcacatattgtcttaataaacatcttaaataacagaaaacagggttcaagagcagagaactggtgtgaccacaaatttaccagggcggagtttttccccaccctagtaagcctgagggtactgcaggagaccagggcgtatctcagtccttatctcaaccgcgtaagacagacattcccagagcggctgtttatagacctccccacaggaatgcattcctttcccagggtattaatatttatattccttgctagtaaaagaatttagcaatatctctcctacttgcac

SEQ ID NO: 1902 - DNA, 4001 bp, Homo sapiens
acaacgttataatagcagcaactccaaggaagcagccacagctctcagctctcagacctggggctgccgctcatcatcagctacagctaggtttgatgggagtgcccccatttcaggggacagcaggcccccttcactccccgactcagtccccatctgcagcagcacagccttccttggcctcaccagggaagaagaacaggccccgctctcagacaagccttcccagaagcctgaggactcaaacacccaaatgtgtctgggtccctgccccgagccggccacccaggcagcagccctgaatcactcggtcagccagcggcagggcaggccaatgggctggagggtaggcaggcaggcagacccacctctgcatctctgctgactgcctcggctgaggaaaggcagcaccagcccccaaccctgaagttctagatctcatgcagcctctctgttctggaaccatccagaggcactgcccttatacatggtccacccccaggctcagacaatgagaattccacaagcagaggggactctatttggggcacagagaggttaagtaactcccctcctaaggtctctcagcaaggaagccactgagccgtgggacttgagctcagggactcttgatccccagtctcaggtgtcacagccccatctgggctcctgctagggaggaggaaggcagcagggggtgtctgaggccagggtgcatcagccctaaatgccagacagaggcaggagaagtctccccatgagtcccagccccattagaggctccaggtcggggatcccagaccccctatccttgctgggagacacaacccagaactctgcatccctgcagccaccaaaaaaggcaaaagctgcccagaaacactttctcctcttccgtggccaaatccacgaactttctcgaggtctgtccccctgccccgtgcaggtccagcttcagtgcagcccagctctgtgcagttttccacaaaagcctgtggcttccttctcctccctctgcttctgataccccaggagttacacacaaaatgttggcggtggtctccaggaagacccctgcatcccacagctctccccagaagttgccagcagtgacctcctgagcccaggtggggagtcccaggcaggacaggggctggggctgcaggccctggggccctgttagtgaagcagcaagccgagggtccctgagagtttcccttggcccctctgagggctgccctttgaggtcttgaggtcttggagtatccatcgcccccacggcttactgtccccaccagcggaggatgaaagtgccacagcgatgttccacgccaagagaccacagagaccaccaacccctcttcccacctcaggctttcagaggccagcggatttaggcggacaggctgtgcgcttgagggcagccagggcggtcagtggagggacgtggtccggggcctggccacagctccccacccagggccctgggctattgttactcaccgcggatgaaggtcggcgagtaggtcgggaaggagtcgaagatgctgttcgatgccatgccccgctctgaagaaggcgagaattttcagcccttcagggggttgggttgggattcacttggttggctgttgttttatttttttttcctctagctacttttgaaaataaaaggggggggtgttgctttttgttgttttttgttttgtttttgtctcttttttcccccctgctgctacgaaaaagaaaaaaggaaagaacgcgagagtgtgtgtgagtgagagagagaaaaaaatccccaaggaaagtaagtttctgtttgtacccaagaatttggattcccggtcccacaggaatgtctagccacaaattctcaacagaagcgtatgcagagtgtatcattagatggcgggaaggggctttcggcagccagggtggaggagctccgaagctgacagagcagagtgggccgcctccagtgccacggggaatgaatgaatgaggcttacccttgacagagcccaggctctggtgggtacgagggcggccgggggtggggagcaccaggagccaaccagctcccgcgcagggccctggaggcggcaagggcctggccttgtggttctgtggttgagggaccaggccttcccagtgtcaacccaacctcagctcacaggatgcgagaagcctgctcgcggccttggctcattggctgggccgcggtcacctgggccgtgatgtcacggccttttagaagatcttgtggctgcctctctttttggaaaagaaaaaaaaaaaaaagaaagagagagagagagagaaatagaaaagtgatggcttttatttgtgaggctggcctcagcacgcggcccaagaaacagaactgaaagcggttgcagtgggcgtggccaggagggtggtttggctcctgggtgggagactccttcttaattaaggccagcattggcctgggcgggctaggagccccgcgggcccctcaccgagtgcccagagcccggatccaccagcggccggagagctccctgccatgccacctcgcccctgggctgcggctgactccctgccattgtccaccaccattgttgccagggagaggtgtccacatgtgtggctgggtggcacctctggggcttttatgggagttgggactaagtacaacgggaaacacatgaagtggcattgccagcactcacgcctggcctcggcctgcccaccgagaagggccttcctgtggaaacctggtggcctgcccgcactggggggccctctgcagggctgggggctgagtccccagcatgtcattcagggccctttactcctcttgttgccacctgcgcatccccttgggggtctctgccccagcatgatgctcgggagcttccctgcctccgggccttcgctcatgctgttcccctcaccagaagcgccctttgtgtcttcatgtccttgaggagtcaaggcccagagaggctcaaaagtagaaaagtcatgaagacgattgaaccctatacttgcatgttccccaaagtcatgtcaggatgggagagagggtggagagtgggggaaaggtggcggcttttaccatttcccttgcaagctctactctcccatttcacaggccaggctgcgaggcccagggtggtgacgccagcttgtctaaggtcatgtggtattctggaatgggattggaacttcagcctctgactcaccagccccgaccttgggcatgacaccagagtgcccttccatgccctttaaatgaagacttcagaaagtccctctgcagcctggccaccaacccctggcctctcccagggaccccaggcttggggctagaacctagcaccagcctctgactcacagtagcctctgtaggccaacaaggatggggtggggacatccctggaagaggatgggctggtccaaggtcccaaagagacttgtttctgcccaaggcacatgtgcagaagatggccttggaaacgctcactcagcctcatctcaagcctcatgaagattcagtcttctgtccctgaatggtgggtcaattggtgctgagggtgggggtggtggggacaagagttctaatttggccagagaggaagcaggtttatggtgacagccacagagctctagagtcagatttggcttccagccccagctctgctgaatctgagcagccagaccctggggaaagtcacttcctttctctgggcctcagttttcttccctgtaaaatggggataacaccttcttcaaagggacaggcacggggtgagggcatcataaacattggtttccttggctgagcctccatgacgcaatttgggctccgttatgagtcagctcaagtaaggagctatgacagtcatgcagggggagaggctgccccgcccccaccctgtgttgtaaactcatcagctggccagcctgcatgggaccctcaggggtcaatggcacaggggggacctgccaagggg

SEQ ID NO: 1903 - DNA, 4001 bp, Homo sapiens
caaaactcactggtgttttgaaaaaggccaccagaaaacccctttaaagtgagagtggggcttttgataatggaaggatgcacctgccgggaattgcaggatgggggtggcgatgtccccctaaacaccatctcccccaaatcccccacccccaggagcacggagaggcggatgccttttgaaaaagaatcagactttaaacagagtcacaactatttaaacgtggccgccgcgtgcagggactggggatccatatggtaaaaatttcaaggagaaaatgtttgggatctgattaagaagaccagatttcctgtcaacatcctgtcttcttttaatttcaaagactccttttaagctccaagtgacagtaaaacctccgatctgacgattaaagtcacacgggcctcccgcccctcccggcgagatttcccccactggtattttaagatgtcacccgggagacctcaaagagccactcttcctttttttcccatttagagtcgtcttaatgggagcagggacggcctcagcttccagccacctcgggcagcaccacccccagccgccggcccttcctgccctgcccttttctcacggcagctgtgagaggtttaggggaaaaccgaggcgttttcgtttcatctcgctgcccccttaaaaaaatgaaaatgaaacagtcgcctactccctggcataaagaaaaaggtcctctaaatggctgggggctgccagggttaggggtcccccaatctcaactcgccattcgggacgcataatatccccgagcaaacgtctggagagcagtgccccgatcccggcctagcgccgtccggtaaaatttcggaagcccgagggtgtgagcaggaagcttttgcgaagcggcgcgggaggaggggtgctggaggcggagggtaggccctttcaccgttcgcaccccacccgcggtgtccttgcccctgtcccgggatcctcttctccgttacccgcagggctgtatctgagcgatccgggttaggggggcgcaaaaccccatccgcccatttccgcaccaacgtctctacgcaaggcgccccaaaacccaggtggagcggggcaaccccgttaaaagtcattcctgcagggcgcatccaaaacggaacgccgaggtcccggagccgagcgcgcagccagactgaaccgggtgcccgggtgtcgccgcggcgtctcgggcacctcccatccccactgctcccgaggctctggctcccgcagctcagacgcccggagccccagggccggcgccctcccgccccgggtcccgcactcaccttgaaggcgacgggcagcgtcttgttgcagcgccagtgcgagggcagcacggagcagaggaagttggggctgtcggtgcgcacgagctcgcctgcgtggtccgccagcacgtccaccatcgagcgcacctcgggccgggcgcgccctccgggccccacggccgcctgcgcgctcagcgcgccgctgttctcgcccatcttgccgccgccgccgccgcaggggaaggccggggagggaggtgtgaagcggcggctggtgcttgggtctacgggaatacgcataacagcggccgtcagggcgccgggcaggcggagacggcgcggcttcccccgggggcggccggcgcgggcgcctcctcggccgccgctgccgcgagaagcgggaaagcagaagcggcggggcccgggcctcagggcgcagggggcggcgcccggccactactcgccagggcccgcccgctgcgaggcctcgctggcccgacggccgcccgcagcctgcccggctagtcccgcatcctcggcgcgcggccccgcgtgcggccgcccctcgtggctgtcccggctgcctgggccgcggcggggcccgcgcggggctgtgccgctgccgccgcctcccgccccgaagctcgcccgcggccgccccgactccgcggccgcagccccagaacaaatcctccagaatcaagtggcggggccgcggccgcccgcgcggggttagtacccccggggcccgcggggcggggctggcggagcgacgcgtcgcacagccaatcggcggagcccccatcgcgggcacctcggtggcgttcgcggggaggaacggggcctgccggaggccgcccaacggggaggggcggaaggcgccaccccgcggaggaggccccagtgccacagcccagggcccccgagagctctgggagcccggggcaaatgctagaaatttgcttagaacgtccgggtcccacggaaggcgcccttgccgccctctctcgggtcgtagctccctgacgctggggcgcaaccccttcgctcctcctccccgctggccgcggccgggcttccccagctcttgctgcttcgggcctgtgacttctgcaaccccgggctgggggccgcggggtctcagggccggtgacgccgcactgggagccgccccaaagaggttactcacctccctcgtcccgcacattattctgacccaagagcctccaccccacacgggattttgcgcgtcgtccacgcccggccggcggcctttgctgctcccagccctgcgcggctttggtcccagcctcggtggcccctgtgccaaaccggggacaggcggaagggagtctcctagggaccctaagtagcctggggccaacaacccctttcctctctgctctcccctcaaaacaagtttcaggatcttgcaggcctcgcggcgtcgttcttcgttgtggcggcctgtggctctttgaaaaacacgacgaggcctgcaaaatgcgtttttctttttttcctttacgcatgtaaccacggtcctgcatcgtgaaacggtacgcgcgtcggtggcaaaagaaaaacagcagtggctgcaaagctaagggccctcgctttcagaggagagaattttctttctccatgcgggtggaaagtggcctctgcgggtccaaccccacttcttcttgggcccgtgcgctccggctgcgccgcagggaccgcggacagcttcgccaaggcactgcctgcccgcccggctccgggtccccgctcccactcccagccgcgtggcccaacctctcctgggcttcactgcaaatcaccccttcctctcccgcctcctaagtctgtcgagcagacctaggggccggctacagttgggagggcaacgggaaagatcaagccacaatcattccgaattatcgccccagacacctccctagactctggggaacgaacgcgtgctgagcctccccgccgctttggagacggggctagattttcgttgcctccggctctcgacaggtgcaaaacaatgaattccaagcctcggaagcaaagaagcttaggatccgacggtggccgcaagatctcatcatggatctgacccctgctcagcgcgcgccatttcgtcgttgccaaacgaaatcaagccccgcgtgcgctccaggggcgaaggactctggactcaccccgaccaccgggagagctggcccctacccacctcgggacctcacagcacgccctcaggccgtgtcgaaaggaaggacggcaaaggtcccttactgaaccttttaagagagcctgcgcctggcagttgtcgattgcggacccaggcccgcgcgccctcggacgcgctggcacgagcagcagaactagaggaaagcgagtgatccagcctgggcgctcccacctccgggaacgtctccgagaaggcgcagcgcgtcgtggccaggtagggccctggccgggggcgggcaacacgtgctgccctcgagcaggttgcgggaccatgacccgctgtttcaggtggtggtaaattccatttgtcgaatggtttcggtttgcaccgtgccctttgcttgttcctccgcctgatttctccctctccgcttacgatgggttcacagacaagtttccagagaatgagggactcttgtgggccctggcacctggcgcagggcccggcacggctccggctctccgtag

SEQ ID NO: 1904 - DNA, 4001 bp, Homo sapiens
ccatcctctaccatctgaacctctgacctgcatcttcctggagactggaaaaccacagctccaactgcttggtgctaggggagaaaagagggaatggaagttcagggaggtggaggactccagtcctctctgggtggaggatgggagatgagattggaagagggggggccttctctggggatgtgaggcactactactgtgtcccacccatgacgctcctgcagtcccaggtcgtgggaagggcactggaaagaaggcaactcacttgaggaggcccaggataaaggcatggaagcggctacggctgctgctcagcggggctagacggctgacctggctatacagggttccaagggagcgggtgctggagcctgagaacgtggggtgcagtcagccaagcccggccctgccctgcgcactgccgggtcccacgccctcctggctcacctggcttcaccgacgcctccaccacgctccaggggctgctcctgcgctgcccggtgatgaggtccttccggaaaggcttcagcccgtccgccaccagggcgtggagggccgggcagagggtggtcagcaccaggtgccccacatccgggctcagccggctatcacccaactgggcctggaggtggcgcgatgccgatggctccagagatccctccagacacctcccagccacctcccgccaaccattcccgcaccccccgcggagctccattactctcctcatcccaacagcctccccccagccaccttcaccttctgcaccaagttccgggcggccccgaaatgcgagatgattttatcaacggagacgctgacggctatcagaagacctgggaggagtgggaaagggaagacgctaggaggccgcgcccctacccaggcttgcccgaggggcgtggagagactgccttcggacagcctgagagcagggccgggggcgaagggcagtttattcggaagcgcggggtcgggagtcagggtgccctacctttcttctgctcctgcagctgaccagtcccactctgggcttctgccatccacagccgctgggctccggggacaccggcgaaggaccacgaactacggactggcgtaagggaagaagggcgcggtaacacttaccaagtgttattccgaggactccgggctcccgcacaagttgtctccggcgggtctgcagtgctgtgtccccgaagggtcttggggagaggaggcgcaggaccgcctgaagcacggggtagctcgacccgagccccggagtgaaatctcgcacacttcccagcactcgctgtcccccagccccatcccggttccctgtgccctccctcagggcacagcccccacctccaggatcccggaactccgggagcgggatggccgcgctcacctcccgcctgccctgctagggcctgtagggcgggagaggacggggcgcggggagggaggtgtagcccagcgcaccgccccggggcccagtcctgcctgcggagccccggggagcacgtgggcggcatggaccaatggaaagacagacaggggaaagggaggagacggagggaggcgagacccgaggattgggaggctggaaggcgccggaaaggggaaacccgggtcccgcagcagcctcttggcggagggtgccctcttcatcccgcgtgggactggactcgcggagagggcgtggccagaacctctagtgccaatgagctcccgggagcttcaccctccacccctccctagcaaggtcggggggcaggcccgagctgcacaggccaaggaattccacagagggtgtgacccaaagcccctaacaacagactcgctgggaccccctagacttggcatggaggctgggtaagcccgcgtccactatgcccaggtgggtctggagggagagggggccggcccacggagcaggaaaggcaacaacttccccctccagcactaggaacggggccagactccccaaggccgacaaacttgcttggagtcggcttaaactgaagggcgggactaagctgggcaaccccggaaaaaaagcgaaaacggggccgggcgagagtgggcggggcggcccgcctgaggcgtggcccgcggggctagcccgggtccgtcttacgtagcctgggcggaggcgatgggctcctggtccagcgaggggccttcggcggacgaggttgcggtggcagcgggggggcgggtacctggcggggtgggggagccgcggcggggaaggtgctacttctgggaaagagcggggacagcagcagtgccagctcggggctggccaggcagggcaaggctccccgagtcggaggcgaataggctcccaccggggacaggcggacgggcagcagctgctcctctggggggctcggcgcccccagcagccgcagcccggcgccgggccacccggccagaggagccaggagcagagacccagctgcgcctgcgcccccaccctccaacagggggcgcccgtcggccgagaaccggaaaaccaggggccgagggagcaggaggggaccggctgcaggcgggattggcggggccaggcgcagagggaaggagggcagcgggatgggcagccaggcaagaaggggcgggaagaagagggagcaaacagttagtcccataacccaatgacccacccagtttccctttcccggagcgctccctggtagaaggggcggggaggatgggtgacacagaatggagggaagacagggggccgggttggaagcctaggaggcgtgagcggccgaagcccagccctcctcccgcttcttgcgacctcttaccctccaggccggcctgcgcgcccggctccttcgcggctggggcctcctcgccagccgctgggctgacagcccggccctcctcggactgcccctccgctatgggctgcagtccaggtcggttcttcttccttcggggagggacaggcgggggtgggggccggggcgggaccaaagcccagccaactggggggtctcgaggcgggactggcggggctggggcccggcttcgggaccggagttccttgaaggtggtgacttcccgaggaggtgccgaggagccgcccggcgaccccgagggggggagctcggtgtcgggcgagaagactatgagccagtcactgcgatctttcttcgcctgcgggacaaggggcagccctgggccccgcttgcgcttctgggccagctcgtggaaggacgtgattgtccggtggggcaccggctcctcgctgacgtcacttctccatcctccatcaattttccctgcatctgttttcgagccagaatcagttattcttgtgttggttttccaaccagagtcgaatttttcaggttcacttttccagctagagttaacattcccgttgtttttccaaccagtgttattgttttcagtggttttccattcagctttagttttctctgtgtcaattttccaaattgggttaatcttccaactgggctccgttttcccagcgtcgattttcccatcatccgcctctaagagctcagaggtagggagatcctgctccgccctctcgtcctcttcctccaagcctggggaagggacgtcctggcaggtggtcagggcgttgcagttcgagtccaggccaggatcgggtgaagaagaagctccggagcaggaatcaggagagcagcagaagctgtccggtgagcaggtgccagggcctgctgaagccagtggggagccctgctccagggggatgatactgggctgagggtgggcatcctcatcaccagggaggtcccgcaagtagactgagacaggggactcatcggggctaagatctgagcaggagctgagtgaggaggagcagcctgggtctgagggagaggcagccccctcttcctcctgtgacgggtcctgccggttttctaggcccggaccgtgctcctggcagcaccggcagggcacagctgggctgttggaattggcgtccaccagggtgccactgc

SEQ ID NO: 1905 - DNA, 4001 bp, Homo sapiens
cccggcgaccccgagggggggagctcggtgtcgggcgagaagactatgagccagtcactgcgatctttcttcgcctgcgggacaaggggcagccctgggccccgcttgcgcttctgggccagctcgtggaaggacgtgattgtccggtggggcaccggctcctcgctgacgtcacttctccatcctccatcaattttccctgcatctgttttcgagccagaatcagttattcttgtgttggttttccaaccagagtcgaatttttcaggttcacttttccagctagagttaacattcccgttgtttttccaaccagtgttattgttttcagtggttttccattcagctttagttttctctgtgtcaattttccaaattgggttaatcttccaactgggctccgttttcccagcgtcgattttcccatcatccgcctctaagagctcagaggtagggagatcctgctccgccctctcgtcctcttcctccaagcctggggaagggacgtcctggcaggtggtcagggcgttgcagttcgagtccaggccaggatcgggtgaagaagaagctccggagcaggaatcaggagagcagcagaagctgtccggtgagcaggtgccagggcctgctgaagccagtggggagccctgctccagggggatgatactgggctgagggtgggcatcctcatcaccagggaggtcccgcaagtagactgagacaggggactcatcggggctaagatctgagcaggagctgagtgaggaggagcagcctgggtctgagggagaggcagccccctcttcctcctgtgacgggtcctgccggttttctaggcccggaccgtgctcctggcagcaccggcagggcacagctgggctgttggaattggcgtccaccagggtgccactgcaggggcccctgctctccttgcccccagtgtctcctggaggagggggtgtgctcaaaggcccctcctgtagctcaggacggcgggacaagtgcaggcccagggagacgtgctggaggtggatgtggttgaggttgcagagtaaagctctctgaggggacagcatgatgctagcggcgatgggatggcttctagagaaccagaagggtagggtctctcacatccacctacctggcaaccacaggtgcagacctagaagacagaggtggtgaagcccggccagtgaggacaagagctgcggggaaggacaccgaggtgacttgacggcagcagcaggcctgaaggctctggctgctttggaagatatttcaatgagatgcaaatcgcaatcgactgaccattagtttccactgcagtgtttgcagatggagtcgaatgtaaccccccgggaatggagccgggagggtcagagaacgcggctgcgctctggatctccgaaggggggcgggggcctggaagaggtccgggcccagaatggacctccaggtccctgctgccgcaatctggccctgccctccagcctaccccttactcccagaggaagggacccagggagacccacccagatgccctgaaaggaggtggaggatgggggtggggcaatacgcagagtttgtctggtgaatgcaggaaaggggtgggggctggagaggaaaaggatggagcagccgtcagcttgtcaactccgcatctgctggctgcctcggccgggctccagcctgcgccctcgcccctcggaacagcggtatgtccattctctccgcattcgtctccatcgttcagccaccaccgcaccctttctctattcatttctcctgctcccttgtcctgccccgcccctcgtgcccaggtccatcggtctacacccatgggccgagccctcctcaccagggtcctcctggaaccgctccggccttgggcttgtccgcggctcccacggtccccgcccggcggggcacagagcgggaggggaggggcactagcacaacctaccctgcgctgcgcagctgcaccccttcgcgcatgggcgtggcgtagctcagacccgcccccagcgtttagcgtcttttgtcacccacctagagggtttgatatatcctaagcttttggcccctgggtcctggttccgtgcagcgagtcctcccagcaccccaccctgcacattctggaaagagccagactctggctgggccgagcaagaacagaaccacaagaaggttacacgattatttattgagagcctcctctccccgcccttgcaatctctaggtcactttctccgcttgtagattttgcgcgcaagccccagaaagacggctgggggcaggggtgctgcgtactgttcaatgagagccataatgtggctgtaactgtcttcctcatattgcaagaacactgctggcagatccagctcctcatatagcgccttcacccgggccactttctcagcctccttctgcccgtaattttcctggaagaggttgaaagacaggaaaacgggcttggccttccccagagcctccaggacccctccactcccctcattcacatattccagaacatctccaaagccacccactcctttcctccctccaattttcaagtgtctctacgtagctaaaatcccaagcttcccttccctatcccaaatattgcctcataccaggcatcctctactccagggtttctccaccttggcactattgaaatttgggaccagataatcctgtctgggggagctgttctgtgtactacatgtttggcaacatctttggctcctgccaactagatgtctgtaccacatgcacacacacagagttgtaatgacaatggcaaaaaatgtctgctgacattgccaaatgtcccctcgggaggaaaactgcctctagttgagaaccactgctctatccctttccaccaactcagggacccaccaccctctctcaggcaccttcaggatctggtactgttctggagtggcccgttgcagacactgaaccaccagccagctgcatttgttgtcctggatgtcagtgccaattttgccggtcacactggggtccccaaagaggtcaaggtaatcatcctgggcagggagggggagggcagcaaaagaggaaggatgaggttcctgggcagaggaggagtgaagctggtgcctgttctctgctactgcctcctgccttcttacctgaatctgaaagaactcccccatctccagcaggatcttcttggcattggcgtgctccttctcgccatcaattcctgcctgcagggaaaggggggttaataagccaaaccccaggggtgccggcatcttcctggctgcttcctcccatggggtcttgccctactgcagccccaaatctttcctctctcttcagacatcttggcttccctgacctagacagtcctgactgatggtccaacctcaatcccacttatttttggctaggccttcctgggagtcataaaagagatgaatccattctagaggtgcacagcctgtctcttccctcacaaatgtcagtccccaagtcattctgatccaccttcctaatatttttgccacctccaacttctttcaagatgaaaaggaaatgtagagaagcaaggtcagggtagacacttaatcccactgactgtctttaatccactcttctccctctcaacctggatgatctccacactcctatccatactcagatacaggatatattgttcccctattatgtgctaagcactttcatatcccttgccttgcttaatctttacagtcctgtgaagtaggaattttatccccagctgaggaaagagactgagcgagaccgacttgctcaaggtcacacagtttttcaccaggggtagcagtgttcacgttttctgctctatgccttgctgtccaaaagcccccatcagcagagcagagaggggtgaggaggctcactcaccatgtacatggctgcagctataggaaggtagaaggagtagaaagctgtcttgtacttgacaatagatttgtacctgagta

SEQ ID NO: 1906 - DNA, 4001 bp, Homo sapiens
taggaagacacacacagcaagtggtgacaagtaacagagacagtgcaaaggctacagaggaggaggacaggagagccatagaagcacatacaaaatgaggcgtgggggttggcctagtccgagggtagaggtagggcctcactggggaaggactcaaaggatgaatgatagttcagaggaagcaggaggggcagaaggtagaggaacagcataagcagggccctggagcaggaagggccaggcgggaagactgttggcaagaccctccaaggcaggggaagagggcagaggccagacagccaaggctttgggtctttcatcctatgggcgatgggcctccttagaaagttttaattagaagagtaataagatcggagatctggattaatggcattctggcagcagtgggaaccagcaggagagaactctttccttcccatcctcccagcccatcagccccatcctctaccatctgaacctctgacctgcatcttcctggagactggaaaaccacagctccaactgcttggtgctaggggagaaaagagggaatggaagttcagggaggtggaggactccagtcctctctgggtggaggatgggagatgagattggaagagggggggccttctctggggatgtgaggcactactactgtgtcccacccatgacgctcctgcagtcccaggtcgtgggaagggcactggaaagaaggcaactcacttgaggaggcccaggataaaggcatggaagcggctacggctgctgctcagcggggctagacggctgacctggctatacagggttccaagggagcgggtgctggagcctgagaacgtggggtgcagtcagccaagcccggccctgccctgcgcactgccgggtcccacgccctcctggctcacctggcttcaccgacgcctccaccacgctccaggggctgctcctgcgctgcccggtgatgaggtccttccggaaaggcttcagcccgtccgccaccagggcgtggagggccgggcagagggtggtcagcaccaggtgccccacatccgggctcagccggctatcacccaactgggcctggaggtggcgcgatgccgatggctccagagatccctccagacacctcccagccacctcccgccaaccattcccgcaccccccgcggagctccattactctcctcatcccaacagcctccccccagccaccttcaccttctgcaccaagttccgggcggccccgaaatgcgagatgattttatcaacggagacgctgacggctatcagaagacctgggaggagtgggaaagggaagacgctaggaggccgcgcccctacccaggcttgcccgaggggcgtggagagactgccttcggacagcctgagagcagggccgggggcgaagggcagtttattcggaagcgcggggtcgggagtcagggtgccctacctttcttctgctcctgcagctgaccagtcccactctgggcttctgccatccacagccgctgggctccggggacaccggcgaaggaccacgaactacggactggcgtaagggaagaagggcgcggtaacacttaccaagtgttattccgaggactccgggctcccgcacaagttgtctccggcgggtctgcagtgctgtgtccccgaagggtcttggggagaggaggcgcaggaccgcctgaagcacggggtagctcgacccgagccccggagtgaaatctcgcacacttcccagcactcgctgtcccccagccccatcccggttccctgtgccctccctcagggcacagcccccacctccaggatcccggaactccgggagcgggatggccgcgctcacctcccgcctgccctgctagggcctgtagggcgggagaggacggggcgcggggagggaggtgtagcccagcgcaccgccccggggcccagtcctgcctgcggagccccggggagcacgtgggcggcatggaccaatggaaagacagacaggggaaagggaggagacggagggaggcgagacccgaggattgggaggctggaaggcgccggaaaggggaaacccgggtcccgcagcagcctcttggcggagggtgccctcttcatcccgcgtgggactggactcgcggagagggcgtggccagaacctctagtgccaatgagctcccgggagcttcaccctccacccctccctagcaaggtcggggggcaggcccgagctgcacaggccaaggaattccacagagggtgtgacccaaagcccctaacaacagactcgctgggaccccctagacttggcatggaggctgggtaagcccgcgtccactatgcccaggtgggtctggagggagagggggccggcccacggagcaggaaaggcaacaacttccccctccagcactaggaacggggccagactccccaaggccgacaaacttgcttggagtcggcttaaactgaagggcgggactaagctgggcaaccccggaaaaaaagcgaaaacggggccgggcgagagtgggcggggcggcccgcctgaggcgtggcccgcggggctagcccgggtccgtcttacgtagcctgggcggaggcgatgggctcctggtccagcgaggggccttcggcggacgaggttgcggtggcagcgggggggcgggtacctggcggggtgggggagccgcggcggggaaggtgctacttctgggaaagagcggggacagcagcagtgccagctcggggctggccaggcagggcaaggctccccgagtcggaggcgaataggctcccaccggggacaggcggacgggcagcagctgctcctctggggggctcggcgcccccagcagccgcagcccggcgccgggccacccggccagaggagccaggagcagagacccagctgcgcctgcgcccccaccctccaacagggggcgcccgtcggccgagaaccggaaaaccaggggccgagggagcaggaggggaccggctgcaggcgggattggcggggccaggcgcagagggaaggagggcagcgggatgggcagccaggcaagaaggggcgggaagaagagggagcaaacagttagtcccataacccaatgacccacccagtttccctttcccggagcgctccctggtagaaggggcggggaggatgggtgacacagaatggagggaagacagggggccgggttggaagcctaggaggcgtgagcggccgaagcccagccctcctcccgcttcttgcgacctcttaccctccaggccggcctgcgcgcccggctccttcgcggctggggcctcctcgccagccgctgggctgacagcccggccctcctcggactgcccctccgctatgggctgcagtccaggtcggttcttcttccttcggggagggacaggcgggggtgggggccggggcgggaccaaagcccagccaactggggggtctcgaggcgggactggcggggctggggcccggcttcgggaccggagttccttgaaggtggtgacttcccgaggaggtgccgaggagccgcccggcgaccccgagggggggagctcggtgtcgggcgagaagactatgagccagtcactgcgatctttcttcgcctgcgggacaaggggcagccctgggccccgcttgcgcttctgggccagctcgtggaaggacgtgattgtccggtggggcaccggctcctcgctgacgtcacttctccatcctccatcaattttccctgcatctgttttcgagccagaatcagttattcttgtgttggttttccaaccagagtcgaatttttcaggttcacttttccagctagagttaacattcccgttgtttttccaaccagtgttattgttttcagtggttttccattcagctttagttttctctgtgtcaattttccaaattgggttaatcttccaactgggctccgttttcccagcgtcgattttcccatcatccgcctctaagagctcagaggtagg

SEQ ID NO: 1907 - DNA, 4001 bp, Homo sapiens
cctccctggtgatgaggatgcccaccctcagcccagtatcatccccctggagcagggctccccactggcttcagcaggccctggcacctgctcaccggacagcttctgctgctctcctgattcctgctccggagcttcttcttcacccgatcctggcctggactcgaactgcaacgccctgaccacctgccaggacgtcccttccccaggcttggaggaagaggacgagagggcggagcaggatctccctacctctgagctcttagaggcggatgatgggaaaatcgacgctgggaaaacggagcccagttggaagattaacccaatttggaaaattgacacagagaaaactaaagctgaatggaaaaccactgaaaacaataacactggttggaaaaacaacgggaatgttaactctagctggaaaagtgaacctgaaaaattcgactctggttggaaaaccaacacaagaataactgattctggctcgaaaacagatgcagggaaaattgatggaggatggagaagtgacgtcagcgaggagccggtgccccaccggacaatcacgtccttccacgagctggcccagaagcgcaagcggggcccagggctgccccttgtcccgcaggcgaagaaagatcgcagtgactggctcatagtcttctcgcccgacaccgagctccccccctcggggtcgccgggcggctcctcggcacctcctcgggaagtcaccaccttcaaggaactccggtcccgaagccgggccccagccccgccagtcccgcctcgagaccccccagttggctgggctttggtcccgccccggcccccacccccgcctgtccctccccgaaggaagaagaaccgacctggactgcagcccatagcggaggggcagtccgaggagggccgggctgtcagcccagcggctggcgaggaggccccagccgcgaaggagccgggcgcgcaggccggcctggagggtaagaggtcgcaagaagcgggaggagggctgggcttcggccgctcacgcctcctaggcttccaacccggccccctgtcttccctccattctgtgtcacccatcctccccgccccttctaccagggagcgctccgggaaagggaaactgggtgggtcattgggttatgggactaactgtttgctccctcttcttcccgccccttcttgcctggctgcccatcccgctgccctccttccctctgcgcctggccccgccaatcccgcctgcagccggtcccctcctgctccctcggcccctggttttccggttctcggccgacgggcgccccctgttggagggtgggggcgcaggcgcagctgggtctctgctcctggctcctctggccgggtggcccggcgccgggctgcggctgctgggggcgccgagccccccagaggagcagctgctgcccgtccgcctgtccccggtgggagcctattcgcctccgactcggggagccttgccctgcctggccagccccgagctggcactgctgctgtccccgctctttcccagaagtagcaccttccccgccgcggctcccccaccccgccaggtacccgcccccccgctgccaccgcaacctcgtccgccgaaggcccctcgctggaccaggagcccatcgcctccgcccaggctacgtaagacggacccgggctagccccgcgggccacgcctcaggcgggccgccccgcccactctcgcccggccccgttttcgctttttttccggggttgcccagcttagtcccgcccttcagtttaagccgactccaagcaagtttgtcggccttggggagtctggccccgttcctagtgctggagggggaagttgttgcctttcctgctccgtgggccggccccctctccctccagacccacctgggcatagtggacgcgggcttacccagcctccatgccaagtctagggggtcccagcgagtctgttgttaggggctttgggtcacaccctctgtggaattccttggcctgtgcagctcgggcctgccccccgaccttgctagggaggggtggagggtgaagctcccgggagctcattggcactagaggttctggccacgccctctccgcgagtccagtcccacgcgggatgaagagggcaccctccgccaagaggctgctgcgggacccgggtttcccctttccggcgccttccagcctcccaatcctcgggtctcgcctccctccgtctcctccctttcccctgtctgtctttccattggtccatgccgcccacgtgctccccggggctccgcaggcaggactgggccccggggcggtgcgctgggctacacctccctccccgcgccccgtcctctcccgccctacaggccctagcagggcaggcgggaggtgagcgcggccatcccgctcccggagttccgggatcctggaggtgggggctgtgccctgagggagggcacagggaaccgggatggggctgggggacagcgagtgctgggaagtgtgcgagatttcactccggggctcgggtcgagctaccccgtgcttcaggcggtcctgcgcctcctctccccaagacccttcggggacacagcactgcagacccgccggagacaacttgtgcgggagcccggagtcctcggaataacacttggtaagtgttaccgcgcccttcttcccttacgccagtccgtagttcgtggtccttcgccggtgtccccggagcccagcggctgtggatggcagaagcccagagtgggactggtcagctgcaggagcagaagaaaggtagggcaccctgactcccgaccccgcgcttccgaataaactgcccttcgcccccggccctgctctcaggctgtccgaaggcagtctctccacgcccctcgggcaagcctgggtaggggcgcggcctcctagcgtcttccctttcccactcctcccaggtcttctgatagccgtcagcgtctccgttgataaaatcatctcgcatttcggggccgcccggaacttggtgcagaaggtgaaggtggctggggggaggctgttgggatgaggagagtaatggagctccgcggggggtgcgggaatggttggcgggaggtggctgggaggtgtctggagggatctctggagccatcggcatcgcgccacctccaggcccagttgggtgatagccggctgagcccggatgtggggcacctggtgctgaccaccctctgcccggccctccacgccctggtggcggacgggctgaagcctttccggaaggacctcatcaccgggcagcgcaggagcagcccctggagcgtggtggaggcgtcggtgaagccaggtgagccaggagggcgtgggacccggcagtgcgcagggcagggccgggcttggctgactgcaccccacgttctcaggctccagcacccgctcccttggaaccctgtatagccaggtcagccgtctagccccgctgagcagcagccgtagccgcttccatgcctttatcctgggcctcctcaagtgagttgccttctttccagtgcccttcccacgacctgggactgcaggagcgtcatgggtgggacacagtagtagtgcctcacatccccagagaaggccccccctcttccaatctcatctcccatcctccacccagagaggactggagtcctccacctccctgaacttccattccctcttttctcccctagcaccaagcagttggagctgtggttttccagtctccaggaagatgcaggtcagaggttcagatggtagaggatggggctgatgggctgggaggatgggaaggaaagagttctctcctgctggttcccactgctgccagaatgccattaatccagatctccgatcttattactcttctaattaaaactttctaaggaggcccatcgcccataggatgaaagacccaaagccttggctgtctggcctctgccctcttcccctgccttggagggtcttgccaacagtct

SEQ ID NO: 1908 - DNA, 4001 bp, Homo sapiens
tggggtttcgccatgttggccaggctggtcttgaactcctgacctcaggtgatctgcccgcctcggcctcccaaagtgctgggattacaggcatgagccacgcgccaggcctagactaccttcttaaaggttaaccaatttatggtcagaaagccaattttaatggtagctacaatataacattagaacgataaatctcatgccccaaacatgtacataatgtatctgaaagctaagtgaaaactgagtcactttctcatacatggcagtgttttttcttttttttttattcaatagaagccacatacagggacagtaagtttcacctatcatcaaaaaatagtcaaaagaacctctctacactgtaagctcctagaggccatgggtagcggtgtctctgaaaccctgacaaagtctgtaggcagcagggattcaataaatgtgggctaaatgactaataaagccctcaagagcttgtttaaaaaaaagtatcagaaggccaggcacctgtggctcacgcctgtaatcccagcaccttgggaggccgagacgcgcggatcacgaggtcaggagattgagaccagcctggccaacatggtgaaaccccgtctctactaaaaatacaaaaaattagccagtcatggtggcaggcgcctgtagtgccagctactcgggaggctgaggcaggagaatggtgtgaacccaggaggtggagcttgcagtgagccgagatcgcgccactgcactccagcctgggggacagaacaagactctgtctcaaaaaaaaaaaaaaaaaaaaaaaaaggccgggcgcagtggctcacgcctgtaatcccagcactttcggaggccgaggcgggcggaccacgaggtccggagatcgagaccatcctggctaacacggtgaaaccctgtctctactaaaaaaaaaaatacaaaaaattagccgggcgtggtggtgggcgcctgtagtcccagctactcgggaggctgaggcaggagaatggcgtgaacccgggaggcggaggttgcagtgacccgagatcgcgccactgcactccagcctaggcgacaaagcaagactccgtcttaaaaaataaaaaataaataaaataaaataaataaaattcagccaggcatggtggcacgcgcctgtgatcccagctactcgggaggcggaggctgcagtgagtccagatggatccactgcactccagccagggcaacaagagagactccacctaaaaaaaaaaaagtatcagaaaagcaatcaacttggaaatagaatgcagataaagttgaggttgagcactggataaatgaaaaagttcagtcaacaaacatttacctactacctaccaggtgcctggagtcattaccaaacagaccctgccctcctgcaacttaagacctacaaatacccgtgtagagttagaaccggggagtgctctcgggggggcctagggcatagtgcttaggaaggacacagaacaacgagggggcgtcagcacaggcttctttatagggtgagatctgaggggtgggaggctgggggagggcctgggggtgcgcacgcaggggcccccggctccgggagcgggaccggcggcagaggccccagtgggccgcgccgctctcttagtgtttctggggtcgcctcacactcccgcccgctgcgacaccactccggcctccgggcgtgtcattccatcattcaactaacccggtccccatacgtgggcccaggcggggtgcccaggctccgtggtggggaggagacgcaaagcgaacgcgggtggcccctgagggcgccctgtccctcccgcgcgcgggtagtcacctgagcggctcagcacctcccactcgtggggcctgcagaaaatcgcggccaggaccgagagctcctcctgcacaggctccgccatggctgtgggccccaccgcctcagcgcttccccttccgctgccgcagccgccgcctccaccggccaggagcagcactgcccgcggccacccgggggcgccccgcgcctccgcaaccgggcgggacgggggcggggcgagacggagctggggcgaagcgaaacgggacgtgggcgaggcgagtccgggcgagggtcagggcagacggggcgggcggggcccttagaagttccgcccagaagctcctgctcagtaactacagacgcgaagctcagcctctcggtttgggaattttcttggaggccgaggccctgcgcctctgtctgcacccaaggcgaccgcccagcttacccccggctcttctgagcacagggaggcctcccagcaaagcctgaaccctctaagtttagctgcaggcttcgaaccccgaccgtccccgccgagccttgggctgctgaggtggggatgaactgggcgaaagacacttgggagttaggaagaaacaaacaagcagggaagtgaccaggagacaaggtgagactttgcccggctcaggtctgaactgagtgttggagataaccacagttaacaaaataaacaaaattattcgcccccgtggagctgttagcaaccctggtgcctgggaagcctggaagaggctcgggttagtaacaacctccaggatgccctccgaactggtactggcgccgggactctagacaaggtccagattcccgggcccttccccttacgggtgcaaaaagggagggtcaggacctgccagtcctggcttcaggatgttgactggacggacctggactcatgggaactgtgcgccaaagtcctgggagcaaagtgtcataacgctcctcgtttgtctcttgccttcacaggagacagccctgctgcaagcggccagtgggaatccttggcctttgggggtatgatccaagaatgtaaacgctagcttttcagtgttttcgatttcgtgatattcaatgcatacaatacaatgtgactcttgaagcttaataataaaattatcattcttgagcccagcacctaaattttaaaatgtgagcaataccaatagggtaacagaataagcaatccattctgttttgactatagtgaacaagattacaagacttatctgcagttaggtctgtctctcggatgtttgcctggtctttttgctgttcaaataacagtttaaaatttggcagtccccacaagcagctggtcttgctcatggagttctcacaacttttgtttgtatgagaaatcacatttcatgagataaatctgggaatttaggttgttaggcagtgactccagtcactgacctacggaagtcagaacaaagttggctgattttaaaaccctgcatccattcaccattaccattcccgctgttggtaaaaaaggaatctgataaaggaaaagatactggcttcccggaacagaaaggaaacctaacaagatggactgcagggaaaatgcttttcagaagatgccatgggatttcagtgaccccgagtaattaggagcacataattgggaagatgaaggcttatttaaatgcagttatctctgatatggccaattggcttgaagaaaaaaaaaactcctttatttccaaaataacagacgttccagcagttcagtaggttcataattaactgctaaagagattgaacaaaagaatacgtttttaatttaaaatattactaagttattttaattcgaaatccagtgttactatgaaaagtcaaacaatttggtttttgacttatttattgaaaataatctataaaataggctgggcgcagtggctcatgcctgtaagcccagcactttgggaggccgaggcgggtggatcacctgaggtcaggagttcgggaccagcctgaccaacatggtgaaatgctgtctctactaaaaatacaaaatttagctgggcgtggtggcaagcacctatcatcccagctactcaggaggctgaggcaggagaatcgcttgaacccgggaggcggaggttgcagtgagccgagatcgcacctttgcaccactccagcc

SEQ ID NO: 1909 - DNA, 4001 bp, Homo sapiens
tgacactcaaattgatactctgggctttgcatttggggcagggaggactagcaccactttctgaggtctctgcttttctggctctacctgcagcctgttctcccagccccctcccctctttaatcgctcacctcccttcaccccacccatgtctttgacttgtcattatcttcacttctttcaaatcctgatttaaagggagacacacaggcactcccgtcagcaccagggttttacacccagggcctggcaggtgctggaaattccagcaataccccacacctggcatcccttcaagggaactacagcttttgcagctgaggcctctgcaggcagcaagtttcagtggtcaccactgagatggtaaggtgaggacaggggaagctggcatttttggccttgataccggagaaagacaagggataccctgttttgaggtggggggtgggtacagagagagatgggcactgacctctgattcattagcctagaacccttagggaagttttcctaggtattcttgcagaaagcagaaatggagcaacgaatccttttgttccatactgaactggaggtggaactgggataaaaggtcaagacaatttgtggataatccagaggtttattctcagatcctcttctttcccatctccaaataaagacttaagctttgtcacatccagctctgatctgagcccccgcctcccccattcaccacacccagagttggggatcaaagatcagacttttccctgagggcactgcagcctggcagagagggcagcttctccccaggactcaaggatcctacacttggtggatctcagaaagaggagtgtgttcagcttgcgcccttcacccgggtgtccctctgtccaggttggtgagcagggtagaagggcggctctcccgggggttgcttgcgacccaccgcctgcctacctgctttagggccacctgttgcacccagcctccgccctggggccacagcctcaaccgcagatccctgaaggtgcctgccagagcctgccggggctcccgcctcaggagacagtacagcacagggttgaggcagctattgctgtgtgccaagcaagtagtgacagggaagacatacgtctggatagtatagaaagtactgttccagggcaccaggtcaaacttcaccaggacaccccagagagtgaccacatggttgggaaaccagcagaggaagaaggaagccaccaggatgcggacagagcgggccacgaccctgctgtcctgccgccgccgttgccgccgctgcaggaaggccagcagcagcaggtagctggtggtgatgacgcccaagggcaccatgaaagccagcaccaccctctgcagctggtaggcccccagccagtacctgctggggaaacgcagcaggcaaaggcgcacaccacacacctcaccctccaccccgaagacagctgtgggcaccgtcaccagggcagccgccgcccacactgccagggtggctattcgggcccagaagagtgagaggtgggtgcctggccccgcagccatggccaccacccagtagcgagcaacgctcagcgctgtgatgaggaagatgctggcatagacgttgaggacagtggccgtcagaaccatcttgcagagggcacctccgaagggccagtgaaagtccagtgccgactcggctgcccaaaaggggagagtgagtgccagtcccaggtccgccagagccaggttgaagacgaaggtgtctgaaggtgggccaggggctctccgggcacagttactcagtacccacagcaccgccaaatttcccagcaagccaatggcccccacaagcccataggccagggcaaccatgagcctcagggctaggaatttgacaggcatcggagcatcatcagcactcagcacactgcctccggaggcattggcccagaagaatgtgggtggagaggcagaagtattgagtgtgggcatcgcagggcatcagagattggtggtgctgagaagagaggtctgcaagtgtctgccagactggcagaggccactgaaggctctaggaaggaggctgtagaattaagtgcttctctggggcctctggtgagccctggcccacgcccacacctcagagggaggggtgtggaaaggacaacccaccaccttcctgttggtcaagattggtggtaggtggggcagggcgaggcacagcctgaatgccagggtatatgtgcatgcgcccgcctgtaagaggggctctaaatggcagagagggaggggagaagggagagttaccccgctatggagggcagccccaagcctccaccccagggagagagctggaggttccctgtcccagagatgacaggaaccaaactagagctgcctctgttcctaacagtgcagaggcctccctcctctgcagaaagtgttcccttggggcccaaagcaaggggcctgggaggtggcatagaggcagggaatcagcatgggtgtccaagagaggaaagagcggaggctgcggagtcccagacctgctgctcactagccgtgtgactgggagagttactttactcccctaagcctgttttcttgcttaaaattttcaggtaagtctgcttcacaggagtggcatgatgcaatgagagaacacatgtgaaatagcaatttgtatgaatattatttcaaaggagaagtttggggtgtttgtggcagaagggtactgagaggctattaccatgcccagggaacagtgccaactaaaacaggttggaattcatctcagcagcagtgaccttgaggctaagagcagggagggaaaagagagaggaagtcacagcttcctgtttcctccccactgggaacactgggcctatgagggcctgtgtggacctgggcatgccctcagttctgttcctgctcctgataattaaacattcctgctaacctctatcgccgcctttcccccctttcctgctctagtctgtggacagagctcagcggtccccctactctctcctgcaaaccccatgtcagagctaaggatcctgagatacgccctcaccacacctcatcctgtctccccatgatctcaatcataactggaaaaaaaaaatgcttcattgggccctcccctttcattgcctacatctctacctactgcagaaggagctgaggtggggacaaagagaaggcaggaggtggataggtaaaagagtaaggctttctcaaggattccaatatattcagccccttcttgccctctgccagctaattaagataacgttcgatgttcagttcctttggagtgctgagggaagagaggggccctttgcgacaataaatcagcagtgggcttgtgaacacataggagaaacccagaggtgagagtgatacaggctgggtgccaacatgttggggctttcgaaccagggatgagtataaagggggtggcagaaggggagtgcccagcccaaggtcaggtgagccccacaggctaccttctggcctcatggctgctcctgtgtgactgtgtcatcactgtctctcggggccatgtctactcctctgcccacccagaatcaccctgctaatctggcaattaagataactgcttggccagacgaggtggctcatgcctgtaatcccagcactttgggaggccgaggtgagcgaatcacctgaggtcgggagttcaagaccagcctgaccaacatggggaaagcccgtctctactaaaaatacaaaattagtggcgcgtggtggcgagtgcctgtaatcacagctactcgggaggctgaggcaggagaatcacttgaacccgggaggcagagattttggtgagctgagatcacaccactgcactccagcctgggcgacagagcgagactccatctcaaaaaaaaaaaaaaattttttttctttttttcttttttttttggttgagaagaggtctcactctgtcacccaggctggagtgcagtggcacaatcttggctcag

SEQ ID NO: 1910 - DNA, 4001 bp, Homo sapiens
aggagcccctgcaggagcagacttgctttggggcactttctccccagtctcagccagcagcccctctccaacactcctcctcttcatgagtggatagtggcaggaggggcagtgagacaggttggttgatgttttctctgtccatctctctggctggcttggggtttgttttgggctcagagcaatggcagatgagatcaaaggcagccatcagagcataaacccattagctgcctggtccccaagtcccccaatcccggctgtcttgttccattagaaacagtctactgaaataagcactttagagccgggattcaccaggcaactcctatctgctgctgcacgcaagccagctgctccctgagaacaggaaagaaacatacttgtctgctggatcgtcttcccttttgcagactcagccagggaccaattcattctgcatgcttctggagccatccttgaacattgagtcctgcatttctgaactgtgttcagcccaaatccttccaccaaaggttaggctgcaggcaggcactcccgttccagggagcagaactcttatagtggcacagccttaatctagctaaggccttcatcatgaggagtaataagcctggacctccaacatgggtttggtctaaacctgcgacttcctaatcaggtcacttcacttagcaaagactctatttccccatttctaggtgagtgtgtgtgttgctgggggcggtggggagggaggttgaggcttcaagtcttttgtccctggctcaaccagatctgcttttatcttatgtgtatatcaggcttccaactatgctttcatctgaagaaaagacttgatgacttaattttttaaaatcatcagacgagatgaactttaaggtctattccagctctaacatttgcaatttttatttattttctatgaaaatgcaaacagactcaagaggataataattcagttatcaataaatatctaagcagaaattagcaatgatagaacccaggtcaggctgcagagttcaggaggggagaaaaagacaggagtattgcaaagatctgtgaggcccattccggagtccagccagcagacatcatgctgacaaagatgcagtatcaaacatacacacacaaacacactcagaaaaatgtttcctatatcacattatctacaaagtacataaatatcttcccaatgatatattgatgtctttagaaattgcatcactccacttagatgctccccagggcagggattaaatctcatacacatttttggtatctccagtgcccagtactgggcctggttcaataaatgcttgttgaaatgaacttctctagaacctctcagaaacagtacacctgaattacctaagtgtataatactatcacctgggaataatcctaataataccaagttactgctatagagcatcgcacgtcttgagaagtgatttttaaatccacatcttctttgacatgcctaaaaaaatccctgtagggtaatcagggcaagtatttgtaaccccacgataaagaaaaggaaactgaaacagaaacaagttaaagtggtttgcaaaagattacacaattcctgccttcatcgtaccagttccgatctctttactcctcaagatcaaaaatccaacaactgcaaaaagagaagctcaaacaatgaaatgacagagcacagaggagactggccctgcctgctgctcccacccctagacacttcctcctcccttcaccccccaaattgtacttacgcgagaaccaggtcacagaatgaacatgcttccatcatgaatccctctcagaccagtcctgggtgaggaaggcaggatgcataggaataatctgcccagacgatccagagtccagctcactgtagctaacaccaaggccttttttccagtgtcatctcgttaaccgagcaaagcattgctgcagtgtggttccggagcccaagcccagaacactgctcagggtctcaggctgctgagcttccccagcacttggcaagcttaatatagctccccaaagccaaacttggccttggcctctgcacacagcccagttggccaggaccaaagcttccatctgacctttcaaccccaatccctctgtacagacatatggtccaggaatagcggccctgctactcacacagctctgaagatgaattgactggccatgtttggctcaatcagacttgagtgtggttgctaaaagcagcctcagagggatggtgccttgcccaattcctacccacaggatctgtctaccacctcaccctattttatttcttttcagatattacgatttttatttgaaactatcttgtttattccttaggtttttgcctgtcctgcctgctattgtgtgattgccatgagagtaaagaccttggccaccttattccgtgcttatccctaaaacctaggacagtatcaattagtacctgatgcatagcaggtccacataagtagttattgggatgaatgtcaatgccctttgcaaaactgtactttcatccccaaactacaatgtactttctgtctgtaactaccagattttactcgccttcctggactctgttcacaggaaagaaaggaaacaaacaaacctcatacattatgaagcatagggtatcaatggccttgctgattatagtgggtgggggtggcataaatacatgtacacccccactgctgccccatccccactcctctgagcactggggtcaaggaatatatattaagcagtttataattcactctctttgctcccttcaggtctgctcctgcgtctatgacagcacacagacagcactgaagtgcaatggatctgcataatgtggccacctctcccacaagattacccgggagcactgattatccatcttttaatccttggctgccaacaggaagatcttggggtcactgtgcaagtcagcatatatcacagcattaggcaaatgcagggttgtgaacacagggctgcaagccaggggacaggatttcattgtggctctgtttttgactggctgtgtgaggctgcacaagtcacttgggctccccaagtcttggtacttcatttgtgacataaagggtttggacagaatgagtgatcctcatttgagcaagagtggggcagttaggatcccctgtggggcttttgctacctgcacaagggtcaaaatatgggatgagagagaaatgtgtactctgaaaaaggtcctacaggtgagaaccataagattagaaactggggtgaagattactggccaaattatacccagtaaagtagtttatttggcctgaggaatgctttaaaagtctttgaatttgaacagctttgagggagcagggcagctctccacagtccacacctgccccattgacttacacaacccttccttcactcacctgtgttacctgactgggcccagctcctggaatccctacactagctgatctctaaggccgtctccaaattatctaatctatggagcaatacatttttgaagtccttactggctctatgctataactccacatgaatttgttttcagaaccctagaatatgaggtgtctcagaggagactctaggcatggtcactgaagttctctctggagtagcagaaaatgctgacataaaagaagcccttcctcctctctaaaactgtattcaaaggaggctttgggactttgttagtcagtgatctccagagaaacagaatctataggaggtgtgtgtgtatatatatattttaaattttattataagcaattgtctcacatgattttggaggctgataagtcccaagatccacagggtgagtcagtgagctggagacccaaaaaagctcatgacatactccaaaggccagcaggcttgagacccaggaagagcaaatgcttcagttcaagttcagagacaggaaaaaaaatgacgtcacagttcaaaggtcatcagacaggaaagttctcttactcaga

SEQ ID NO: 1911 - DNA, 4001 bp, Homo sapiens
tgaatgggactgaggtgggaattgaggaggcttttcacatctggagcccaaccatagactagagatcaaatgcccaggtcacagcattggccaccgctctcactctgtcatcagactggcccaaagaacttgaacatcacctcgggaacatttccatggccctcaccccaagtccaagtacaacctacgtttgctattacacacatcatgcagtattataatgtgcctgtgtaacaagcctgccccagtcccaaagggcagagactgtgtctcattcatatttgtattcccagtgcccaacaccatgcctgcctcataaaaactaccctgaatgaatgtgcaaactcccaggtctaacacctcctggtgacagagatcacttctaccttgcagtgtgtcaccatgcctcccagggggttctgcccagccaagttaggcaagctttagtcccaagccttcagatgaattggtccacggaggaagtctggagagcagggacttttcaattttcaaaaccttataagaatttctgctgtcttgcctgccagaatctttctttggctcccagcaacataagctgcatgcctccaactgacaagcgacaggccagttggtcagctgttgcttccatttactcagagctgggcggctgtactgtttctgtcactaaatcaagggatccttgggacggatgtgcttgggcgttaaggcagcctgaggacctagtctccggaagcttctgtgaagtgtgactgggctgccctgcctggcacggtgacttgaatcttcagtttgccaattctctaagagccccaaccccccatccccagatctctacccccagagtggaagtgattgcagcaactcttgcagtagaattgggggcagcagcaggggaggagagaagaggctattagcaaatcaaaggaaagaaaacaggggaaggaaaacacagtagcaaattaaagcactatgttttctttttaaaaatccaattaaagggaaatctgcttttgagtaaaacaatcatgcccttgttacaaagtatcccaggaaccctcaagataggcaaaacctttttaatcacattttttctcattacaagttggctaataggaacatcatagtaattccccgttaactcttccacttttcacacccgcacaaacacactgggttataacaatgctcttattctatctttgtctcagacacattctcaagcatgttggtttactctctccttagaatatccccgtatcctcattctgatatgcaaacgtatcctcacctacagaccattctttcctcctctcctctctcatgcacgcgtgcacacacacgctgaaacgctatatacacactatatatgcatataaacatatatgttctccttttaattcaatactaatccagtcattcgtatttcccaatttcttctcagtctctcatacaggtccacgcagtgaagcccaagggagatacttacctccatagcctgcgggaaacttcatgaagtgagaataatttccatacatgtttactcgtcagttcatgttcctctcctgtgcagcttctaaatattaccgcctctctcggctcccaggcacagcccggctttcttcaacttgggctaacaagagtggtcatcgcttcctagcagcccggggagcacaggctgggccagccctctgggattagtcaggaatctgcctctagatcggagagtccacatagtgcgtttgagacggctgtggcggcagcagctggtgcctgtcagtaatcacgcataatgctgccgccgccgccgccgccgccgtcaccgctactcttgccaccgccgtcgctgctgcttgagatcctgttgctagtttgattaactcagggttgggctgctgcgtgcgactcttccagctcccggcgcgtccccagaggtccctaccgggtggcacgatctattatctaggaagccaatcgatgtatgaccgcccggtgtaggtcaggagagaggcgggagacggcaggggatggaagactctttaggtgcctgttccttgacttacatccacaaaaatcaatgggattttattaaaatgcattttctcattcgaacttctatctgtccaatgtacttggtatttgatctgtgaaaggaggagggggtggggttcaagagagaacagggccctttcagaagcacaagattagaaaagcgtgatactcaatctccagctacggaaaactaaaatagagtagcccttaagttgaggtgggcctctcctgcttgggtggccggaagcatttatctgtgctctaacaatgggagtttgacaagtgcagctggagccagagctcactcaggtggaaaacttacaggtagggaggaggggttggcttgatgtggaggtctttctctgcatttattttatataccattgttatcctgccgcctgttcaaaaacaccactgggtcctcactaacacagagcctgtcttgtgtggaactgacccgagatcaaagaatctaagcaccccgttgatgtttgggtctgtcatacagttttcgtgacaagtcaccgctcagcctatacttgaacacctccaataatggggagctcaccactttctcattccatttctagatagttttcaccacaagaaagtttcttatagagataaaatctgctccttttccctacagcttctgcccacaggtgctagactgctcccaggggccacacaagagaagcctgaaagacaaaaaagtctttcacagtgggatcctctgcaaatcctgagattgatctgctgtgcccataatccccctttccctaggcatctctggctctttcagtaattctatgtatcaccaagggttcatgtctattcccaacctatcctttttctaataatgtacttcagtttacatagataccctcacagtgaggaagggggttggccagacttggatgcaatactccagatatggtccaaaccttttcctcatggtatatgtgttggcacggtgatggggtgctgtcaacatacccattgaaggtccgtttcatgggctgagctctgttgggctggaaaaaagataagagattttctcctgatgcagcataagacatagagagccagagaggtaagtcaaatcagggtcccagagtaaaaaatcaagattcaaatgctaggagaagccaaaacaaaaacgtagaataaaagaccagagtcaggaacaaagtcatgatgacaaaggaggaggccaaaatggggaatcaaagcaaaagcatgtcacaaaggaggaagaaatatccaggccttcactgtaaagagctttggagagcccagagctgccttgactgttgctgggatgagagtccagtggacataagtaatatagaatacaggaggaccatttgctcacttgcattaggtgggcagctctgcatgttaattcatgtagaactaactcgataaaaatctccccacccctacctcccctaagttgtgttctcttatgcatattcttcatcccatccttgggcaattggttttgggacctacatgaaatgcttcctatattcctctgaagttaaaactttttggcttcattcatcatcccaaatcttttaggatcctgcttctgttgtccaaaatatttcttattcatacccttatttcatgacttctgaaaatctgatgaactgctttttcatatcttattcgactcattgataaaaatgttgacatagacatagcaaagacaacatcttatatcactaaaaagtccattcattagtgccttagacactttgctctgctactcactagttatatggccttgaaaggctatatgtatagtaaaagcaccaactcaccaactcacaagccaacattgctgggtacaaatccctgttccgctgcttacagcctcatgatactggcaaatgagtaaatctccctgagcctcagttaccttatagggttaccatgaggat

SEQ ID NO: 1912 - DNA, 4001 bp, Homo sapiens
taacaccacctccatgagctcggcttaacagttaagcccgcaggaagcccttgagtgcatgaagcctaccaaaatgtcccagctagttttaaccccacagagtttgatacgaattgattgaaaaattatacagcaaccgtatttgtccacctgaataaaatagtccttagttttgagaaaaatctaatgtggtgttaattacttaaaaaaaaaaaaacccttatagtctattttctatgaaaaagacaactgtattactagcaggtttatacaccgtgaccaaggtattagtgaagaggctcttccaagcccggtcttgggccaacagtacttcaaaaagcatatgcaatggtgcataacctgcagctattagactggattactattaggttgtcatctgatgtggaccctgggtttttatccttcccaaagctttctcccagtccgtttaatgcacaaaagagaaagagacagtcgtttacaacgttcctttgcaaattcgctgttttcatatgtttagtacccaaatacatcaagactattttcacacctaaaagttaatattccaaaattccaccgtatctacgattttctgtgattataggtaactgtaaccgggaagtggttttgtttgtttgtttgttttgttttgttttgtttttgtactgctgaggaaagaagtaccagcagaagctgcagttctaggttggggaagtctggggaatcctgcaagggaacatccttcgggaaggaggacagaagtggagaaggaacgactgaaaggatgctaactaggttattattagcaggaagttagggcattttcttttctggagaggctctccagtcccagcttggaggtgtgcaatgcctcagcctgggaagtatctgcagtgttcgaacaaatgagagaaaggaaggagcagtgccaagaggtacttaaggagaaagaattgtattagtgtggagccaacctttcccgggcagccaccctgcccttacacttacacacacacactttgcttcacttggcatgcaataagccagcatttagagaacgacacgttcacgatgttctccccaccaccacccgcgcgcgcgcacacacgcaaacacacgctcgcttcccatgccttccacgctttgcaagcggtcacagcaccaccacggatggcaccagccccgggaaccgcggggaccacggaggcgactcctcctccgctttcgcagcaccttgacttgggggaaacctccgcgcagcgtcctgcaccatcacccccgcccccggtcagctgcgccgcacgctacacggagtaagcgaaccaacgtcttcgctccgtgacaacgcgcgggtccagcccgaaagcccaagaaacctcccggcggcggtattcccagaaacagcccgagttcccgccgctccccgcgcccccacgggccaccctgctctgcaccctgcccccggccgcccgggaggtcccagccgtgccaccaggcaggccggaccggccgtcccctcctctcccggttcccgcagctccgacgctcctgtccccggtgccccgggtccgagcccgggcgcctgccgccggctagccgcgctccatcctctagctttccacacgcgcgcacagacacgcgcccttgccttccctcgccccaacacgcacacctgcacacacttggtgatgcccgctcctcccgcatcctcagggggcaccccctcgccccgcccgcgagtccccgctgcccgctgtcactctgcccggaccccgctagtggatgccctgacgcccccttcccctgacagcacacgcgacgcacggcgcttacagttcgcaggaactggatctcgtcttcgccctcgcccccatcggccatggttccgcgcctcctcgccggggccggctcccgagccccgcggagctcggcggcggcggcggcccctggcgctgccttctgcttctgctgccgggagccgggggctggagggggccgcgctgccgggtgccgagcgccgggcggtccccgcctgcagagcggaggaggaggcgcggacgctcgggcgcgggtggtcgaggcgcggggcctccctgctccgcactgtgcgggaggagggcggcccgggcccggaggacgcggggaagcagccccgcagcccagccgcgctcgctgcctgcagccggcggtccgctcggccccggctcctccgagcaagtgcgcggagccagctgagccggggttagtgcagcggtgggggtggggtgtgggggcgggcggggaggagctcggcggctccccgctgctgcaggtaatccgcagcccgctcctccgggccgccaaacccgaggcccagcgccacttactggctgcgctgggaatcggggccggagcgcacccggcgagcgcacagcctcctacctgcgccccgctggggtccctgggctcattcccctgccccttccgagcttaaaaccgccggcacgacgccccttcctcctggactgggctagggcactaacttccacggcacttcggatcgcacggaagaatgatatctttcacctgggcgcacggggtggctaatctccaagtagagattacgcaacacctggtattttaaacgtggattacctctattcatgatcaaatgggaattcttcaagatctagttttagtgtaccatgcttttcgcagataatcgatgcaaagtgcacggttttggtgcacagaactttaacattcaacaaatatacagtgagcgcctatgccagacaatgtggtacaagacagacccagaagtgtgtagtctgtattcgaagtgcaagccttaattcaacaaggaattgcggtaaagtatgggatactatctataagtctgaaccactggatgggtctaaagtcagactgtgctacccattatccttgctgagagaagaaattcgagcattccaccgcagatagtaatatcttgctctcgcaatcctccatgcaatagtctaccaaatgcctacttaacaaacggctatgactaagaaaatacagggtctgagacaatttggacaagaaagcaatttgtctcttgttcctagtccacagcgctttcatttatcgtacttaaaataagtatgtgcaaagtaaagttttcaaatgtcagtactacggagatgcagacattgtaaaacaaggatttttgcgtccgtttacctacatcttacattctgcggcatctaactcattattaaaatcgaccactgagttctatacagtttatattttatttttagcattcattaactttgtacttactggggtaggtttgtaaatttccaggagaatgacaatatgtgtataaatactcgctgtccgtggtagaactagtaatgttctgccctatctcatggaagtataccagtcaccttacctaaaaacttgacctatccctgtagccatgacgactaaccaactcttaaaccgttattatttatgtgaatgtttactcttacgagtctctaaaggaacaaccagtgagctcccaaaaagtcgggtaagagtcctccatgagcaatgactatattctgaaattggctcctgatttaatgttaaatgatttgatcttccaaatttagaacgtatcaaattgacgttttaaactattttattcagaactatgcagagacaggtttcttaattactccattctacccagatggtaggtaaaataatataaaaacgcttaccacgtcttcattttggcattttaactaggctgtaaactgttctagcaagagttatggttattatttctttagttctctcaatgtaagtggaataatgctaaaaggcctagacactcgatgtttcttattcaccccatacagtcttcaacagcaagtagacatagagcagagactatttataaaacacaccgtgtatgtggactttaaaacacaaaaatacaaaactatgaggtttatagatctctagtctgttctaaaagt

SEQ ID NO: 1913 - DNA, 4001 bp, Homo sapiens
attagagccctactgcaattgatctttccctgagattttacaatgtgagggaaaccccaagagacctaagtgcaggcctgttctctgtgtccctcagtctgtaccccagccagagggaatcagggttggggcatggagagagagcagttggagctgggctggctccagaggcctgtggtagatgtctgcagtggctgcccaggcagggattgaggagggtggggcaggcaggggtggtcacaggactgggccatgcttcctctggctctatttttaccctggaccttgcctgtctagcatagccaagctctgctgttgagggtggtgggctggggtgtccactacagccttccttctgctgcccacccctagcaaggagtcagtctggtaccctcggtcagcctggtagaggggatggcagccccagtgggtggcgtacgccttctgggggagggaggtctcactgactctgagtttcctgtcagcagctgggggccccttttggtccttcaactctgttctctcctgaacatgtcattttggcttctttgggatatgctcccattgcctctgcaaaattatcccttccatctggtgggtggcagaaggggagagaggaatgtctgagccttttccttggagccagagttcccagggagtgggagaggagacctgcaggcgttgtccctgcaactgctcactcctggttgattcggggatagtgggagcaaggggaatggggctgctgtgtgttgggggagagaaagggctgaaagcatgcggtcctttgagttcaaggggctgggagagagtaggagaagaaaggagaaaggagtggtctgttgagagagaagactgccaagccggggggcctctttcccttggccctgggacagtctggccttccacaaccccagagggggcagctcaggtgtctcggatcagatgtccccatccttccccaggcctagggggctggacaatggcccctgatcgaatgacatcccagttcttcaatggggcccttgtgagtgtcatctgaactccggacctgagaagcagttgtcacagagacatgggggagatggaacccaagctgtggctgatgaggggataaggggtgcttgagggaggggtgctggtagcttgattacctgctccatgccagaggggcagctggaggtcacctggagccctaaagcagcctgggattttacgtggtggcagttctgagaggacttgggggcaggggagatggggaaacaaagaggtaagaatggggggaaagaggagtcaagaggtctgggccaaaaatgggaggaggagaaaggggaggtcctgtggaggtcgagttgggaaggggcacagcaccctacatctctgcttccccatatcatgggagctttgccctgccacccccagactcccccgggacctgagctcttggcaaggcagggtgggggtggcagagactaaggctggcaggagaggtgggggcagaaacagctgttgtatctgctctcttcttaccccacaggaggcgaggcaggggagggctgggacccttcccaacacctgggagacagagggggccttggcagggacttgagggctccctgtgggagggccaggcggtcaggaagctcatggtgggttccccactggcttcctcctttgctgagctgccagctctctctccgaccttcagttcatttgtctctcatcaccaccttccaaaccctgtctcccccaaatcccaaactgccctcaccctgactgactcctcccagatcctcagtgctccacagtgctatggtccccagcctcttggagcccttctgaagacccctctccctgaagctggcaggccagggactagcccagtggggcagggtactcacggttggcctgggcctgaggtgggagcaggttctggacagatggccaaggttgcaaatgtggctgctggagctgtgtgtggagacctgtcttcaacagtccctcccccgctgacccccccaccgactccaccccttcacagacgaacaccctgtggggcaaggggccaggagcagacagaggcgccctctgtctcctgggctggaacaggcggcccttgtctctttcccagccttgcttgccccgttcctttctctccaggcagcagtggatggtgcaggggaaagaggtgggaaggaggtcctgggagggacactggatgtcttaccccaagctgggccttgcagtacctgtggctggctgtgctggttgagcccggtaaggggggaattctgctgagggggtcttagtctgtggctcctccatggggcctcactgagaggaccctcagtgagaaacttagtcttgggagtctgagaacccacagagggatttcaatccaggactcttctctgggggtctcaacctggatccccctctgtgtgtggggcctcagcctggggttctctgagggatcttggtctgtagcatcctttgtgggatctcattccaaggggcctctgtgtgtgtctcagattgggcctctcagtgttgagctcccttgattggttgcctccctcttcccccctcagcatacacactcctgattagacatgggtatggtggcagcagcccccagtattgagaggactaggaccctgggacccctgccgaacgagatctgtccaggcagctcctctccctgaccaagtgggggcgctcgtgtggctggcagggagcccgggtccagacctgagggctcagggcaagcggcctgattgggctgtctctggtcttcagaatcgaccacggaaatttgacacctccgggcttggaagcagctctctcctccttccccgctgcttataaacctcagccctgaggctccagctcactctaccccatctccttgccgggtgagtctcatggctgaccctggagggaggctggagatcattttttcttcctgggctcccaggtccctcccccagagccagctcagacaggaattcaggaaggagctttggatgatcgagcaacagcgcgtgcaggagtgtgtgacggggtggacagaaaagagaatgcctcttccagccccacccgccgcaccccagggggttgtgagtgcctgtactaaacccgtcctggagcagggagtcagagacgccccgttccaggacccttgtcaccgggagacaggagcggggaggatctgtggggtcctgggttcagcactctgccctgctgccgctgaggagaggtaagggtggagcggggcagagaaaatgggtctgttcagacggagccagctctgaccacaggggacatttgccagaccctgtgcttctctgctgggaggagcggttagagtgtgtgtgggcggatgcgagtggccggagaccagggcccaacataaacaagctttggagacaaacaaccttatgacctgtgagtctgggtgagacaagaagggattcttgagacagacacgccacagaggggccaccagacttgaaggactccaagaaggaccttcaactgaagacctcctctcaagtagaggggtctccagatcgagggatcaccacagaggggtccctaagccacagacatttaaaaaggatcccggattgtgagacctacagaagagggggtttctggagctgaatctcctgcccccaccaaaactgagatgccgttgcctggtctgctgccccaagctcaacccctgtcctctccctctttccccatatgccccctccaggctgagactgatgtgataacaccaaggcagggaccttctgaaccattcctgcatcttggggctccctgactctccctctctgctccttctctcttccacaggtcagccctgacaaaggtcagctagccccttgaggacatcagctttggcctcagggtcctaatggcagcagaaccactgacagagctagaggagtccattgagaccgtggtcaccaccttcttcacctttgcaaggc

SEQ ID NO: 1914 - DNA, 4001 bp, Homo sapiens
ctgggtgtttccatgagcctggcctcacctaaaacgcacaacataaaactccattcctggagactgaaactcaagcttctggggaaaaatatccgcaacaactgcaaacctcttagcgggaaaagctacctcccaagtaaggctgaggcaggctgccaggcgcatactggccgataacgaaaagcggtctcgccaaggccctgcagatctaattactgccctcaccggcagttcagtcgagaaacctctcctgcagactggcagccagaccaggtgtgactcacttcctcttggaaaatgccctctgagatggcacagttctccttttccttcagggagtgttctgtccaaaccatccaccgagagtatctgcaaccggccacacccacatggtctcacagctgagtcacaggcctcagaccactgggagaatcctggagccctttgtgctaaccacgccctgcagaagctcccgcagagacggaactgggtgggggcagaaaacggggtgggcttaatgcatcccagaatctggcttagggctcccctgtgctggcctggcttggagcgctctgcattccaccccagccaacaaggcagagctcctggtttcacttaggcagagctggactgaggctggacaggcagcagtgtccacggctaggggcagcgccattccttcggccaaagcacaggtggtgaaccaagtaccaaaggcacgtctgtctgtttcactgcaccgggccaaattaatctatgattggaagatccttcatcaagcctgctcttcctccatctctttctggttccacttattaagacagcaagggaaccctttcagtagagaaaccacgtcacacagggccctctcccacaaaccccagccaaactgctgtagaaagaaaacaagtggacctccctccctcagcaggaagaccctttccgtcgagcagacaacaggaagccccgaccagaaacgcctgtttggccgacggactaagggttacggaagggacgccccagctgcctactcgtcctacccgcgcctacttgggcggtacagccgggagcaggctacgaacatgcagacccggcctgcgagcggaacccaccaagaaacacgccagccagggcaggggcgtgtaggagggattcggtaacccgagagacgagtgggaaagtaggaaaggtgggagtaaagcaacgcaaacataaagggaggagggaagaggttcaggcgcaccaataccacggtcccctcctaaagaacaagtgccccctcctctggtccgcgtgggtctgggggcggccgcgcccgggccggggaggggcgctgctggcctcgtttgggtgtggcccggagcactgagcagcggattccccaccagccgctccccgcccagccccgcggtgctccggacgccccgcgaagccgggtgcagggttttccccgggcagcaggtccgggcctggggactacccaggaggggcgcgtgggccgggcggagctcaccttggccgaggcgcggcggacgctgggcgagctgggcgagctggacgcggggcggagaggcgagcgcggcgggctgtgcgccttccttagtacgtgcggcgggtgggtagagggaggcggcgcgggagcgggaggagcctggcgggcgctcggcagggcgctcccccagccctgtctcctccccctcttcctgcccccgactcccccgaccccgggcgcgcggcccacgccctgccctcgctcccggacccgcctcgcagaggcctcgcccgccccagacagagcgttcttgtaaacttctcttcagtagaaacggtcctgctctcgaatatttcagggcatccccaccctgagcctgcccttcctctcgggtttggttttagaaagtgtacaaatcaaagaacccggccgtcctgcgggtggggcacgctggcgcagaaccagaggtaaccggctctgcggccacctacgggtctaggaattacttgctggatgaccctgcagggagtggcacgtggagtcctatcgacctcagaggcactatcagattagccctaggaggtccgtctgggggtctcggcggcctgcgccagtggaggggcggcacctccccagaagccgggcttcccgccccaccggcccgcgaggtgccgcagggagggtgcggtttggcttgtcagcacccaggggcgtcacaaaccctttgttgaacaggggatttacccctttgtgtggcgtcacttgatcaatagttcagtttcagtgtggctaatagtgttaaaaactggccgggcgcggtggctcacgcctgtaatcccaacactttgggaggccgaggcgggcggatcacctcaggtcaggagttcaacaccagcttagccaacatggtgaaaccttgtctctactgatacaaaaattagccgggagtggtgatgcgcgcctgtaatcccaggagactgaggcatgagaatcgcttgaacctgggagacagaggttgcagtgagccgagatcgcaccactgcactccagcctgggtgacagagtgagactctgtctcaaaaaaaaaaaaaaaaaagaaaaaagaaaaaaagaaaagaaaaaggttaaaaactaagtttccaaggcagtatgctgtggtccttgaaaagtcctttagaagaattttctggaataaatttagagaaaacctaagtgtttcctaggggatgcttaccaactcctcgcccctcccccgcccgccctcttttattttaattgtgactcagggttaaatacaaactactagcagctgttggtggaaaagagcccaatcccaaactctggggttttcctttgttcccaagggaggccttgggaggaatgaatgatcctaaaggaatgagcagacctggggaatcctccaagtgccacctctgactaatattggctgttgccaggaaaacccaacttggatttcagctattactttccgtgcaaccctggtgctgactattcaaggggacagctcttcaagatcttcctgtatacagtacttcccagtccccaggtcacagtcaccagtggaggaaatctcggatcccttttgttgcagggattgcaatgcgactgggtttagaatgggaatgcctgggtttgcgtacccctactcatctgatttcttcatctggtccacagaccttaggagtgctttagtgtatgtggtaggcctgggaattcagggattagagaatcagtctctttctctgaagagttccaagtattgggcgttagataagcaaacaattaaaatccagtgtgcttagtgaatggtagaggatactattggatactaggagaacactgaggaggggcttccaagtcctcttggagtggtcacagaataatttctgcaggaagcaacattgggtagaaatttaaaaacaacaataacacttattgtaactttttaatctgtacaaagattccattcttagaaggcttggaaaatatatcaatgtataaaaaatgatttataaatacatgagccaaagataaacattttcatatttctagtctttttatgcatatgtaacaaatatttgcataattgtgatcatactgattataaaattaagtacagtcattcactgcataacagtgtttgagccaacgatggatcatgtattcagcagtggttccataagattataatagagctaaaaaaattccagttgcctagtgaccttgtagctgtctagcgcaatactttactcatgtgtttgtggtgatgctggtgtaaacaaactactgtgctgccagttgtataaaaatatagcacataccaattatgtgtagtatgcaatacttgataatggtaataaatgactgttactgcattatgtatttactacactatacttttcatcattattttagagtgtattccttctacttattaaaaaaacagtaaaacttaaaaaaaagtttaaaaaacagcctcaggcaggtc

SEQ ID NO: 1915 - DNA, 4001 bp, Homo sapiens
cttacagcgttagaacccctgaaccctaagagaggtggactttttcccaagaatcacattgttggaggatgattgtttttgttttgctctaaattgaacttttcattaagaaaagtgttggtaggttcaggggcctttaggggagaaacaaaataccacagcctagaaacagatgtgtttgttctgttacaacatgcccttcatatcaggcctaaaatctccctgtcttactaaggtatcagatgacaggaaggagactggctgggaggccacaccaggctgaggagcatgggctttgtcacctttctctggaactacagattctccccctgccccttttccttccagaatgcagacagttttgcttttccagtttcacagtgcctttctgcttcacatttttctctccttaacatcagtcttggtgtaatttagagattattttcttttgaaaactgttgctgttgctatcagccacaaggagaaaattaaaacctctttgcatttcctcccagaggtaattctccaaagtgaaagaaagagacacaattatcaaattactaaaatggaacggcataatttgtagagctccagggcactttggagatgggtcctgaggacgcccagaaaccggaaagctctgcccagggtggcgcagtggctgaaggagaggagaaccggcgctctccacacctcatggcactcttggagtcttacttggtggggatggcgatagcaaggagcaaacattatgataaacggatactgtgaaataatttttaaaaatgcatgctaagcgctcaacatttgaggaaagaaaaaaatacgatgaaaaagacgtagcaattttaaaaacctcaactattgtcttctcattcttaaccaacaccctccggagctttctgtccctgctgtagcaggactgcaaccccagacagtatggaagggaatgggcgtggctctgttccaatacttcatttatggacgctgaagtttgatttccacataattttcacatgtcagaaagtatttttcttcttttgatttctttcaatcatttacaaatgtaaactttattcttagcttgtgggcagaacagaaaacccgacttggcccgcgggccagtttgctgactctccactaaggagaggtaaagaaagagattttggaggtggaattatggaaaatatgagttcaactgggagatgaaaggagataagaagagaaaaataagttacggagtgagtgcctaaatagatggtggggtaaaaggaagaggaaggaggagagggctcagctgggaccgggttcctcccacattcttggccgcggcgctgcgggcggcgacgggctaaagtttcagtcccgttgggtcttggccgtctgccgggtgcttactgaaactttgattttccctggggctagacgaccaagttctaaaatgtcccttttctggtgtacagaaataactagtgacccctcgcagctttccagccccctgccttaaacttgctcctaggcgtctctgggctcccgggagaccgcgggcgaggggctggaggcagtgacccacgacgggtcccccccccgcgcggtgagcggccagcacttcctcttccccagccctgggccttgtcgtgactgggaaggctaaagaacctccgctgctaccctaggcggccaccccaaggatgattttagggcttcatccttccatcccttcttccccagttccctcccacgaggctgatttttcctgctgtttcctgccacgtccacacataagtcaaagataaagtctgctgggaagtatgtgggttttttttcttttctttttcttttcatgtaagaagaagaagaagaaaagtgaggcttaccatgttggagctgagcgaggcgcgggaggctgtggctgggagcggcgctgagagctctgtgcgcgcggcgtgcgggtctggagcctctcctcaacccacgcccttcccggcccagccttgcccaagccttactcagacagcttccgcgcctgccccgcccctccccgcctcccgggctgggcctgggaccgcggccggcgctaaccacagaactgagctttaagactcaaataaacccaccgtcctctccagcgatttaagcagtctcactctccctcctttccctcttttccctcctctttccccccggccccctccaccccgtcctgtgattcctgaagatttttgactttttagaattataagttttgcacagtagtcttcgggaagtctgtccatgtccgtgggtctttcccatgtatgagctcattctgggcatttaggttagataggcaaaaaaggtctcttttggaaacagcagtgggccgggcgcggtggctcaggcctgtaatcccagcactttgggaggccgaggcgggtagatcacatgaggtcaggagtttgagatcagcctgactaacatggtgaaacccctgtctctactaaaaatacaaaattagcctggcgtggtggcacacgcctgtaataccaactacttgggaggctgaggcagaaatatcgattgaacccgggaggtggagtttgcagcgagctgagatcgcgccgttgcactccagccgcctgggcaacaagagcggaacaatgtctcaaaaaacaaacaaaaacaggccgggcgcagcggctcactcctgtaatcccagcactttgggaggccgaggcgggtggatcacgaggtcaggagatcgggaccatcctggctaacgcggcaaaaccccgtctctactaaaaatacaaaaaattagccggacgtggtggcgggcgcctgtagttccagctactcgggaggctgaggcaggagaatggcgtgaaccccggaggcagagcttgcagtgagccgagatcgcgccactgcactctagcctgggcgacagagcaagactccatctcaaaaacaaacaaacaaaaaacaaaaccaagagtgttagttaggacagagtgcgggtcagaattgtagacaagttcctaggagttggggctctctattgctccacagggaagatatttaacagtaaacagtggtgagtattgccaaatcaattgccacgggattactggggattattgtcaagggacaattgccacccctctctctcaaacttttctgtaaactgaggacagccacaaagacaaaatccgaaaaccaaactactgcacttaaaaattgatccgtgctagtaaggcatttatctgtgtgcagtttgcaatgaaattaggagttgtattaagaatcagaagacttgggttccagtcttgtgtctgttacttcattgcaatacttttgaccagacttgtcactcctttgagcttccacttccttatttgtaataggtcttgagataggcctttcctgtttcataagattgttaggactgtcaagtaaagtgagggcttagaaaggtctccaaaaactgcagagtagacgcaaatgaaagataatgggctataggcattgtgtgaactgcttccctgcacctgctctcacaggtgccctgagcacgtgagacaaatctccatctcagttctcagctactccagacccacattttcagttacttgtttatgaatccacttgagagtcccacctgcacttcagactcaataattcaggaataactagttttccccaaacctgtttctgtcttctctgctaagggtactatcactctaccattttccctgcttgaaagcattggagccactgagtctaaatgcctttttgactcacagttcttatcaagtgccaggtaatagacttcaaacctttggtggtggggggtgttacatgaacggctgctggggttccttaataccttaaagttacatgtaaattttttgcataagagaaatttttctggcgaagagtccacatctttcatctgattctcagaaaaatttatgatcccaacatattaaggaatcatttgtctaaattactccataact

SEQ ID NO: 1916 - DNA, 4001 bp, Homo sapiens
aggagttctaagggatctaaatcagactgccagaagagcaggggtaaggtgtgatcaagtttgggaaccgcaggcatggaaagaaaaaagttcacagacactattcagaacttttcgtgagtgtgtttattaactcttactccccacgggcaaggctgggttttggtgagggaaagaaaagaccctcattgaggacattgctgggtaaaaagccttcagagagctacctactctttgtgggtgtggtaatgggcagccttcagcgcaatggctaccagggatatgaattcttgaaagtcgacctgttcatcttgattagcatccaggccttggaatatttcatcaatgacagctttatctttgatattctaggaaaaaaggacaacagagaccttgagttcagaacctccacacaagaccctttcttaggcctcttatccctcagagctcgggttgtgaaggcccaggcacattaactcattagccaacactgtgttggagaatccagtgtaacaaaacagagaacacaatggtcatgaaccaccctggaattaacaaggcttgacctggaaggtactcttctgctcactcattcaacccctcccgtgccctgcctctctccattttacatatgaggaaacagactcagagagaggaactgagtagagccttaagtgagttattgagagagggaagcaaaggacctctcccacagcagcggggagagcatcctttgggagctcaaactggggccaaccccaccccagtccttgtcccaccatcctctgccaggccttgccactcccctcagtgcagggtcatgggcaagtttgcagtgagaggggcatcacctaccttgatggtgtttgcaagctcctttgtaagcagctgcttcagctcacccttagagagggtgtcaaaatgccccttccgaactgagtattggtggaagatattgacaattccctccagatgctcttcaagttttgtcatcttcccagcctaatgttaaccttcaaggaaacaagggaagtctagaggcagtttctcccccacccctcaacctccactctcccctctctttctgaatcaagggcctaaagaaaacataacatcctccatatctattttgtggtctctgctctgtttgatccatggtgaacttctcatgtgtggataggatggggaggagaaaacatataatactgtctaacgtctaaaaaaatcagcctcagttgcccatgttccataccacctcatccaccggggtgcataacttggagggtattgcttactcaaggtcccttgggaagggttctgtgattggccaggctgtttgctttcctcaggtgatggcactatggccacatatcccccacaaatggtccataacccacccctgcttagccattctttttttgttgttgttgttttgggttttttgtttgtttgtttgtttgtttttgagacggagtctcactctgccgcccaggctggagtgcagtagggcgatctcggctcactgcaagttctgcctcccgggttcacgccattctcctgccccagcctcccgagtagctgggactacaggcacccgccaccacgcccggctaattttttgtatttttttagtagagacggggtttcaccatgttagccaggatggtctcgatctcctcacctcatgatccgcccgcctcggcctcccaaagtgctgggattacaggcgtgagccaccgtacccggcctgcttagccattcttaaatcatgggactgagtctacatagcacaacaagagctgatctacttgggtccaaaatgcaatatcaccccagaggtgctcaggcaagtggagggttgtggtttccaacaccttgtgatttcaaagtggtcacctgcagtcactaccctgtggaccacctaagaacccatccaaggaaaatgcacttacccctcaatgcacaggaatgtggagctacagcaaaaagccagcagtggtgaagggcactgagccaaggaaggttttataatcagttcaggcttcatcttagcccttgggtgaagaaatctctgattcatcttgaggcaatttatgtaaagtactctgttgctcaatagaagcttcaaacctgtggcttaggctgccacaggagcagcccagattgtacccagactgaattttgccctcctgctcagcctgaaacaaaatcacccccactccacccacccgcacaggggtgccctgaaccttttttagccctgagccagggcccaggtttcaggtttagctctactccactgctccctaataaaagactaggagaacaaactttacagcctgagtgtcttgttttaacagatgaggttaccagctcttcagttttggcaaatggaatatcaacttaaagatctttatgcagctaaggagataggtagggagacctcctcctaagtcgttctgggatgcaaagttcatcactggagcagaggatcagttttcaaaatagattccaaggttttcaaaaaaggagagagcaatgctactatgcctcccctttgctttcccaactttctaacttggctgttacaaagacctagaaagctggagtagggtaatcattgtgtgtgaagaaagttcaccatgcctaggttactttaccatgttcatgagttcagtaagacagaacattcacacgagttttagtaaagcaactttattactcacagagaggcagcaagggacaacagatgcccaggattcatggagaggtggtccttcaagattcagaaacctgcccaaaatggattaagtctcatctgtacattccccatgtcgcaccaaagctaagggacatccaaaagcactctgcccttggtttatgcctagaggtcaataagattgctgagcaatcaaggccatgccagaacctgtgctgccatctaccccacaacacagatatcccccttagcaaagctagttcatttcatgtgcccaccgacctctctggatctggaggcaaaagtctgtctctccgatccatgtgtcaccttgactgacacaatctcagtgcaacattgttaagccattgacagtatttgtttcactaggcccaggaggacaccaccagagcaggatgatcaggcttgtgtaaatcaatgacaatgaccaaggtgaatctcaatcattttaggaggtttatttggccaaagttaaggatgcgtgcccagaggtaggtctacgtctttctccaaagatgattttgagggcttcaatatttgaaggagaaacagtggatattgggggaagaggaagaaatattttttaaatgtgtcagtagataagagacaagtgattgcatccttttgagtctttgatcaatctttcactgaatacacaattttcatgtgggagcggagtagaggaaatagtcacttatgccttcatctggctcagtgaatctgcatttttacataagataacaaaaataggggagaggaagcaatcagatatggatttgtcttgggtgagcagagggatgactttatgttctgccctttgtcccacacctgtgaagataagctgtcaattacactgccagggtgaaattcaatagaactgttttagggtaaagatcttgaggctcacaaggaatttccttgtgggcaagttgtgagattggtgtatggctttttatctttgtagctatcttatttagaaaccaacctgggtgggggcaggcttgcatgacccatttcccagcttgacttttccctctggcttagtaagtttgggatcctgagatgttttttttttttcacatctgcctggagaagggactagcccaggatcccagccatccaggcaagaggttgctaaatgcggatcacgaggtcaggagatcgagaccatcctggctaagatggtgaaaccccatctctactaaaaatacaaaaaattagccaggcatggtggcaggcacctgtagtcccagatactcag

SEQ ID NO: 1917 - DNA, 4001 bp, Homo sapiens
ctgtgttttctcttggcctccttccagctctgacagtctgtgaatctcctggaagccagctctgggtccagtcctgtcttggggaaattagaccagaaaggcacagagcatacacaagaacccaacagcatcttctgacacaagaccatactcccactggcacatagtatctttgcttacctaattatatgcatggacacacaaacacacacatgtacacaccaggcaagaaaactcacaaccgggtcaggcgcagtggcttgcgcctgtaaccacagcactttgggaggccgaggcgggtggatcacctgaggtcaggagttcgagaccagcctggccaacctggtgaaaccctgtctctactaaaaatacagaaataggctcggcgtggtggcacacacctgtaatcccagctactcaggaggctgaggcaggagaatcacttgaaccccggagatggaggttgcagtgagccaagatcacaccactgcactccggcctgggcaacagagtgagactttgtctcgaaaaaacaaaagaaaacctgcaaccattgacacatgcagccacccacaccctttcttgtggtcacctcaccgtactcggcaccatcacgtcctaaacacagtgtcccataatcatcatctcacaaaatctcagtcccagacttctgcctaccttgagcagatggggcaactgctgggtaaccagctctttgaactcgttgacgctgaggctatccttccggccctcctgccttgcaaaggtgaagaaggtggtgaccacggtctcaatggactcctctagctctgtcagtggttctgctgccattaggaccctgaggccaaagctgatgtcctcaaggggctagctgacctttgtcagggctgacctgtggaagagagaaggagcagagagggagagtcagggagccccaagatgcaggaatggttcagaaggtccctgccttggtgttatcacatcagtctcagcctggagggggcatatggggaaagagggagaggacaggggttgagcttggggcagcagaccaggcaacggcatctcagttttggtgggggcaggagattcagctccagaaaccccctcttctgtaggtctcacaatccgggatcctttttaaatgtctgtggcttagggacccctctgtggtgatccctcgatctggagacccctctacttgagaggaggtcttcagttgaaggtccttcttggagtccttcaagtctggtggcccctctgtggcgtgtctgtctcaagaatcccttcttgtctcacccagactcacaggtcataaggttgtttgtctccaaagcttgtttatgttgggccctggtctccggccactcgcatccgcccacacacactctaaccgctcctcccagcagagaagcacagggtctggcaaatgtcccctgtggtcagagctggctccgtctgaacagacccattttctctgccccgctccacccttacctctcctcagcggcagcagggcagagtgctgaacccaggaccccacagatcctccccgctcctgtctcccggtgacaagggtcctggaacggggcgtctctgactccctgctccaggacgggtttagtacaggcactcacaaccccctggggtgcggcgggtggggctggaagaggcattctcttttctgtccaccccgtcacacactcctgcacgcgctgttgctcgatcatccaaagctccttcctgaattcctgtctgagctggctctgggggagggacctgggagcccaggaagaaaaaatgatctccagcctccctccagggtcagccatgagactcacccggcaaggagatggggtagagtgagctggagcctcagggctgaggtttataagcagcggggaaggaggagagagctgcttccaagcccggaggtgtcaaatttccgtggtcgattctgaagaccagagacagcccaatcaggccgcttgccctgagccctcaggtctggacccgggctccctgccagccacacgagcgcccccacttggtcagggagaggagctgcctggacagatctcgttcggcaggggtcccagggtcctagtcctctcaatactgggggctgctgccaccatacccatgtctaatcaggagtgtgtatgctgaggggggaagagggaggcaaccaatcaagggagctcaacactgagaggcccaatctgagacacacacagaggccccttggaatgagatcccacaaaggatgctacagaccaagatccctcagagaaccccaggctgaggccccacacacagagggggatccaggttgagacccccagagaagagtcctggattgaaatccctctgtgggttctcagactcccaagactaagtttctcactgagggtcctctcagtgaggccccatggaggagccacagactaagaccccctcagcagaattccccccttaccgggctcaaccagcacagccagccacaggtactgcaaggcccagcttggggtaagacatccagtgtccctcccaggacctccttcccacctctttcccctgcaccatccactgctgcctggagagaaaggaacggggcaagcaaggctgggaaagagacaagggccgcctgttccagcccaggagacagagggcgcctctgtctgctcctggccccttgccccacagggtgttcgtctgtgaaggggtggagtcggtgggggggtcagcgggggagggactgttgaagacaggtctccacacacagctccagcagccacatttgcaaccttggccatctgtccagaacctgctcccacctcaggcccaggccaaccgtgagtaccctgccccactgggctagtccctggcctgccagcttcagggagaggggtcttcagaagggctccaagaggctggggaccatagcactgtggagcactgaggatctgggaggagtcagtcagggtgagggcagtttgggatttgggggagacagggtttggaaggtggtgatgagagacaaatgaactgaaggtcggagagagagctggcagctcagcaaaggaggaagccagtggggaacccaccatgagcttcctgaccgcctggccctcccacagggagccctcaagtccctgccaaggccccctctgtctcccaggtgttgggaagggtcccagccctcccctgcctcgcctcctgtggggtaagaagagagcagatacaacagctgtttctgcccccacctctcctgccagccttagtctctgccacccccaccctgccttgccaagagctcaggtcccgggggagtctgggggtggcagggcaaagctcccatgatatggggaagcagagatgtagggtgctgtgccccttcccaactcgacctccacaggacctcccctttctcctcctcccatttttggcccagacctcttgactcctctttccccccattcttacctctttgtttccccatctcccctgcccccaagtcctctcagaactgccaccacgtaaaatcccaggctgctttagggctccaggtgacctccagctgcccctctggcatggagcaggtaatcaagctaccagcacccctccctcaagcaccccttatcccctcatcagccacagcttgggttccatctcccccatgtctctgtgacaactgcttctcaggtccggagttcagatgacactcacaagggccccattgaagaactgggatgtcattcgatcaggggccattgtccagccccctaggcctggggaaggatggggacatctgatccgagacacctgagctgccccctctggggttgtggaaggccagactgtcccagggccaagggaaagaggccccccggcttggcagtcttctctctcaacagaccactcctttctcctttcttctcctactctctcccagccccttgaactcaaaggaccgcatgctttcagccctttctctcccc

SEQ ID NO: 1918 - DNA, 4001 bp, Homo sapiens
gtactcggcaccatcacgtcctaaacacagtgtcccataatcatcatctcacaaaatctcagtcccagacttctgcctaccttgagcagatggggcaactgctgggtaaccagctctttgaactcgttgacgctgaggctatccttccggccctcctgccttgcaaaggtgaagaaggtggtgaccacggtctcaatggactcctctagctctgtcagtggttctgctgccattaggaccctgaggccaaagctgatgtcctcaaggggctagctgacctttgtcagggctgacctgtggaagagagaaggagcagagagggagagtcagggagccccaagatgcaggaatggttcagaaggtccctgccttggtgttatcacatcagtctcagcctggagggggcatatggggaaagagggagaggacaggggttgagcttggggcagcagaccaggcaacggcatctcagttttggtgggggcaggagattcagctccagaaaccccctcttctgtaggtctcacaatccgggatcctttttaaatgtctgtggcttagggacccctctgtggtgatccctcgatctggagacccctctacttgagaggaggtcttcagttgaaggtccttcttggagtccttcaagtctggtggcccctctgtggcgtgtctgtctcaagaatcccttcttgtctcacccagactcacaggtcataaggttgtttgtctccaaagcttgtttatgttgggccctggtctccggccactcgcatccgcccacacacactctaaccgctcctcccagcagagaagcacagggtctggcaaatgtcccctgtggtcagagctggctccgtctgaacagacccattttctctgccccgctccacccttacctctcctcagcggcagcagggcagagtgctgaacccaggaccccacagatcctccccgctcctgtctcccggtgacaagggtcctggaacggggcgtctctgactccctgctccaggacgggtttagtacaggcactcacaaccccctggggtgcggcgggtggggctggaagaggcattctcttttctgtccaccccgtcacacactcctgcacgcgctgttgctcgatcatccaaagctccttcctgaattcctgtctgagctggctctgggggagggacctgggagcccaggaagaaaaaatgatctccagcctccctccagggtcagccatgagactcacccggcaaggagatggggtagagtgagctggagcctcagggctgaggtttataagcagcggggaaggaggagagagctgcttccaagcccggaggtgtcaaatttccgtggtcgattctgaagaccagagacagcccaatcaggccgcttgccctgagccctcaggtctggacccgggctccctgccagccacacgagcgcccccacttggtcagggagaggagctgcctggacagatctcgttcggcaggggtcccagggtcctagtcctctcaatactgggggctgctgccaccatacccatgtctaatcaggagtgtgtatgctgaggggggaagagggaggcaaccaatcaagggagctcaacactgagaggcccaatctgagacacacacagaggccccttggaatgagatcccacaaaggatgctacagaccaagatccctcagagaaccccaggctgaggccccacacacagagggggatccaggttgagacccccagagaagagtcctggattgaaatccctctgtgggttctcagactcccaagactaagtttctcactgagggtcctctcagtgaggccccatggaggagccacagactaagaccccctcagcagaattccccccttaccgggctcaaccagcacagccagccacaggtactgcaaggcccagcttggggtaagacatccagtgtccctcccaggacctccttcccacctctttcccctgcaccatccactgctgcctggagagaaaggaacggggcaagcaaggctgggaaagagacaagggccgcctgttccagcccaggagacagagggcgcctctgtctgctcctggccccttgccccacagggtgttcgtctgtgaaggggtggagtcggtgggggggtcagcgggggagggactgttgaagacaggtctccacacacagctccagcagccacatttgcaaccttggccatctgtccagaacctgctcccacctcaggcccaggccaaccgtgagtaccctgccccactgggctagtccctggcctgccagcttcagggagaggggtcttcagaagggctccaagaggctggggaccatagcactgtggagcactgaggatctgggaggagtcagtcagggtgagggcagtttgggatttgggggagacagggtttggaaggtggtgatgagagacaaatgaactgaaggtcggagagagagctggcagctcagcaaaggaggaagccagtggggaacccaccatgagcttcctgaccgcctggccctcccacagggagccctcaagtccctgccaaggccccctctgtctcccaggtgttgggaagggtcccagccctcccctgcctcgcctcctgtggggtaagaagagagcagatacaacagctgtttctgcccccacctctcctgccagccttagtctctgccacccccaccctgccttgccaagagctcaggtcccgggggagtctgggggtggcagggcaaagctcccatgatatggggaagcagagatgtagggtgctgtgccccttcccaactcgacctccacaggacctcccctttctcctcctcccatttttggcccagacctcttgactcctctttccccccattcttacctctttgtttccccatctcccctgcccccaagtcctctcagaactgccaccacgtaaaatcccaggctgctttagggctccaggtgacctccagctgcccctctggcatggagcaggtaatcaagctaccagcacccctccctcaagcaccccttatcccctcatcagccacagcttgggttccatctcccccatgtctctgtgacaactgcttctcaggtccggagttcagatgacactcacaagggccccattgaagaactgggatgtcattcgatcaggggccattgtccagccccctaggcctggggaaggatggggacatctgatccgagacacctgagctgccccctctggggttgtggaaggccagactgtcccagggccaagggaaagaggccccccggcttggcagtcttctctctcaacagaccactcctttctcctttcttctcctactctctcccagccccttgaactcaaaggaccgcatgctttcagccctttctctcccccaacacacagcagccccattccccttgctcccactatccccgaatcaaccaggagtgagcagttgcagggacaacgcctgcaggtctcctctcccactccctgggaactctggctccaaggaaaaggctcagacattcctctctccccttctgccacccaccagatggaagggataattttgcagaggcaatgggagcatatcccaaagaagccaaaatgacatgttcaggagagaacagagttgaaggaccaaaaggggcccccagctgctgacaggaaactcagagtcagtgagacctccctcccccagaaggcgtacgccacccactggggctgccatcccctctaccaggctgaccgagggtaccagactgactccttgctaggggtgggcagcagaaggaaggctgtagtggacaccccagcccaccaccctcaacagcagagcttggctatgctagacaggcaaggtccagggtaaaaatagagccagaggaagcatggcccagtcctgtgaccacccctgcctgccccaccctcctcaatccctgcctgggcagccactgcagacatctaccacaggcctctggagccagc

SEQ ID NO: 1919 - DNA, 4001 bp, Homo sapiens
tcactctcaactccccttatttggggaagtgtcttatttagaaagaggtcaaggtgcattacatcttcctacttgaggaatgctcaaggtccagaaatgtgggggttcaaggttccagttggaagtcgaggagacatcagcttctcaactataaaaccagaggaagaaataatcttttttttttttttttttttttggagacacagtctggctctgtcacccaggctggagggcagtggcacgatctcggctcactgcaacctccgcctcccaggttcaagcgattcacctgcctcagcctcccgagcagctgggactacaggcgcctgccaccacgcccggctaattttttgtatttttagtacagacggggtttcaccatgttggccaggatggtctcgatctcctgacctcgtgatccccccgcctcggcctcccaaagtgctgagattacaggcatgagccaccgcgctaggccgaaagaatcttctttcaatcaacgaacatttacttaagtggtactatgtgtaaacactgtaggaactgaggctccagcattaagcaaaataaccacgatccttaccctcacatgggtaaggatgctgggccattacttacacacagacacacacaaacacatacacacacgcacacgcccaagtgccaggaaggaaaatgaaagggtcttgacgtgccagtggagcagaggaagggttgcagatgtgtcattctctcattcctcaaacatatgtacactgtattgtgcacatagtcattagaaaaatcccttattgaggccgggcacagtggctcacgactgtagtcccagcactttgggagacagaggcgggcagatcacttgaggtcaggagttggagaccagcctggtgaaaccccatctctactaaaaatacaaaaattagcggggcatggtggtacgcgcctgtaattccagctactcaggaggctgaggcaggagaatcgcttgaacctgggaggcggaggttgcagtgagccgagatggtaccactgcactccagtctgggtgacacagcgagactccatctgcaaaaagaaaaaaaaaagaaagagagaaaaatcccttattgagcaggaaacatagcttatgcccataatcctaggagtcgggaggctgaggtgagaggatcacctgagcccagtaggtcaaggctgcagtgatccgtgattcattgcgccactgactccagcctggacaacagagccagaccccgtctcaaaataacaacaacaaatcagagagagaaaagagaaatccctatgtaggtctgcaacaaaataaacacggatggcaggtgtggggggaggacatggaaacgcaatcgaggacgcaaaggtgccccaccccaagaaggagtaaacagtatctaggccaagttggggaggggaggaagtgaggaggaaaacatggacgggcggtggtgttggccggtgcaggatgggagaggaatttgctcctaatactggcctcctgggccttggctggagcatttacggcacttcacaactctcagactgggcgagtggccatgaggggaaaaccagtgcaaattccccaggcccaattgtccggaagaagacgaggcaagtccgcgtaaagatttttagacggtgtaccttggctagggaacggaggggcgagggaattcgggacccaaatcccctctaaggcccacattaataactacccccaagaggttgcagcgcaaccactactggaacgtgaagtccccggcacgccccaacaacaggaccattggccacgcccctaggggcggggcactgcatggaaagccccgccttcgccctaaggctccgcctctgacctctgcgcaggcgtagctcaaatctttcccgccctctagtcgtgcgcggatctgacgcctgacgtaattgcgtagacgccattttagccggtcagacaagcactggacgtggcggccattttgttttggacaccgagcaggagctggcggccgctgcagacgaaaggcaggaaagggcaggccgggtgagcagacggatcggccgactagacagccaaccagcaacaacgaactgagctcgcatactaccgcttacgcatctaaccaaccgcccatctagctaacccgagcccctccaccgtcaactcaggttcggccggtccccggcccgcctgccggagccgtggtggcagccccgggaggagcactggcgtctgtttccttcggtgagtttcggtagtgagaaggagccgggggaggtgcggtcttgaggagcggaaggggccggcggacgcggaaagggggtggtggcatgtggacatagctacggtgttggagcgtggaggccccggggaggaggcggagcccctgcgaaggggcgggggaggggctgaactggaacctggtggcgggattgatggaggttggggtttgataggataaaaaggaaacttggcgggtagagcagaagtggaagtcttgacagggctttgaggatggtagggagattaagaagtacaagactttgaggaatgttggaaattaatggcggctttagggttaagttttgtggagggctctttgcgagctaattcccaggtgaatttagaaaacctttcctactcccccagatcgtcagtttcttgttaaagtccctacttgattctggagttgaaagccacttttgaaactaggcatgcatatatatatgtatatatatacatacatatatatatatatttttttttggggggggacggagtttcgctcttgttgcccaggctggagtgcaatggcacgatctcagctcactacaacttccgcctcccgggttcaagcgattctcctgcctcagcctccggagtagctgggattacagccatgcgccaccacgcccggctaattttgtatttttagtagagacatttctccatgatggtcaagctggtctcgaactcccaacctcaggtgatccgcccgcctcggcctcccaaagtgctgggaaaacaggcgtgagccaccgcgcccggccctgcctgtattttcactgtagatcagtggttctcaactttagctgcacattagaagcacctaggtagctttcccccgaccccacaattggttcatttccaaacctcattaccagagattgtggtttaattgatctaggcccagatgtctgtattttctatttttttaattaatttatatttttatagaaacggggtcttaccatgttgcccaggctggtctcgagctccagggctcaagcattcctcccgccttggcctcccaaagtgctgagattacaggcgtgaagcaccgcgcccgccctgtccggccctatgttttaaaagctccttggataagtcatatgtagtcaaggttgaaaatgactgctctagagtaaaagccaaactcggcccggtgcggtggctcacgcctgtaatcccagcactttgggaggcccaggtgggtggatcaggtgaggtcaggagttcaagaccaccctggccaacgtggagaaaccccgtctctactaaaaataaaaaaaaattagccgggcatggtggcacgtgcctgtagtcccagctactcaggaggctgaggcaggagaatggcttgaacggggaggcagaggttgcagtgaactgagatcacgcctctgcactccagcctgggcgacagagccagactctgtctcaaaaaaaaaaaaaagccagactccatactttgattgctagattggcttctgccgtttttgagaaattcccgggtattttgtgggccttgaagtttgtttgtttgtttggggttatttgtttgttttaaagagatggggtctcaggccagagtgcagtggcatgatcacggctctttgcagcctccaacccctgggctctagcgattctcccacctcagctcccctgagtagctaggacaacaggtgctggccaccatgcaccgctaattttt

SEQ ID NO: 1920 - DNA, 4001 bp, Homo sapiens
tcggtgacagagtgagactctgtcacaaaaaaagaaaaaattagccaggcagtgtggcatgcgcctgtggtcccagctacttgtgaggctggggcaggaggattgcctgagcccggaaggtcaaggatgcaatgagctgtgatcgcacagtggcctgggcaacagagtgagaaaccctgtctcaaaaaaaagtctgagaagttggaagttgtaggggattttgcagatgaaagaccatgagtttcagagactcactgtgttcaaggagtccatattcacacacttcaacgtgcctgtggattttcagaaaggatgtaaaacaaactgtcaacagccagaatgaccaggcctcttcgaggccagagtcgatgaaatttaagacctgactccagcctgtgagtgcgagagaaggaatgactcttacaccctagtaaggggatgcccatagcgggtagggagtcttcacagatgcacccacagaccccctacactgaggtctatgactccatgaatttggctgtgttttcatttttgataagcccctttccactgctaggcctcagtttccatatatgtgaagtgaggaatgcggactgtgttttctcttggcctccttccagctctgacagtctgtgaatctcctggaagccagctctgggtccagtcctgtcttggggaaattagaccagaaaggcacagagcatacacaagaacccaacagcatcttctgacacaagaccatactcccactggcacatagtatctttgcttacctaattatatgcatggacacacaaacacacacatgtacacaccaggcaagaaaactcacaaccgggtcaggcgcagtggcttgcgcctgtaaccacagcactttgggaggccgaggcgggtggatcacctgaggtcaggagttcgagaccagcctggccaacctggtgaaaccctgtctctactaaaaatacagaaataggctcggcgtggtggcacacacctgtaatcccagctactcaggaggctgaggcaggagaatcacttgaaccccggagatggaggttgcagtgagccaagatcacaccactgcactccggcctgggcaacagagtgagactttgtctcgaaaaaacaaaagaaaacctgcaaccattgacacatgcagccacccacaccctttcttgtggtcacctcaccgtactcggcaccatcacgtcctaaacacagtgtcccataatcatcatctcacaaaatctcagtcccagacttctgcctaccttgagcagatggggcaactgctgggtaaccagctctttgaactcgttgacgctgaggctatccttccggccctcctgccttgcaaaggtgaagaaggtggtgaccacggtctcaatggactcctctagctctgtcagtggttctgctgccattaggaccctgaggccaaagctgatgtcctcaaggggctagctgacctttgtcagggctgacctgtggaagagagaaggagcagagagggagagtcagggagccccaagatgcaggaatggttcagaaggtccctgccttggtgttatcacatcagtctcagcctggagggggcatatggggaaagagggagaggacaggggttgagcttggggcagcagaccaggcaacggcatctcagttttggtgggggcaggagattcagctccagaaaccccctcttctgtaggtctcacaatccgggatcctttttaaatgtctgtggcttagggacccctctgtggtgatccctcgatctggagacccctctacttgagaggaggtcttcagttgaaggtccttcttggagtccttcaagtctggtggcccctctgtggcgtgtctgtctcaagaatcccttcttgtctcacccagactcacaggtcataaggttgtttgtctccaaagcttgtttatgttgggccctggtctccggccactcgcatccgcccacacacactctaaccgctcctcccagcagagaagcacagggtctggcaaatgtcccctgtggtcagagctggctccgtctgaacagacccattttctctgccccgctccacccttacctctcctcagcggcagcagggcagagtgctgaacccaggaccccacagatcctccccgctcctgtctcccggtgacaagggtcctggaacggggcgtctctgactccctgctccaggacgggtttagtacaggcactcacaaccccctggggtgcggcgggtggggctggaagaggcattctcttttctgtccaccccgtcacacactcctgcacgcgctgttgctcgatcatccaaagctccttcctgaattcctgtctgagctggctctgggggagggacctgggagcccaggaagaaaaaatgatctccagcctccctccagggtcagccatgagactcacccggcaaggagatggggtagagtgagctggagcctcagggctgaggtttataagcagcggggaaggaggagagagctgcttccaagcccggaggtgtcaaatttccgtggtcgattctgaagaccagagacagcccaatcaggccgcttgccctgagccctcaggtctggacccgggctccctgccagccacacgagcgcccccacttggtcagggagaggagctgcctggacagatctcgttcggcaggggtcccagggtcctagtcctctcaatactgggggctgctgccaccatacccatgtctaatcaggagtgtgtatgctgaggggggaagagggaggcaaccaatcaagggagctcaacactgagaggcccaatctgagacacacacagaggccccttggaatgagatcccacaaaggatgctacagaccaagatccctcagagaaccccaggctgaggccccacacacagagggggatccaggttgagacccccagagaagagtcctggattgaaatccctctgtgggttctcagactcccaagactaagtttctcactgagggtcctctcagtgaggccccatggaggagccacagactaagaccccctcagcagaattccccccttaccgggctcaaccagcacagccagccacaggtactgcaaggcccagcttggggtaagacatccagtgtccctcccaggacctccttcccacctctttcccctgcaccatccactgctgcctggagagaaaggaacggggcaagcaaggctgggaaagagacaagggccgcctgttccagcccaggagacagagggcgcctctgtctgctcctggccccttgccccacagggtgttcgtctgtgaaggggtggagtcggtgggggggtcagcgggggagggactgttgaagacaggtctccacacacagctccagcagccacatttgcaaccttggccatctgtccagaacctgctcccacctcaggcccaggccaaccgtgagtaccctgccccactgggctagtccctggcctgccagcttcagggagaggggtcttcagaagggctccaagaggctggggaccatagcactgtggagcactgaggatctgggaggagtcagtcagggtgagggcagtttgggatttgggggagacagggtttggaaggtggtgatgagagacaaatgaactgaaggtcggagagagagctggcagctcagcaaaggaggaagccagtggggaacccaccatgagcttcctgaccgcctggccctcccacagggagccctcaagtccctgccaaggccccctctgtctcccaggtgttgggaagggtcccagccctcccctgcctcgcctcctgtggggtaagaagagagcagatacaacagctgtttctgcccccacctctcctgccagccttagtctctgccacccccaccctgccttgccaagagctcaggtcccgggggagtctgggggtggcagggcaaagctcccatgatatggggaagcagagatgtagggtgctgtgccccttcccaactcg

SEQ ID NO: 1921 - DNA, 4001 bp, Homo sapiens
ttgcagatgaaagaccatgagtttcagagactcactgtgttcaaggagtccatattcacacacttcaacgtgcctgtggattttcagaaaggatgtaaaacaaactgtcaacagccagaatgaccaggcctcttcgaggccagagtcgatgaaatttaagacctgactccagcctgtgagtgcgagagaaggaatgactcttacaccctagtaaggggatgcccatagcgggtagggagtcttcacagatgcacccacagaccccctacactgaggtctatgactccatgaatttggctgtgttttcatttttgataagcccctttccactgctaggcctcagtttccatatatgtgaagtgaggaatgcggactgtgttttctcttggcctccttccagctctgacagtctgtgaatctcctggaagccagctctgggtccagtcctgtcttggggaaattagaccagaaaggcacagagcatacacaagaacccaacagcatcttctgacacaagaccatactcccactggcacatagtatctttgcttacctaattatatgcatggacacacaaacacacacatgtacacaccaggcaagaaaactcacaaccgggtcaggcgcagtggcttgcgcctgtaaccacagcactttgggaggccgaggcgggtggatcacctgaggtcaggagttcgagaccagcctggccaacctggtgaaaccctgtctctactaaaaatacagaaataggctcggcgtggtggcacacacctgtaatcccagctactcaggaggctgaggcaggagaatcacttgaaccccggagatggaggttgcagtgagccaagatcacaccactgcactccggcctgggcaacagagtgagactttgtctcgaaaaaacaaaagaaaacctgcaaccattgacacatgcagccacccacaccctttcttgtggtcacctcaccgtactcggcaccatcacgtcctaaacacagtgtcccataatcatcatctcacaaaatctcagtcccagacttctgcctaccttgagcagatggggcaactgctgggtaaccagctctttgaactcgttgacgctgaggctatccttccggccctcctgccttgcaaaggtgaagaaggtggtgaccacggtctcaatggactcctctagctctgtcagtggttctgctgccattaggaccctgaggccaaagctgatgtcctcaaggggctagctgacctttgtcagggctgacctgtggaagagagaaggagcagagagggagagtcagggagccccaagatgcaggaatggttcagaaggtccctgccttggtgttatcacatcagtctcagcctggagggggcatatggggaaagagggagaggacaggggttgagcttggggcagcagaccaggcaacggcatctcagttttggtgggggcaggagattcagctccagaaaccccctcttctgtaggtctcacaatccgggatcctttttaaatgtctgtggcttagggacccctctgtggtgatccctcgatctggagacccctctacttgagaggaggtcttcagttgaaggtccttcttggagtccttcaagtctggtggcccctctgtggcgtgtctgtctcaagaatcccttcttgtctcacccagactcacaggtcataaggttgtttgtctccaaagcttgtttatgttgggccctggtctccggccactcgcatccgcccacacacactctaaccgctcctcccagcagagaagcacagggtctggcaaatgtcccctgtggtcagagctggctccgtctgaacagacccattttctctgccccgctccacccttacctctcctcagcggcagcagggcagagtgctgaacccaggaccccacagatcctccccgctcctgtctcccggtgacaagggtcctggaacggggcgtctctgactccctgctccaggacgggtttagtacaggcactcacaaccccctggggtgcggcgggtggggctggaagaggcattctcttttctgtccaccccgtcacacactcctgcacgcgctgttgctcgatcatccaaagctccttcctgaattcctgtctgagctggctctgggggagggacctgggagcccaggaagaaaaaatgatctccagcctccctccagggtcagccatgagactcacccggcaaggagatggggtagagtgagctggagcctcagggctgaggtttataagcagcggggaaggaggagagagctgcttccaagcccggaggtgtcaaatttccgtggtcgattctgaagaccagagacagcccaatcaggccgcttgccctgagccctcaggtctggacccgggctccctgccagccacacgagcgcccccacttggtcagggagaggagctgcctggacagatctcgttcggcaggggtcccagggtcctagtcctctcaatactgggggctgctgccaccatacccatgtctaatcaggagtgtgtatgctgaggggggaagagggaggcaaccaatcaagggagctcaacactgagaggcccaatctgagacacacacagaggccccttggaatgagatcccacaaaggatgctacagaccaagatccctcagagaaccccaggctgaggccccacacacagagggggatccaggttgagacccccagagaagagtcctggattgaaatccctctgtgggttctcagactcccaagactaagtttctcactgagggtcctctcagtgaggccccatggaggagccacagactaagaccccctcagcagaattccccccttaccgggctcaaccagcacagccagccacaggtactgcaaggcccagcttggggtaagacatccagtgtccctcccaggacctccttcccacctctttcccctgcaccatccactgctgcctggagagaaaggaacggggcaagcaaggctgggaaagagacaagggccgcctgttccagcccaggagacagagggcgcctctgtctgctcctggccccttgccccacagggtgttcgtctgtgaaggggtggagtcggtgggggggtcagcgggggagggactgttgaagacaggtctccacacacagctccagcagccacatttgcaaccttggccatctgtccagaacctgctcccacctcaggcccaggccaaccgtgagtaccctgccccactgggctagtccctggcctgccagcttcagggagaggggtcttcagaagggctccaagaggctggggaccatagcactgtggagcactgaggatctgggaggagtcagtcagggtgagggcagtttgggatttgggggagacagggtttggaaggtggtgatgagagacaaatgaactgaaggtcggagagagagctggcagctcagcaaaggaggaagccagtggggaacccaccatgagcttcctgaccgcctggccctcccacagggagccctcaagtccctgccaaggccccctctgtctcccaggtgttgggaagggtcccagccctcccctgcctcgcctcctgtggggtaagaagagagcagatacaacagctgtttctgcccccacctctcctgccagccttagtctctgccacccccaccctgccttgccaagagctcaggtcccgggggagtctgggggtggcagggcaaagctcccatgatatggggaagcagagatgtagggtgctgtgccccttcccaactcgacctccacaggacctcccctttctcctcctcccatttttggcccagacctcttgactcctctttccccccattcttacctctttgtttccccatctcccctgcccccaagtcctctcagaactgccaccacgtaaaatcccaggctgctttagggctccaggtgacctccagctgcccctctggcatggagcaggtaatcaagctaccagcacccctccc

SEQ ID NO: 1922 - DNA, 4001 bp, Homo sapiens
ggtcctctccccacatgtcacactctcctcagcctctcccccaaccctgctctccctcctcccctgccctagcccagggacagagtctaggaggagcctggggcagagctggaggcaggaagagagcactggacagacagctatggtttggattggggaagagattaggaagtaggttcttaaagacccttttttagtaccagatatccagccatattcccagctccattattcaaatcatttcccatagcccagctcctctctgttctccccctactaccaattctttggctcttacacaatttttatccctcaaatattcatccctggcccaaccagtcccctgagcctccctctggtggagactcctccacccatgagctccccagagcatccaagacagagtgcacagagacctggggaaggaagctgaactttgcagagatgaggacaggtgcaggctagggtacagggtggtggtagaggagacaagttttatctccaggcccacagtctctccccaacaccccccaagaattccagagggagttctcagtgcccccggacaggcctctccagcttcacactcttggccgcttctccaatcagctcccagaaactcctgaactccagtttagagtcattgcagctgcccaggttggcaattttctcttccaggccacagttgctctgaggggagtgaagaaaccatggctcagggatgcagcaccttccaatcttcccaccccaccctgcccacgggcagacagcaggagcagaggctacctagcactggcaagggggaagagctgggggttgcaagtgccagtgtgggtggggtcccggagcacttgcttgggaagtcagggtactggctgaggtggggtgtgctccgtccataccggcatgagatggggcagctgctgggtgaccaggtcccgtagctcagaaggggtcagcgtctccttcccaccctccacggagtactggtgaaagttcttgatgagggtctcaatggccctctccacatcactgaattcctgagcatcctgagggcaggggacatcacaaacatcagtgaagctccatgcaccccaaaaccctgcttctccaggagcctagcaaagcccccagggcagaaggcagctggaaggcacacagctcccacccactccagagcccagaatctagcccctctcccccaccccctgctcggcctccaggccacagcagctacaggttggggaaggcttccctccccacaccccccaccgcaggcagagcaggtcccagcatgcacccaggcatcctcttcccaggaggactccatctgcatcaccctgtgtgggcctcagaagagggttcacatctcactcacagggtctggggtgcagggcaaggccaaggtgaagggcagaagtcagtggggggacatagaccctcagggtgaaggagaggagtgtgggagcagaaaggccaggagtgaatgagcccacctctgcgttggctgaccgacactgtcccatggtgcccactgtgtctggtcctttggtgagagttctgttgtcctatagctggccccagaggagctgatggctcatgatctgcttagaggagggggtaggcctgagctgaggagagagtctagcatttctttctcagctgccccctttggctccatctcagatattctgtgcctcaccaggggttcaaaaccaacaccacataggcccaggccccgcctgggcttcaggagccaaggtcatatcccccaggccaacgcatctagggggaatcccttggaactcaccttagcttaattctttccacctcctccaaccacccacctctgcttgaaacacacacaccaacctccaggatctgatcccccagctcttaccctaagtgtgccctctggacagcaggcagtatatttgggtgaaaagccttgggtttccttacctgttggcagccgctgagacaagacaggaggagccagctcacctgagctcagctcttatacctgggggaagggaggggaggcagggggctgggcctaagccacccctgctattgcagcagcctgggctatgagccagctttatgggccccaccctccgctggccagagttccagagcctaccatgaccctgccacgaggagggagccacagagggctggggctgggaaacccctggcctccgatcagcatgcagagtcacagagaaagagaagcgagaaggctggggagacagagaggacttcgagacctcatggggtcaccctaggaagtggaagggccctggcgaactgcagggcagggaaggagagggggtctgaatctgtgaccaggaaggagaagcaggagcctctgtaccctccatgtgtgtctgtctgtctctctctctctctcacgtgcacacacacacacacacacacgcacacgcacacttctcccagtcaggcccagcttggatactgacactcaagcctgcctggatcccagagcccagcctttaccagtcctggaggcagagagatgaatgtagagaacttggatcaggaggaagccagagaagggcagcctgatggagggaggcagattgagtgagtgtttgcctgacctcccttcagctcccctcagcggcccagagtgcacaaatgcaaggcccacttgagctgcttggcagctaacaccaactccaaactggtcgggccacgtgtttctctctccctccctcagagccccatgccttccctaacccagctgcagagcaacagccccccatccaggacccagaatgacatcccagagagcccaaccccagtggccctcctcacctgcccaggcccagacacctagaacctgaagtcactgggagggggtaggaagaagggcagagcagtaggcatgagtcagggcaaggatggggtgcggcccagagccaaagttcccaggatcctttcctaaacgctgagatcagagcacaccccactacatccctcctcatgtcaccttctcaacctggggccctgtgtgtctcaatggagaggaccttccaacaatgtctcattctgagagttcctctgaagggcttcaacctgcaggtccctctgagggtctctcagcctgtgggttcctctgagagtgacttagcctgggttcctcaggaggaggctcaggctagggggttcctcacagggcttctcacggtaagggagcccttcagtgcaggagcccctcttgaatgtctctgccaatggccctttggattcccagtctgggagtctctctgaggtctcagtctggggctctctaacggagggtcagggagctccctcagcctaaaggttcctctggactcatagctgccctgcatggatgcctgccagtgaggcagtgacagccctgggaggctggtcaccgagatgcccgcccctgctccctctggtggtggccgtgtacaccatatgcccctcaagccaggaaggcaaggcaagttctgcctccggtggcaccaccacaccctcaccccacggtccttgagcagaacatcgggcccctccttctggcttccccactgctccagagggtaaggggaggaggccctagtgttcctgagcacccagccagagaggatcctggttaatcagagctctgaaatccacctattcttgtctttatgactttaactaagatctgtgtcctgatctttaatacaggagttaaaaatagtgccttcctcaaaggactgtgagaattaactaagacaatacaggcaaaatgtttagcactgcacctggtacttagtaagccctccatacctgttcaccactatcattgtcatccaacggacaaactccaagaaaaaagaagcagagcaggaccatgcagctgagcccgagtcacctctcctgccccacatctctgcccctacttttcttttttctttttgttttgttttgttttttgtttttgagatggagttttgctcctatcg

SEQ ID NO: 1923 - DNA, 4001 bp, Homo sapiens
tccaatgggccctctcacctcaggcctccagccctaccccaatgttctcattgtcttccccttggctgattcatcattgagcaacaagcagtctcccacccccaccccacccacctcagcccagcttgctgacttctccaaaagcccaaattgccctgactccatgcccctggatcccagccactccagccccaccctcccacccccaggttctgggctccacgccctccaaatgcctcctaaccacccctagcatccccaggctccttccgtctggagctccaaacatccaccacaccgtcctaagtccaccttctcttctcaccccacagacacctctggagtcttaagttttttccaagtgttgggatgtgtccctagactcctgtccctcctggtcactgttctctccagagcctagcccactgtcaagcctaagtatggattctctgtgtcccttccatctacctggaattcatttgctcacttaggcaccatgagtttgcttactcattcatttattggctcattcattcactctcattcattcacttgctcattcaataatgcattcactctcttgcacattcattcattcattccctttttcatttactcatttgtcctctctaacttcaatatatagggaaggtgccatccgaactgggctgacaatgccacctctatcagcaaggctgtttcaaatgaaatttctccagcctcagctgttccattctctgctccttcctgtgttctttctccaattccacaaggccctctccaggaacagctcccggagcatagtggggcctgcttggccctgcctcaccccttaccatcctcacaggattctgcgtctaactctctttgtctctctctcacacacacacacacacacacacacacacacacaccgagcaaggacctcggccattcctgatcccctctgcttgggtgacccatcacccttccactcacttcagttcttggagcaagaagccagcctctgaaatttttccaggcaagtgaagttggaggagttcagtgtggatcttgcccccgcctcccccaacacacacacagctaccccagcctcaacaacacttactagaatgtggggaaaggcagagccagctccccagcacccctgccctcaccaccatccccactgggctgggcaggggaaggctcccatagtgcaggtggctctgccaagaaaagcagctcaagccggggcctgcctgggtcctgaggtggaggagctgccgaggttcagcccccctctctctatctttccctctcccagggagcttgcaggctccccacagcctcactcgggttcctcccagatctcatcatccctctcaaggaacagctcctggaacacagtggggtctgcttgggtcgtgaggtagaggggacgccacctcagcccccgcctcctcttctcggaatctcaggctccctggaaactgcctggttccttctggaccccatcacctcccctaggacacagctcccagagcccagcaaggcctgtgtccaagctctgaccacccccaacccagaccaacacgcatttgtcctctccttttggggaggatcgagtagctgtggtcaaagcttccaaatactctgcccctggagaggagctccgtcagctgctgcggcagggagggggtctcaccatcccatccatccctctaaaggcctcacccagcccccaaccccccaggactccccattcctaaactggcctgtgggagaaagttaataattaccaaaatcttcctgcctgctctctggcaggcccctctccccaggcccccttcactgccccttctcctggcctcccaatactgtggggccctccggcagccgaagacctcccaggccgggcccagggtgctcacctgctgcctcagtctgcctcctctccagcagggctctggggcctgggctctggcactgccaagcagctccctgcgctcagcccagccgggactcctccccgctgcactcccagaatctgtcccactccctcccagccctgcccgctgagctggctcggtggggagatagtggctgagctccttcttgacttggccctggggttgggcccttgttaaagggatacacaccttttttcacacccctctacccccatcccagagggagtggtgaaaactggcactcccccaaccccaccctcccagccccgcaggggctgagcagaacctgacagggtagagaaaggaagggaaggactatcacctgcctttctcacctgggtcactgggatcccagtttcaggggctcccaacagacaagttcagttaacattccaggccagcctaactggccacagaaacctccttgccactggggtttcaggagtaacgcccgacttctgtgctcaaatcagaaggcagatgccagggacctgtctggctccctggtcttctgtctctagtctgacccatcagctctactgagacccagccctaagatccctcatgtacaccagaagactcctctggaaactccccacaccccaccgtttccctaagatacccaaggaaactggccagctcgacctccctacactagggcagcagctgaaaccaaagaggggcccacttgcccactccagcgggaatgatattgggtcactgggcactcaccatgtgtcaggctctctgtaagtgctttacatgatgtgtggcattgtcctcctggcaatcctgtggaagtaatattcatatcccccattttacagatgaggaaactgatactaagagcatgcccaaaattccaatgataagtggcagatctgagattcaaactcaggccagtcagcctgtttctaaccgccccccacccccacccaccccatttccctggttgtgccagccagggctcagaacacctggactaatatccttttccccaagtgtgcacacataccctcctctcctataagagggcccgcccattggcaaagaggagcctgtccctcagagaggaccatgttgcccttttggacctggtaccaccctcaacccaaacccatagggaaaagtgagtccccattcacttccacagccaaccactccagccccacgtgccccaccctaccaatgactttgcctttcacccccaagctcctctcacccgtggaccctcagggagggggtgtccagtcaagacaacatgtttcacttttttcatttttttttattaatcaaatgatacaaaacaaccatcattctgtcaatgcccaagcacccagctggtcctctccccacatgtcacactctcctcagcctctcccccaaccctgctctccctcctcccctgccctagcccagggacagagtctaggaggagcctggggcagagctggaggcaggaagagagcactggacagacagctatggtttggattggggaagagattaggaagtaggttcttaaagacccttttttagtaccagatatccagccatattcccagctccattattcaaatcatttcccatagcccagctcctctctgttctccccctactaccaattctttggctcttacacaatttttatccctcaaatattcatccctggcccaaccagtcccctgagcctccctctggtggagactcctccacccatgagctccccagagcatccaagacagagtgcacagagacctggggaaggaagctgaactttgcagagatgaggacaggtgcaggctagggtacagggtggtggtagaggagacaagttttatctccaggcccacagtctctccccaacaccccccaagaattccagagggagttctcagtgcccccggacaggcctctccagcttcacactcttggccgcttctccaatcagctcccagaaactcctgaactccagtttagagtcattgcagctgcccaggttggcaattttctcttccaggccacagttgctctgaggggagtgaagaa

SEQ ID NO: 1924 - DNA, 4001 bp, Homo sapiens
gtagtgaccagcacagccagcgcctgctccagagaactgcacatcatggatctgtggctgcagaggtgccaggtgatgggtacactgctgaggctcttggggccttagctcagcctgtaggatccacttctgccctatgcccccaagccacctcacaaaacccctctctgaatgggaaggcaggggctgcatctccccctcagactgtggttccctgaggccggaggcgatacctccatctcaccctgagggcagacgctaaagcttcccttgtgtctgggagtcaccaagcctcctctgatggcacttgggacacccccctgagggcagggctccccattttagtgtctgccagaagggaaatgacagggtgaccagagtcccattttgatggcatctgcgcaggctctggggagcagggccacatgcaccggctggcagatgggggctcctgtgcagtctggcaggagccatggctacagcctaggagcaggaagctccctgaaggagtcgtttccctccttagactcgggactcctgaagccagaggcatctctctctgccatctaactggaagctcccttgggcaggagtgtttcctctctcagactaggagctcccagagggtggggaatgtgtctcccctcaccctgaaggcccctgagcctctaggcagacaggggcatggatagggtgggggcaacttaacattctctccaccaggaaggatcctgttggaattagaattaaagatatgaaatgttcattgccttgggatcaggatgggacagacctcagcggcaaggcctctgagaatactcagaccagcctggaaaggttaggcaggtttcagggtgaggccagaggagctatgccagaggcagggcatgccctgggcccatcatgccagccctgccttcaccgaggcagggggcagagctttgctgcttggggccatgacccaggcagagtcttgagacccctgcctcttgcaccttagtcctgctagaatccaggactttgcaaaaaaaaaaaaaaatctcaggattctttttgcagcaacgcccacatgcacacctcctgctcctaggcctagacccccaaagaagggcccctagactgagatatccaggggagggcctcagagcaacccctgcactgagacctcacagaggaacctggagaaaaacccttcagtcggccgggcgcggtggcttactcctgtaatcccagcactttgggaggccgagatgggtggatcacgagatcaggagatcgagaccatcctggctaacatggtgaaaccccatctctactaaaaatacaaaaaaattagccgggcatggtggtgggcgcctgcagtcccagctactcgggaggctgaggcaggagaatggcgtgaacctgggagggggagtttgcagtgagctgagatcacaccactgtactccagcctgggcgacagagcgagactccatctcaaaaaaaaaaaaaaaaaaaaaaaacccttcagtcaacacttcagcacttcacagagagttcttccaagggggaaggcccagagaggcccaggttgatcccaccagggaagctggaatgagagaactgtggagacaaagacagagacccacggggatcctccccaccctgccctcagcaggacagaggtactcaccagaccaggtggcagagacagacccaggaaggagagcaaggcagccaggctcccagggtgaggatttatatgtgggccccactggcccccaacttggcattttaaggaaaccaaacctgcctcaacctgatcccaccaaaccctggcctcttgccattcccactcattccctcccagccccctccctcccagagagtgccagctccaccaccagctgggggagggctctaggccaggtcaagggcagcccctgagcccacccaggccacagtgggaagtgggaggtgtcgtggggactgggcatcctggaccggggtgaggggaggcaacccctgctctggggcctggagactggtgccaggcctcattctcatgacatgcctgtgagtcacagcccactcctgtgtgagaggctgtgagcacacgctgagacttcatggtccagtgctcgtgtacatacatgcgcccgtgtgtgtgagagagaagcaacctggggccacccttaggaagctgggggccagaggaggcagctgggggacatcaggaggagaaggacaggactgacttcagggcatggatgaagtggagtgacttttaatggccagcaccagaatacctcttaatgaggtaatgaggtaactaagtgtgcttagaaatacctgggaaggtccctctgtgtaggaaggtgtctggaaggatggggaagcagtgagaaatggggttgctctacacacagccgcagttgggctgggccacagtctgtggggagcataaggaagtcccgagtagttaaaggctgaacaggaaaactttggcctcctcttctccagcttgagggctgggtgggtgggtaggggtacatccctacccaaggctgaaaacaccagctggacagcttcccaagccagaatccaggcctgaagcacagccctcagccacagccctctctcactgccccccacacacatgtcctccccagacccggagaaaggcaaacactgtggccattcagagcccagcccaagggagggctgccccctcccagggccccttcctccttggccctttgtctatcccggcccgtctgggcatcagggcaccgcccttcctgtggccccagctcccctccctgctccagctgtcgagtagcttcttcccctcccccagcccctctacctcagccctaagtgactcacccgaggttccaggcccagatgcccaggcagtgactcagcggcacaccctcctcccccagggccagggcagcagcagtcccagagcagtaggtggaagccccagcccagcctggcagggaaagcactggcacagagaccccaaacaggccctgccaggaggagctttggataatgacatggcaggaggatcagactgagaacaggctggtcccttcctagcggtcaccgtgtgacttgggggccagcctgagcagtgtacatgaagtcaggccttggggcccccagtgtcctcttctacaccttggcacagccaccgagtgtcccttgctcccctcagtacttgaacccctcatgctacttgtcttcccatcgaggcctacttcaagtagaactcggaataaaaacccttcacactgagggtgagggacaagggagcgcaatgcatcgattttcacagccattctttccttttaactaagggcctccacagggccttccctgctcagaaactgcagtgcatccccatggctgtcccttaaagccaggcggtatgttctcactcataagtgggagttgaacaatgagaacatatggacacagggaagggaacaccacataccagggcctgtgggcagttgcggggagaaggatgggggcaaggggagggagagcattaggactaatacctgatgcatgcggggcttaaaacctagatgatgggttgataggtgcagcaaaccaccatggcacatgtatacctatgtaacaaaccacattctgcacatgtatgccagaacttaaagtaaaaataaaataaaattaaattaaaattaaaaatttttaaaaagcctggcagtgaggcgctccagactcggcctgctgctgcgtgtcccttaaacacaccggcacatgcaactagtgtggccaagaccctcggcttgcgctgacccctctgttcagaacgtgcccacacatgcccatgccctctatcctgctgaaatccaacccccccttcaaaggccactgcagggagccttcccagggcccaaccggattcagtgtctacctgttctgtcctgtacaaagcgccccttttgcccttttcgtgtgtacttagagaattctgattt

SEQ ID NO: 1925 - DNA, 4001 bp, Homo sapiens
agtggaaaaggccagagaggagcaaagagctcaggagacgcgtcctcagagaagaaccaaacaaaaccaagctgatgccagttttttattaggagttaaataggccctttcccatcgtggtctcattggtgcacgctctgctgagcctcgagggcctcagagcagatcccgcctcctcccatccacaagggaggccacaggggtgcggcaggcaggctgggccccagagtggctctacccctcattcgctgggcatcctgaggaaggagccctcacatctctgggcctcctaggtaaaatgggttaactgatcgcagaagacctgggcaagtccagattgaaaggggtacaggagagagggtaggagggggtgtgggagacatgcccagcccccgacagccagcgcaccccctggagcagaggctactgggagcaggggggctctgaggggcagtccttgaagtactcgtggcagtagagacagaggcaggcaagtgagcgcacatactccacaaagtccacctcgcagtccttgttggtgtccagaacactcatgaatttgttgtagtcacattcccgaaactcagtctgtgcaagggaagggttgggagaggtaagggagtaggatgaggagggcagaacagcctcacacgccacctccctccttcctctcccaagtggacccaccccaccccaaactacacccttctgagggccgacttcaacctccctgctctgataatgcactcgttgcaatcccctcccaaatctgtcctctcagattattaatcgagcacctactatttgctactgagtgcctaccaagtgttaggcattcttcatggtgctctcactcagtcctctcaacagctctgcaaggcagcagggatgattgtcatcccattttacagatgaggaagctgaggtttctgctgtgtcagttctccccctcccactccctcctcacaatccagccccctcccttgctgtcctgtgctcatgcttgttgtccccaggtctctctttgcagagtctaggcagtgcctccccccggaggaggaggggacggacactctgactgctcaccggggtccaggtggccagctccttctgcagcagctccttgagctccgcctggcagagcttgtatttgtccccacagcgccctgcgtattcctggaaggtgcacacgatggcagctaccgcctgctccagaggcctggccatcctcactgtcacagaacaagggtgtggctcacagcagagttccaggccagccccccagctcacctctgccctctgtgtttctcagagactgttcccagacccatcttaacctccatcaggcttcaggccccgcagtctccccctcctctgagtagccctcccagaccacaccagcccctcctaatttatccccctgctgtcctgttgttatttccccatgtagaggtctcattgccccaacatcgctgtaaactcctcagagagacagcatcctaccccaccacccacacaccccaccgtggggctccttaagcactctcagattatctgccacctcttcttatccccaacacccagggatggctcggtcccagtctgccccagcccatgagatgccctagaagcctccctccctgcaggaacttgcacaaggagagcctggccctgtgcttctctgccctcagcccttggagaagctaggccttagcagggaggggcaggtctgagaggcgcccccacagcctcaccaccactgccctcaccctgcctcctgccctgaactcgaggaagctgcacccagaagaaaaacttgtgggatcctctctgcctgtcgccagctgtgcaaccttggtgagccatttgtctctctgggtctcaggggcggggcctgatctgtaagttggggttcatctcacctcgctggcccagtcaggaacctgaaccagatggtctcttgagagttgaccagttcgggtgtttaccaatctgagactggcctcccctgaggttaccctcccgacccctgggggttttgagcagggaggttctgtatagggatactctgttctattggaggggaagcccttcctggaattgctcacctccccccacttccactgtccccttccaccgcccttctgggatgatgcctccagcctgggaaaacccgaaggcagccaggaaggcaagagttttttccatgctagcccagtgactcactcctgattcccccacgggacaagagtcctgcagcacagggcggccagggccaagactctccctgaagatttgcccactgctgggccccctgctgggagcaaatggctggcatggttgtggctggcaggaaagtaggggaaggggagtggggagtgccaagcactgccaggatttaattcattgtaaacaccccaggattagagcaaggtgtccaggttcccaggagaggaaagggccatgatcctcagaaatgaggagactcagaggtgaagcaaggaggcaaggagcaggtgaggggcctgatcaaggggaagaccagagccttgagcccagtgctcccaccccaaggcagaccttagctctacacacctccctgcccaaacttccccaacagcccctcactgtgtaaggaaacctctgcgtccactatatctgacttccctccccgtgtcaggcccgcctgtggtcatctctctgcttccaatgccagaccctgggtcaggagtcaggctggctactgggggtccccaaactgccctgacactcaacccagggcaggacccaagcagctggcactcaccactggtgctggcgtttcagctgtaggagcttagagacagggcgtcactatttgtagcctcccaagaaaggaaggaagcaattatgggggacacaagtaggtcaacactgaggatgccctcagggatccctcagcagacccattacaggccccacctgcccacctatccacgcacacatcaaaggccagtctgggctcagacaccactcccctttcattccccatctgccctcccccagagttgggaacaggggacagtctcctgccaagtccttccagctcagttggaggagacagtctggcttatccatcacatcacagccccatctcttcactctgcagaggcccccagaataccaagtggggacacacttctgcctcgctcaggttgcacccctacaaatctctattccgggtagaacttggagagcacgtggctaagcctcccctttacagacgagaagtctgaacttgcctgaccagatcccagcttttggctgtgaactgcttgcttcccaggggggaaatcatcaggtgggatgtctttgaggcacaggaaggaggtgtgttcctcccaggggcacttccagagtctaagcttgagatttctggcccttccaccccaggtgatgggaatgaatttgggctagagtcacatgaaggctggccagtggctggagctccttaagggctgttttccttcttcccctgctctgctcagcaccaaaacaactttccttgaagtcttgtgggtggcaggatgggatttcctctggcttttagcttgagtgtgtagccttttggggtctcagcatcatgggagggtcatccatttgtgtcccctcttggggtgagaactgggcttccacttctgtcttcctcactccccaaaccatcaggatcaaagctcaggttcggcttggcttggccaatgacctcagggcacggggggccccagtacagattctgctttgacttagattttggcctactcatttcttactgccttgtggtctcttcaatgctttgaaaagatttaattctatgcagcatttgttgttgtttttaagctgaagtgggcacagaccaccatattaccagaaacagacatactttcatgtaacttctctattctctccctcacaccagagcctgagaaactcctccctgttttataggaagagaacccaaaacc

SEQ ID NO: 1926 - DNA, 4001 bp, Homo sapiens
acacatcatggcgatgcaggacaggaagacacagtactcttggaagtccacctcgttgtccctgttgctgtccaagttgctcatcagcttctggaaagcagcttcatctgtccttttctggagggagaagaggctacagatagaaaacagaagcccagtgggtggagccaggaccagacccagtttctactcccagaccagagttcagggaggctcctttgggaggtccagtttggaactccaaccctcaaggctaagctagggtggagaaggtgctccttggataaggaagtctgagtacctggtgcaatggaaaaatgacgggaccactacattttcacccaaggttgttctaataatcccatgaggtagtaatagtcatgaaaacaatatataaactgtgttatgtttgatacaaatatacattgttattgtttgaagggaacgtctgcaggcctgtgatcatctccacatctgtgtcttcacatctacaagccaaatagaaactcaaacagtgtccactgttggagtgatggcaagagtcagacagtcccggtccggatggcagttgtgtacactgaccaccttgggaagttacttagcactctgagcttagtcttcccttcagttaagttgtgcaaagcacctggcagtgtctgacccattcattctcagccctctttcagcatggggccaggcagtgagtggtggtgttcaatgtgtttccaccccaggcagccaccccactgatagatgccctctgtagctaatgctctagagcaagactgctgccctcctctgtgggaaatgccccacgtggggactcactcaggcactacccactcacccccaagaagctgggcagctcccgggtcagcagctcctttagttctgacttgttgagcttgaacttgtcaccctctttgcccgagtacttgtggaaggtggacaccatcacatccagggccttctccagagggcacgccatgacagcagtcaggatctgggagcaggaggcacagagaccgtcttattaatcccacccctcagagatgtgttcagaatgccaggctccactcccatccctccaggagcacttggcgagactctgctccctccctgggggagcccagagcagtgggcccccgcacctggctgggagggtgtgcacagtggggaacacatgctctgggcagtgaacatttgcaagatccgctgcgcaagctctggagattcgggcagcaaactcccagggcctcccaggccttgcctcaacaacagcattttttccacccctcactcagtctatccactcccacagctcagccacaaaggccccgcccttgccattcttttccctcccagaactgggtgtggctgctggaggcctgcccaggggcctgcagtggaaaaaaccagcacagccgcttagctctcagcatggggaggggcaaagtgaggtggcagaggcaagggttggaagagaagctgcagaggccatgcaccttctcgagctgggctgctgcgtgcagggcagaggctcatggggcacaccaccagacaaaggcccacagttgccttctgcctttcctttgcttcctgctcccgagtgcgcaacccagcaaacatgagccagtgcagatacccacaggcacatacataccaacacgtactatagcaacagcgtgtgcaagcccacatctcagaagcacctggagagctcaaattcagtcacttgctcacttttctgtttgttttttcctccgtcttacgtgcatgtgtgtgtgtgccatgcacacccacgcacacaatccacccagagttccacatcagaatctcacatctggatctctttagcacatctggcccccaccagcctccccttctccttccccagccctggcctctgacaccccttgcatgccagtcaggccaacacaactcaccaaaccaagaaagaagaagcgctgaggagagagggttgtagagaggggaagaatggggacggcccagaggtctgacctatttataccccagccaggccctgcccatagcaggggacaggggagagcggatactgccttcctgctgtgggctgatgcggtaagtgccacagcaccctccaccagcccagccgtggaaccaagcctcctgttcccaggtgggcacccgtgggtaacgggtaagccctagcggttactagcaggggactggatgagatgggcaccacccagtgtacatagctcagcctgagttttagagaggtggaggaaggggcagcctgtgcctggagcatgggggacagggagtagtcccatggggacctaggaaaggagatgcagggggtggtgggtgacaggtgggagattgccctggaaatgtggtgacacaaaagctaggggggagatgggaggatcgcctgaggccaggagttcaagaccagcctaggcaacatagagagacttctgtctctataaaaaggaaaaacaatttttttttttaattagctgggcagcatggctgtagcctgtagtcccagctagtcaggaagctgagacaggaggatcatttgagcccaggagttcgagactgcagttggctatgctcaagccactgctctccagcctgagcaacacagaggaccttgtctcttaaaaaaataaagattcagaaacaaaaactggggtggggatccccatgcccggtactgtctgccatgccaagtaaggctcagggtcggggcggggggatctggaggggaacaggctcacacccaaaggaggctctgggaccacctcaggaacgtcagtgggaaaggtcctgggtgaggtagtgatggagtggagtggcagtgaggcgtgggggctcacggatagatctcaggttcggagagggtatcaggaggggccatttaaagttgggatgagtgtcaggaatgaagaatccaggttggggtggagagttagaggtgaaatggcatgaaataggggagttataattcgggtcaacctctcagggtgggctacaaacccagtgagggttagaagtagggggttaaggccctcagggggctgcggcttcagggataggggctagctcaagttattcccttacccctccatacagagcaccccttcctggctgggagaaacacctcagacaccctaatcccattagtgctgctctctgggctcccacagcccgaggcagggaacaaacacccccactgcacccacggccccaccctcctccaaccatgagcactgagtcccaggggaaactcaggcagtcctctctcaaagatcccaaagaaagagagagaggaagggaggacaggggtccttgttttgtccccacgccctcctgctggaccctggaggccactgcatttctgcagggtctgcaacttccctcagggagcaccctgcccctgccctcagctgccttcccgcagtggaaaaggccagagaggagcaaagagctcaggagacgcgtcctcagagaagaaccaaacaaaaccaagctgatgccagttttttattaggagttaaataggccctttcccatcgtggtctcattggtgcacgctctgctgagcctcgagggcctcagagcagatcccgcctcctcccatccacaagggaggccacaggggtgcggcaggcaggctgggccccagagtggctctacccctcattcgctgggcatcctgaggaaggagccctcacatctctgggcctcctaggtaaaatgggttaactgatcgcagaagacctgggcaagtccagattgaaaggggtacaggagagagggtaggagggggtgtgggagacatgcccagcccccgacagccagcgcaccccctggagcagaggctactgggagcaggggggctctgaggggcagtccttgaagtactcgtggcagtagagacagaggcaggcaagtgagcgcacatactccacaaagtccacctcgcagtccttgttggtgtccagaac

SEQ ID NO: 1927 - DNA, 4001 bp, Homo sapiens
ctgccactgctgggagagcctggccccaccatcgaaggctcctcaatctccttctctaaaccctccagactcagcccttcctccttctcagtgagaccctgacccattctccttcacagagggctagagttttgctggcccgaaatccccaccatcttcctttgtctctgtctgtagcccttggccaccctgcccctggcttaggctggaggatcctgagggtaggtatgtgtcccccagagggagtactcagactttggggtggaggatgagggaacaatcacctacctccccaagacacagctctttcttgatcagctccttgagttccttcctactcagggtcagtttgctaccctctctccccgaatatttgtgaaacgtggtcaccatagtggtcagggccttctccagaggagtctccatcacagtgtgcagctctgtagagggagaggggaagatcccattcctcaggaagtcaccaccagcagcactagcctacctctgaggcccctccctcaaagaacaagagactggaacccaggatgagactgaaatccactaacaagagcgcccatctatatcagtacaggttacaatgagacccacaacaaactctggagctgctggtacaaggagaacagcaagaccccaaaggagaccacagactctcctgctggggagttgttgaaaagtaggcctgaggcagaaagatgagaagacgacctcctcaaaaggccctggtggcagatggtggagcagatcaagggtcacgattttctctctgcttcttccagcttaggaactggttttccacaggcagttcaccagcctttcccccagtgcctgaatcacctgatatcgaggagtgtcccattattaaagtcggggacagggcaaagagagagtccagggctgagagggggctgggctggaactgggtgatggggtctcaacaaggagcagcagggaggtgagctgagctggcccagctggtctccagactctggcccagagcagtgcacacagagacgggtcagcgggcagggagggcagggggcctcttgaaatctccaggatcattccaaaacctggatccagaggctacgcttgaataagggcctggattccaatagcacagccaccctcagccaagggaagagacagatggagctcaagtgactcagactcaaaaaccacttccccctcagggaggaaggaggcaacacccacggaacttgaaggctgcaggttaaatctgtggagagtcttcacctccagcccaaagccctccctgccattcttgaaccagacccatcattcctctcccaccacaaaaacctcagcctctcccacctcaaggagactcagctgggaccacagttgaaggcaagggactctgtgcacctgcaggagcatcctggctagtccagacccccacctccaccccagagccatttctcaagaaattccaaaggctctgccctcttctccctgagcgcatgcccgcttgtggggccaggcctccttggtggaggtcaccaccacttgtcaccctcatcatccagcgtgacccaccagatatcagatgaacagagacataggaaggaaggacttaccactgtgggagtgagcccagagaatccaagcagcaggcatagcctccctctcactgccttctgcctttatttccctgatctctgtccctaggaatccaggggagagaaagggcccatgagaagttgttggggacttgaggatgcccacgtcagagcctcccgggatggagctggggagaaaccccttctgccaatctcaccttccttgtttacaaacaagggctggggacacactgagttcccatagcacacacgtccccaatcccagaaactttactcttctgaccaaaaatcagaactcaaaatctgaaatctgatggaacaataagccgaagaagggaaaccaggctgtcctggaaagaaaacctcagaagtgtgggacaaacacagggcaccatctccccgtgtcctaggaagctctccacatcgggcccctcccacccatcctgccacccactccaggagtagagaagacagcccttgagatggggatcagtggaggaagatattttctgcgaaggatatggtcaaggtcatgagctaatatgggcccagaggtttttaaagggcttttaaatgaacgatttcttctaggcctcactgctcttcacaggaaaggctcgtcggagactcttggcatggaggactgagaatcaggaatagggaaggtgtccagcgaagggctaaggcccagcactggggtagaggttgtggattggggaggggggttcaggttcaggctgcagtcaaggaggaagtaggggccagggagagtttcctgtatcccaggagacactcagacatcgttctaccacagtagaacaacatacttctaccaccagtccaagaacagacctgggctcagggtgtagtacctatcactgctgcagtcccaccccagcctggggggcctccccactgctccccactccaccccacccccagctggcaagattggagaggcagcagggattggttgctatgcagtaggcatctctgaaggagagcgtgacctgggtggaggccccagggagggcgctcccagggagggtggatggagagggcagcggaaggcagcagactttctcctgaactgaaattcctcccaagtctctgtattcaaaccctgcgggaacatctgagtcacctgccccactcctctgaaacctgagagaaaagccccatgtgatgagaggaaagaggaccctcaagaggaggtcagtgggacaaagccctccagcctctgcacctgacctccatgcacctcttcctaaaagatccctgagtcacccagacatggccttgaagtctaacctcaacccaccactgcaccctggagccactggccttgaacctacctaaggggaagcaatatcatgccttatattttctggggggaaaataatctcaatttcatttgtcagatcatatatgtggaattttgtctccaaaactatggtcaccttcccaccatttgcctcactcccactccagccactgacccccactcatctcttctgaggtcccctgtccttctctgaaggagcttgattcctgactgataacagatctcatccagggacctttatggcagagacggtggattcgagaatgcctatattctcatgctgctgcaaacagcgggtctccctccacattgccctccctgatcctaccacgcacaggaaaggattaatccatccctgtggtttgaagccaatgatctggaagtgggtggcaggacagggcctggactgtcaacgtcagcactgagtgccagccctcctccccatcccactctcgcctaaatacttcctccctgcaactcagccttattcttttccctccgacttactcccaggacacccaaactccattccagaccccaaccaggaacagatatgaccttcaattccagcctcggttcaagatcctgccagaggcaaggttggagagaggtgggaggggtaagtgggctggctgagatcccacagctgggaccttccaaaccttggcaggggggtggtgaggggtccccttctcggctttgaccacaccgagtgaactctattgcctgtgcacacacactgttagtcaccctgcatccctcccctaacttcactggtctgctgtccataaaacttcagctcaactcccagctctccccaccaccaccccacaacatatccctcagtccccaacccacgcccccagagtctctcaaaccatcagcctcaaaacttccaagaatctttattgaacttgctcagcatcaagcacgtgtctgaaggagccagggtggaaaaaaaaaagtgcccactggcgacagggagggccccagctggcagaccccccaaccacatcagaggagttttcatttct

SEQ ID NO: 1928 - DNA, 4001 bp, Homo sapiens
acacccagagcaaaacacatctgggagcctctgggactatctctgcctcacttccaggcccccaaaccccatcacatcccggcccagggaccatttccatctccaagctcatcccaggactctctctactggaaaccacttgagcctttccttaggatggcgttgccaagaggggcatctctcctcattcacataaaggcaccttatgtgctagaggcagccttgtcagggtgggtcctctggcctggcgagtcaatgagtcattttcagaggttgaccgtgagcaaatcttccaatggctggtgtcccactaagccaaggaggaacagaaatcattcggaagccaggacgcaagggtaaatttgaccaaaaaaaatttattgtacaattacccaccactggatttgactcagagaggacccccagagggtgtctccatcttccctatttattttcagcccttgagggcttcattgtagatcaaagccaaggcccccaggaaggtgacatactcctggaagttcacctcctggtccttgttccggtccaagtcttccatcagccttgcaatttcagcatcctgcagcttctaatgtgttagaatgtgaaatccatactcagtggtgatgacaaccctggattcttccccttccccctcccaggcaatcctctctgcaagtggctctgtgctccctcatcaccaaggacccatgtcactttggcattgcttctcctcagctacttctcagttactggtcctcatttggagagatggatatccggctggaagcatcccctacccgctgggagagtgggtctacagctcagggtctacatgtggaccagggcctcagaatgtgggtaaatgtgagtcagatgcacctggcacctctctctcccctaatcctgcttccaaaggacaagggtgggaaaaggggtcctggggaggaggccactcaccgagccaatggtgagctccttctggatcagctccttcagctccttcttgctcagggtgtgcttgtcaccctccctgccggagtacttgtggaagatggccacgaggaggccaatggcctgatccagggggcatgccatggctgagggctgggcttggagctggcagcagagggcctagtcagtgccatgggagcaaggacttctcacccacacaccccaataatgctgcctgcactagccccgcctcctttggaaccacccagtctcaggccacacacaatggcatcaggagacagcccagggcttgaaggggaaggagagagcacactagggccaaggcaagagaggtggcttaaggattctaagaagcatataggaacagtagctttgggcacagctgagaactgtccttcaggggatccagaagttgaggagtatggctgggcaggggaggggaatggaggctgcaaaggcagcttaaacacagcttcacagggccacacatggtggcaatgacacacccagggcactcccttccgcaccccaaaagagcacaccccattgcgatcccttagcccaaggcctgcctggcacagcactgctgctcctgactatccctccagcgggggagcgccacagatggccccagtctggatccagcggctgaactgggcaggggatggctggacccccagcgtgagggcagctggccctggaaagtacccagggctcctggagagaactcaccggtagggaggcggccaaatgcgacgcgagcggtcgaggggatgggctgtgtcgcagtccgactggccttatagcggtcggtgccccggaggccagctcggccaagcccaccccgcccgcccaagtcccgcccgcgccccaccctgcgccgtggcttacacaacgcacattcgcggtttaccccctcgactttccacgcctcctgcccggggctgttccgggttaggacgggatgggggagcccagcagtgcccactgcacgcctggtgacgagtctcccctcatctgcgcagctcagtttgctcagtttgctcttcgtgacacgtgactcggcaaggggagcaggaggaggactgcggcggtcacccctgcttcctctgccagaccgtgaatgtgaccctcgagccagcgcagcgtcaatgtgggcaaggagggcgcctcacaggatgccggtgtcccacagaggatactcagggtcaccccagaggagatagggggagtagccagtggtgtaaaggatatctacggcgcccatcccccaccagcaacaagttcctaccaacacctccactccttcccctcagtgccccaaattccattcactacagcacctttggtgttaatgtgcatgcacgtgggagcccagccctgtaagcaccattcgttatttacgggggagtgaaggccttttcagaccctcccctgagaaaagattttgatggaggaggcagggagagaagaaagcactgtcccccatagatgatgagagtggtgctattgaaggggaaatggtgaagagggagggggctggtgtggaggccagacatgcccttcctacaggtgctgccaaggtggcctccggtgagctgtggacaagtcaggcctgcctgcctatcaccgccctcaggagccactcccaacccctcccagtgtcctcctctcaaagcaactttccctcttaacttcctctgcatccttgcagagttcccgcctggcctaacttccccattttccaggcaggcaaaactaagccatgacaaaaccaatgacgtccacaccaaagaaggagaggaatgcagtgggagcccaggaccctaacccccagaggcagaagctgtctcaacccactcaaggagagacccttcctgtgctcccctctccccaggccaaggtagacaagacagcttcaaaaccagactcccagcacctgcgatggaaactttatttcctcccatggaagggtccatctgggagggagaggagggcagggggccaaagagggtctgtgagaggagcagccgaggtcagcagcaaagggtggagggtgagggtggagggcagccctggtcacttgttgtcctctagaaagaagtcgttgtaggccatgcacagcatggtcaggaacaccgagtactccttgaagtcgatctcctggtcgctgttcttgtccaggctcttcatcaagtcatcgatgctgctctccttcatcttttgtggacccaggtggagagacagctcagaccccgctcccagccctgccctcgcaccactgcatggtgtcatccccaccccgaaacttcagggtgagccccagctgagtcaatgacactgtcagcatctcgacccccagagtctgcccactgcccacacctagggaagggcctggcatgaggtagggggtcagggacctgactcctgaatggaaataaatgacagcaggaatgctagcctagcctgccttccctgcaatactgtcccccagccaaagaaacaatcatctaggttttataccaacacctgataaaaacagcttgctgggtcaggtgtggtggctcacacctgtaatcctagcactttgggaggccgaggcgggtggatcacctgacatcaggagttcgagaccagcctgaccaacatggtgaaaccctgtctctactgaaaatacaaaattagccaggcatggtggtacatccctgtaatcccagctatttggaaggctgaggcaggagaatcgcttgaacttgagaagcggaggttgcagtaagtaagatcatgccattgcactccagcctgggcaacaagaatgaaactccttctcaaaaaaaaaaaaagaacaccttgctgattatgtggcattgagcattatccaagtctctgagtgactctctccccattctaaggactaggtgagaataaccccggacaaaatgtctctcaatgagagcagtgcactggggctgtgaagccactgcatccctcccctgctaggagagctgtgcaagaggcctgcctgg

SEQ ID NO: 1929 - DNA, 4001 bp, Homo sapiens
ttgctgaccatctaataacctcctttatatctgtataactctttcccattttcatacttttttgcctaccatccttagattcacatatgatccaagtaataaagccctatttgcaaatgggaaattttttaatcagagggtgagggtgatctgtccaaggccacatagcaaaatgtatcctccaacattgagaagctagacaccgactcacacaggcactaaggaagttggggaagttctccttcatcatcgtcagcaggcttggcttctcaatcttgtcatcacgtctggtgtatttgtgaaacatgtcgatcatgcctattatggacctctcagcttgagtgttgctcatctttgctttcaaaaagccttcaggaaataaagacaatcatttttttcccttcatttaagttagggtctctatttgggagtgctggaaggagggctgaggacagagtaaaaacacggataaggtgtagcagaacgaactcaatttttttttaatgtgatgggataagttgctcaaaaatgagagggtaggaccaagtctgagacctggcccatcctggccagggccaagaggagatgcaggtggatggcggaagtccagctgtggacagtgcttcagagagggagaagcagggagagtcgggcgccagcaacacatggaagaactaagctgggacaccccagcctcagccagcacatggcagaccccactcttaaaagagcaccaaatccatctcctccagcttcacagtcggggtgacagtcatgggggcaggacaatggccttggtgatctggtgtctgaccctcctcggctgcttcaggaaccagacaccgtgggccccaccttgactcaagtgcaagccctgcatgacacggtgtgtgcaggctccaggtgcacatgtgagcgtggacgtgagtgttagcaggaaacacagtcctgtcccgagcacagggggcccttcttgtattcccttgggaacgagaaacaggaatggcctctgttacaaggaacagaaataactctctggttcttaagctgctggacggggtgggagtgaggtgggagtcacttcatgtctgctcttgggaattatctgcaccctctgaatcaccaagccttgactgtttaaataaaaatgtctgacttcccaaagcagatctttcagccagtagtcagtctgggctggcctgcaccccaagcctgaaaaataggacagtgcagttctcacttcccacactttccaaagaaccaggaaaggaccttggctaatgcatatgggtgtctgacaataaacccccaacacctctcaatgcaggagaaagctccatgccggcaactgactaagaggagccacccagagcttttttgaatctgaggccaaggccagagggcaagccctgtgcccagagggtgactgacaatttgcaggttgtggtagggagtgacggagcgttggtttctcaataccttacccaggtaggggcaagccatctggccagggctatgctgtgtcggggtcccaggcctgggggtttggagagcctccaaagcattcacaggggacccctagccctccaccctctgtggagctggagctggggaggggatttagcaaccgggaccccaacaggaggatgaatccagggaggaagaggacagggagggtcctgtgctcaggtcccactggggacatttccacaggagttgcctcaggagatcccaaaggagcaatggacaggtctggttcagccacctggttatacagacgtgggcttttggggtcaagtgaaggtcacacagcccagctaatggcagagctggcctagacccaggcttctgagtctttgtccacagccctttcccttcctacaggcagcatggcaggccaggcactgggcacttctagaaaacgcaaagaggcaggtgagacttaccagagctgggaagcgtcacgagtagaaggatgagtgagatgtgtgtgtttggacaaagagcagtcctttataaggctcagcctggctcttcccaggggctgggaggcctggggccacctctgtcatctgtttcttggaggcttgccccacatcaggtgggtgggacacacccaggaggctgtgctcaggatttctggccagtgtcccaggtcaccaggtcccaccccaccccagagacctcacctggagtcttctctggctcaaccttgatttgagggtaaggcagcggtacatgtgtagtagcaggtcagaaaatgggagaaaagagcactgggcctctggacccaaagaggatggagtttcagactcctgaaggcagcatggtcttgtttgttccctccccttatccttccacacatttgttatgacagcctgttctatgacccccaccgctgactgagcattttaatgtctagatatcaagatacctgctgctcctgcatcctcctcaaccctcatagtcctaagaggtgcttcaatctctattttaggaaaggagaagttgagatgttcccaagtttactcagctagtaaacacaacaaatcattatatggactcagaaaagcctgaatcaaatccttactcttatcccctgtgctataggtcttgggtcacatcagggtctgccctatgggaactcaaagtccagggagggaagcagggttacttcattgctaaccattggtcagcccctcacagaagccctggaattaggtggggggactggggtcaggggcctcactatctaggttgagtggtggagtgacccccccatggaatgagcctggaggcagggagtgggaaaagttctttcctgccccatggcactaacttcccagaaagtcttcagtgtttttcctcctcctatgcaaaacagcctgtgtaggagttgggagttgtgcccttggctataatgtgccctaacctgctgtggaaaggctgacccaggtaggggcaagagggttgggaaggcatgggaatccctggggcatggtgaggaaagggagatgatgaatcactgaaatggactttttctgctacccccttgcaatgttccttttagggtgcaagagagttccaggttcatttagtgccagccctttaagcactctggggctccacagagctgatgtgatgtctccctaggtgggacctattttctccacccatcatctttcttcaacttccttctcgtcagtacctatgtaaccagggggacctgtttctccctctcccagttccccatgtgatggcaatattacttttaacagcaaaagatacatacacacacacacagtggaatgctactcagctataaaaaaagaatgaaatcacgctttttgcggcaacatggatggaactggaggctattatcttaagtgaaattactcagaaagtcaaatactgtgcaacctcatgtgtaagtgggagctacatcatgcatacagatggaggtagagagtagaatcatagacactggagactgtgaagggcagcaggtgaggcggtgggtgaaggatgagacatttcttagtgggtacaatgcatgctatttaggatggcttcattaaaagcccagacttcaccattgtgccatatattcatatatatgtgtatgcaggtttttgtgtggacataagttttcacttcttttgggtaaatcccaaggagtgtgatttctggatcctatggtaagagtatgtttagttttttaagaaagcactaaactgtcttccaaagtggctgtactattttgtgttcctgccatcaatgaatgagagttcctgttgctccacatccttcttcagcatttgctgttgtccagtgttccagattttgggcattctcataagtgtgtactggtatctcattgttgttttaatttgcatttccttgaggacatatgatgtggagcatcttctgatatgcttatttgtcaccttctgtatcttctttgatgagatatctgttaaggtctttggcccattttctaa

SEQ ID NO: 1930 - DNA, 4001 bp, Homo sapiens
gtttcagtctcacagagagagggtcagtgagcgctgggaggggactgtgcactgtcctcaagctgcacactttgctgaccatctaataacctcctttatatctgtataactctttcccattttcatactttttcgcctaccatccttagattcacatatgatccaagcaataaagccctatttgcaaatgggaaactttttaatcagaggatgagggtgacctgtccaaggccacatagcaaaatgtatcctcagccatgccagggtccaaccaacattgagaagctagaccccaactcacacaggcactgaggaaattggggaagttctccttcatcatcgtcagcaggcttggcttctcaatcttgccatcacgtccggtgtatttgtgaaacatgtcgatcatgcctattatggacctctcagcttgagtgttgctcatctttgctttcaaaaagccttcaggaaataaagacaatcatttcttaccttagtttgaattaaggtctctatgtgggggtgttagaaggagggctgaggacagagtaaaaacagccctaagatggagcagaaggaacttgatttttttaaatgtgatgggataagttgttcaaaaatgagagggtaggaccaagtctgagacccggcccatcctggccagggccaagaagagatgcaggtggatggcagaagtccagctgtggacagtgcttcagagaaggagaagcagggagagtcggaggccagcaacacatagaagaactaagctgggaccccccagcctcaaccagcacatggcggaccccactcttgaaacagcaccaaatccatctcctccagcttcacagtcggggtgagagtcacgggggcaggacaatggccttggtgatctggtgtctgaccctcctcggctgcttcaggaaccagacaccgtgggccccaccttgactcaagtgcaagccctgcatgacacagtgcgtgcaggctccaggtgcacatgtgagcgtggacatgagtgtgagcaggaaacacagccctctcccgaggacagggggcccttcctacattcccttgggaatgagaaacaagaattgcctctgttacaaggaacagaaataactccctggttcttaagctgctggatggggtgggagtgaggtgggagtcgcttcatgtctgctcttgggaaatatctgcaccctctgaatcaccaagggttgaccctgtttaaataaaaatgtctgactttccaaagcagatcttccagccagtagccagcctgggctgccctgcaccccaagcctgaaaaataagacagtgcagctctcatttctacactttccaaagaaccagaaaaggaccttggctaacgcatgtgggcatctgacaataaacccccaacacctctcaacgcaggagaaagctccgtgccagcaactgactaagagaagccactcaaagctttctgaatctgaggccaaggccaaggccagaggccaagccctgtgcccagagattgactgagaatttacaggtccaaggcctgggggtttggagagcctccaaagcattcacaggggatccttatccctcctccctctgtgggggcagagctggggaggggattcagcaactgggatcccaaaaggagaatgaatccagggaggaagaagacaggaaggaaagggagggtcctgtgctcaggtcccactggggacatttccacaggagttgtctcaggagatcccaaaggagcaatggacaggtctggttcagccacctggttgtacagacgtgggcttttggggtcaagtgaaggtcacacagcccagctaatggcagagctggcctagacccaggcttctgagactttgtccacagccctttcccttcctacaggcagcatggcaggctgggcactgggcacttctagaaaatgcaaagaggcaggtgagacttaccagaactgggaagtgtcacgagtagaaggatgagtgagatgtgtgtgtttggacaaagagcagtcctttataaggctcagcctggctcttcccacgggttgggaggcctggggccacctctgtcatctgtttcttggaggcttgtcccatatcaggtgtgtgggacacacccaggaggctgtgctcaggatttctggccagggtcccaggtcaccaggtcccaccccaccccagagacctcacctggggccttctctggctcaatcttgatttgagggtaaggcagcggtacatgtgtagtaacaggtcaggaaatgggagaaaagagcactgggcctctggacccaaagagaatggagtttcagactcccaaaggcagcatggtcttgtttattccctcccccagtacttccacacatttgttgtgacagcctgttctatgacccccaccgcttactgagcgttttaatgtctagacatcaagacacctgctgctcttgcatcctcctcaaccctcccctcatagtcttaagaagcaggtgctgcaatctctattttaggaaaggagaagttgagatgttcccaagtttactcagctagtaaacacaacaaatcatcacacgaacaaagaaaagcctgaatcaaatccttactcttatcccctgtgctataggtcttgggttgcatcagggtctgccctatgggaactcaaagtccagggagggaagcaggattacttcattgctaaccattggtcagcccctcacagaagccctggatttaggtggggggactggggtcaggggcctcactatctaggttgagtggtggagtgacccccgccccccccgccccatggaatgagcctggaggtagggagtgggaaaagttctttcctgccccatggcactaacttcccagaaagtcttcagtgtttttcctcctcctatgcaaaacagcctgtgtaggagttgggagttgtgcccttggctataatgtgccctaacctgctgtggaaagcctgaaccaggtaggggcaagagggttgggaaggcacaggagtccctggggcatggtgaggaaaaggagatgatgaatcactgaaatggactttttctgctacccccttacaatgttccttgtaggccgcaagaggtcctggttcatttagtgccagccctttaagcactctggggctccatagagctgatgtgatgtctccctaggtgggacctattttctccacccatcatctttcttcaacttccttctctgtcagttcttatgtaaccagggggacctgtttctccctctcccagtttcccatatgacggcaatattacttttagcggcaaaagatacacacacacacacacacgcacacacacacaaacacacacacaaacgcacacatacacacacacacagacgaatactactcaaccataaaaagaatgaaatgatgacttttgcagcaacatggatggaactggaggctattatcttaagtgaaattactcagaaaaagaaagtcaaacactgtgcaccctcatgtgtaagtgggaggtacatcatgcatacagatggaggtagagagagagtagaatcatagacactggagacagtgaagagcaggaggtcaggtggtgggtgaaggaggagacatttcttagtgggtacaatgcgtgttatttaggatggctgcattaaaagcccggacttcaccactgtgcaatgtgttcatatacatgtgtatgcaggtttttgtgtggacataagctttcagttcttttgggtaaatcccgaagagtgtgatttctggatcctatggtaagagtatgtttagttttttaagaaagcaccaaactgtcttcccaagtggctgtactattttgtgttcctgccatcaatgaatgagagttcctgttgctccacatccttctttagcatttggtgctgtcagtgttccagattttgggcattctcataagtgtgtactggtatctcattgttgttttaatttgcatttccttgaggaca

SEQ ID NO: 1931 - DNA, 4001 bp, Homo sapiens
accaggctcagaattacccaataaaaatagtgaattcagctcccagagatgagtcctcagacatgtcacaatgcacaggacctgtccaagaatcactactccattgccccgcacaaatataaaagctctcccagccaagggcgggcagagtccccactcacacagccactgaggaagttggggaagttctccttcatcaagttcaccagacctggcatgtccatcctaccatcatctccactgtattggcgaaacatcgcgactatgtccaacatgactttctcacctagagggatattcatctttgctttcaaaaagccttcaggaaataaaaacaatgattgttttccttctctagtgaatgactgatattaagaagatgagaagggattgaggagcaaatgaggacgaggctaaggtggaccagagaaacctgtgtttctctgtgtggtgggataaattgcttccaaagaggagggtagagccatacctgggatctgggctcacacaggccggggagcaacaggagaagaggagacaagcagaagcccagctatgggccgtgcttgtgagagggagaagtagggagagatagaggccaacaacacgtggaagaactaaaccctgagcagggacccccagccacagtcagcacatggcagactccactcctcaaacagcaccaaatccatctcctccagcttcacagccagggtgagagtcacaggggcaggacaacggccttggtgatctggtgtctgaccctcctgggctgcttcaagaaccagacaccgtgggccccaccttgactcaagtgcaagccctgcatgacacggtgcatgcaggctccaggtgcacatatgagcgtggacatgagtgttagcaggaaacacagccctgtcccgaacacagggggcccttcctagaccctcacaggaatgtgaaagaggcacgggtgaccatagctagcctctgttaaaaagaacagaaataactctctggttcttaagctgctggatggggtgggaatgaggtgggggtcccttcatgtctgctcttgggaattatctgcaccctttaaatcaccaaggctggatgttatttaaataaaaagttctgatttcccaaagcagatcctccagccaatactcagtctgggctggcctgcaccccaagcctgaaaaataggacagtgcagttcccacttcccacactttccaaagaaccagaaaatgacatttgctcatgcctgtgggcatctgacaataaacccctatcacctcccaaagcaggagaaagctctgtgctggcaactcactaaaaggagccatctaaagcctttttgagtctgaggccaaggccaggggctgagccctgtgcccagagggtgactgagagtttgcaggttgtagtagggagtgagggagctttggttgctcaataccttacccaggtaggggcagatcatctcaccagggctatgctgtgtggaggtcccaggcctgggggttcagcaagcctccaaagtattcttaggggactcttagccctctgtgggggcagacttggggaagggattcagtaccccagaccccaacaggaggatgaatccaggaagaagacagggagggtcctgtgctcaggtcccactggggacatttccacaggagttgtctcaggagatcccaaaggagcaatggacaggtctggttcagccacctggttgtacagatgtgggctctcgggctcgagtgaaggtcactcagcccggctggtggcagagccgggcctagacccaggctcctgagtcatcatccacagccctctttcctcctataggagaaagtgaatggtaggccagacactgggcactgctagaaaaggcaaataggcaggtgagacttaccagagctgggaagcatcacgagaagaaggatgagtgagatgtgtgtgtttggacaaagagcagtccctttataaggctcggcctggctcttcccaggggctggaaggcctagagccacctctcccatctgttttttggagctttgtcccacatcagatgggtgggacacacccaggaggctgtgctcaggatttctggccagaatcccaggtcacctggtcctacaccacccccagagatctcacctggagccttctctgttccaacctaatccaggtctggggcagccagtggatgtgtcagattaggacaaggaatgggggagagaacactgggactctggatcaaaagaggatggaatttcagactctagaaggaagcatggtctctgttcatacattcagttcttttacctttgagatacctagaactctcaccaccacttacccagcattttgatcttcccagcctcgagatccctgctgtacatgagtttctctttagtcctcacaaccctctgaggtaggtgctgctatccccaattaaggaaagagggaattgagatgttaagattaaagaaacaacccaagtttactcagctaggttccctcagccatcctgagctgagacatggacccattcacaatgaagagtaaagcactcactttgctttatgttgaagatataacagtacatttttttaaaaaggggtgggggactcagctcacctcaggatgctcacactttagaagaaaagaagaaacagaggctgagcagggtgactcatgactgtggtcccagctacttgtgaggctgaggcaggaggatcacttgagccagaagtttaaggctactgtgagctataatcatgccactgcactccagcctcaaggaaagaatgacaacctgtctcaaaaaaaaaaaaaaagaaagaaagaaaagaaaaaagaaagaaagaaaagaaagaaagaaagaaagaaagaaagaaagaaagaaagaaagaaagaaagaaagaaagaaagaaaacatagaaaaagaataaaatagaatctgtagctgctaaaagatgtacagtgaggctgtgtcgaccccaagaagagagcagcaactctggggaggagaggtggacagaggaaaatccagctggaggtggtgcctgagtgtaggctgacacctcctgatcatcagccaaaggaagtgaaaaccaacccagatcccagccatgaacaaacgctcaagggcagaaaaacacataatgtcaggactgagacaactgtaactaaaaaagaaaagaaaatcataaaaatttaaaacccatatttcgtgcctgggtatgaggagaaggatgcatggggctggcactaataatgtggccaactcagtacccagaccgttttcagagctcaatgctccccagttttgcttcagtgtttatactgcccagggccaggaggtgagtcccgcatggtcggagccactcctgacagtcctgttcctgctctgcctgcctccctggcaactacgactgatcgtgtgtcccactcagttccagccaaggaaactaagttctgctgggtagggcacctgggaactctgttttcctggctgaaggggactggggcagttggggacaggaacagctggcctagccctgtgctcctcccctgcccccatggcagggaccccggtgctgggcatagagcagtctatcagatattattagctctgatcaagtccctgtgcaagccctgcatgtcacacgtgcatgccctgcatgtcacacgagccctcctctggctcctagccaagaacaatagcattcatctggccttcaccctgtcctctgctctgtcacctgctccatgcaaggattcttttttttttttttatactttaagttttagggtacatgtgcacattgtgcaggttagttacatatgtatacatgtgccatgctggtgcgctgcacgcactaactcgtcatctagcattaggtatatctcccaatgctatccctccccgccccccaccccaccacagtccccagagtgcgatattccctttcctgtgtccatgtgatctcaatcttcaattc

SEQ ID NO: 1932 - DNA, 4001 bp, Homo sapiens
tcttgtcaaaaggttccccttcattttcttctttttttaatgtccacctcagagaagaaccactcgtcttctggccttccccttgtaccagcccttgggaagtattttttagataattttctgatcaccaaagcatagaatcccatagggcagcgtatgaataacctattctttgacttaagttttactaatttattttcctatttgcctattcctttatcatttaattgagttgggagtttgggagtggagagggaggaaaaattttcaaaatccccaaggacaaactacaggtatgtggacaggtgtgaggattatcctgttaatggaggactctgaacattgtccacctacatcacaccacacacacaatcagcctctccccccttccctctcttgctctctttctgtctgtctctctctcacacacacacacacagacacacacacacacacccacacacttctatgtagctatcactctaatttcccaagagccacatctaagacatttagctggaagctaaaatttagcttagagaacagtatcagttgttcttatactaccaccctgttcccaaatccccgacccatttcagaaccactagtaaaatcatcagctatagtgtcatggactttttggaatccttaagcctcaaatccaatggctcaagatggaggggctggaagggaatgtggggcagaggccaggtgaggggtaaagcaggaaaggcttgtgagaggtagggtgggataacatagatttctttttcttcctttgggttttccaaccctccctccacaccgaggaacctcattccacaaaagcataagagagaggcatgaggtattgatgactttattattctgcaggtacatgtccaggggcccagcctctgggcccagtaactcagctactctttgtggctttcttcatggctttttttgtgggctgccacgcccatctttatcaccagaatgaggaactcctggaagttaactgcaccatcagtgttgatatccaactctttgaaccagacgtctgcaccctttttctgtcaagattgaggaggaagaagccagagtttaaagatctcagagagagccgaggcatagccatctatgaagggtggcagggaggaccgctggcccagggcagccccaggaccaggcagagagcccccgccacacccagcccctcctcaccctgatatactgaggacactcggtctctagcaatttcttcaggtcatccctgtagacggcatggaaattcccctttatcagggagtacttgtggtagacgtcgatgatagagttcaaggctttctccagctcggtcaacatgatgcccacggacttgccccacctgaaaaacagaaccttctggggaatcccatggcagggaatttgcatctggccagggcagtacgcagaggattcatgccccaagcgatggccttgtcctggcctgcactctccaaataaccaaaccagcagatggctatggctctggtgggaagggtgggatgatagggatacacgtgtgggaaggggaagggtccattcacacagagacatgtgcacacacacggggcccgtagactttccttaccaccccaccctctgctcaagaaaagtccagcctaggagacaatgtgcccttacccactggaaggtgctggaggatactctccttccttatccctgcctcactccccacctccaggagtatctttgctccagacctccctgagctttctctctcctctctcaggaaggctgctccacttccctgaccctccccaagagaagcccaaagtgcggggccaacccagacagtcccacttaccaggtcttctgaaagacagctgacaagagacatgcagggctgagaggcagctcctttttatagcggttaggcttggccagctgcccacagcttcaggccatcagagacagcttctccctgccagagttgctacagtctctggtttctcaaccaggtgaatgtggcaatcactgtgcagaatgaaaattttgggtggggaggtaggagaagcggaaagaggaaggcatttgctgggcaatagtgcccagaaggaaaaagcaggtaggggggctctttttctgggctgctggcatccacttgcttgatccagccagattcccactcccatgccctctccactattgcgattgctaatcccctgcattggtggtcaggccatacatccctgaaactgaattgaagttgaatgcatcattttgagtgcatgcactcagtgagaacattcctccatggcttctgtcagagtttcaaagggtccaaagaccgcaaaagggttgagaacacgtgtcctggctgatggcttttagtcatgagaactattgttctcattactaaaaactaaaactatcgttgttgttcttttgggtgggtgctttgtggggaaatgtgttgttgccaagggctatatccattcctaccctgctgcccacactcctccacagctttcctgttctgtgaagctggggatggaccatgccctgggagatggaggctgcttggggtccctcggcacttcacaagggcctgagccattgcataaacacagcagggagcctttcaccctctcttggttaattattgtgtctgggaccccaggatcactggctgaagagaggaagctaactctgaggtagtggaggggaagagttctttggagaagccagacgcgcttcatgcctaagaggagaagaggaggtggccaattccccaggatttcaggaggaacaaatcctctccccaccactaacaaaatgctactcagattaactggcttccaaccttgaagactgtggtgtgtttctgttgttacaaagaaaatatttgtaaaacaaatatctgataagggattaatatccagaatataaaagaatccctacaactcaacaacaaaaaacaaacaaaccaatcaaaaattggggaaaagactcaaatagacacttctccgaagaagatatacaaatggtcaataagcatatgaaaattactaatctttaggaaaacatgaagcaaaacgacaatgagataccacctgacacctacaaggatgactactacttcttttaaaacccagaaaacaagtgttggtgagggcatagagaattggaagcctaatgcactgttagtgggaatgtaaaatagtgcagctgttatggaaaacggcaagtttgttcctcaaataaataaacacagaattaccatatgatccatcattctgctcctgggtatatatgcaaaagaattgaatgcagggattcaaacagatgtttgtacattcatgttcatagcagcattatttacaagagccaaaaggtggaagcaacccaagtgtccctcaacacatgaatggatgaagaaaatgttttgtggggacatgtgttgttgccgagggctaaatccattcctaccctgctgcccacactcctccacagctctcctgttctgtgaagctggggatccaccgtgccctgggagatggaggctgcttggggtccctctgcattgcacaagggcatgagccattgcataaacatagcagggagtctttcaccctccaaaataaatccagctctctctggatgtgagccattggggacccagcacagtgcccagcacacacaataacagcagccacaatcactgatcagagcaaatcatgacaaaatactagttcacactcactgagcttttcccatgtccgggaactattctaagtgctgctttatttgcattgatcatttaattctcacactaatccaatgacgtatgtactattataatgcccattgtacagatgaggaaactaagccccacagagagacatagtaattcagcgtatcaaatgattgagtgactcatgatgtgatgtgacagcatccacttcctattcctgcctgtaatgccttttgtccctgtaatgtcctcctcacca

SEQ ID NO: 1933 - DNA, 4001 bp, Homo sapiens
tagccaggcatggtggtgcatgcctgtaatcccagctattctggaggctgaagcaggagaatcgcttgaacccaggaggtggaggttgtggtgagccgagattgtgccgttgcactccagcctgggcaataagagcgaaactctgtctcaaaaaaaaaaaaaaaaaaaaaaaaaggagagacatcaggggaggtggaagacccagacccaggcggggtccaagagagcactggttggttccagctctgccaccctctggctgagtcacctcgctaagtcccctcccagaacctgtggggtacccagccaatgcgagcactctcctgtgcagcccatccatgaggctctgcttcctttcccacagcatcgctttgcttctggtgggggatgtcaggtggggggtgaagcgggcatagggggtcacatggaggatagttttgccatgcggcctctctgctgggccctttcttgcctaccccacccagcatcctgcctgcctgaggcctccacctatggagagctgtcagggcccctaactctgaaggctgcaattctccaccttaccaaggcggagggaggggcactgggagggctggggacctaccccaggatgtctggctccgggactggaactgagactgagacccatgtgttccacccttcttaatgcaggcctctgtttcccgactttccccaaatttgaaaagaaaacaaaaaggctgttggaagtgctcagcctttttcttagaactgcctaatcatttttggagcgggggaaaaacctcccagttccctgagtgctgtgcaggtgctctccatgtgctctttatgcattcattttccaccgcagacccttaggattagaaaagcccccaagtcttccaccccaagttcccgcctgaggcttagggtctcctcagctttgtgccaagtgtcatcctcaggggcttccctccccaacattcggggctcagctcaaatgttacctcctcaaagaggcccttctcatgtaccctaactggtcacctccaccccacccagccccattgcccacagcgcactctatctcattttcttccaggcacttattggcatttggctttatctgtgctctttattggccaacaactttactgtgtgtctccctccactggaatagtgggctccccatttaccactacatccctctgcccagaacagggcccgacaaatagcaggtgttcaattgagcaatttcttgaccctgtcgtcctgtgtaactgtgagcacctgccctgtataacaggacactcgctgcgtcttggggctgggctccaggagctcaaatcttccccttgattgctgtagcccatactcccatcctcccttgtcaacccaaactgcggtgaggctgggtcagacctgccagagtccagccctaccttgagaaaattttgcagatcttttcgcaccagctctttgaattccccctggttcagggtgtctgggtgccccagcttcacagagtattggtggaaggtgttgatgatggtctctatgttgcgttccagctgcgacattttgcaagtcatcgtcttgcactctgtctgtgtaatggaaaaccaagagttgggacacttagaagaaaatgctgtcaagcttctttgacacttcctactaagcactcacagaaatagtgggggaagtgcaaaataaaaagaaagcacaggctgcaacttaactgggagatggcctgtcacacacatgtacaaaatgattttttagaatatctacagagtgccaaaaagcaaagcatttgagggcaggaggccccaggggaacatgacctaagaaaatgtgaaagaagctttaaagtaggcagggccaaccaaggagggcttctaggaggaggatttggaaggaagttgggtcagggaaggaaagaaggaatcggcaggcaggcttctgcctggggaagctggcagctcacttaccaaagccgaggagccacacagagtgtttgccagagctgtgcaggctcggcatttataggcagctcctgactggggcacttggccctttggccctgtctccggaagattgcttcacaggtgagcagtgtggtaatgctgccaggaagggggctggggcggggcaggaaatgttcacagagcgccttctgcttttttgtgaaattcccagccctggcctgaaactggtttgggaggaagctggttgtttagttcatttcccttctatcctaaggccctactctccccgagcgagcctgctgctcctctggcaccactcagccccccatcccctttgaggttgaagcaggctgaggacctatgggggcctgaccctctcggctgccccccatgggcagtctgccccttccttttagtccaacaaggatggtctgagctctcacccatgcttgcctggctctgtgatacttaggatggcgaggggttggtgttcttagattcatagggtgagatttggggttagaagggttctcagaggtgggcaaccctcttgcattgtagatgaagaaactgacacccggagatggacctgagcaaggtcacatagctggttgctgacttggcaggaaggggacccagctattctggttcctggttaagggcaattctgatgataccttcctcttgcagtctgagtgagagagcctcagggcgaatatgtttctagcatctctcagcatcatttttctaaatcctgctcccagcaagggttccaggaacttataacttgggagacaactgtttttacttagcctcctggtgggcaagatgtgtccttctcctgctacgaacctccagttgctccccattgcctatggagaaagcttggcttagccctgcgcacaaagccctcttggaatggccctgcctgtccggccagcttccctttcactacctccctgcccactgtgggaacacagggcccacctcccaccttgccaccccaggagtgcccttcccctactccacagtgatatcctgcccgcccccacggctcagttctaatgcactctcttccaaggagactgctctgtgcttcccatttggaaacagtttctgtcttcctgactatgattctcataccacttctggctctcaacacttgctttcctggagtaaaattatatacatattttgcctctgtccaacaattggctgtagatcctcaaaggtaggttctcattcatgttctccttctcctatgcacacagcccggggcttggcaagagagacaccctcggatttgctgattgatccttgctgaagtccttgctggcatcctttcccgtcacccctggaagccagtatggatgatccaccctgggactccctcttgcttgctgccccctctctctatcaggaaagatggttctcttcttctacctgcactggttattttgttctgtctccatgaagccttcctttattgccccagcccctcctgactgctttgtcctctgaaagcctgaggcaatctctgtgtgtgctaagcattggccctaagcatggcctgcctcacactgctgagatgcacctggagtagtggttaagacttcagactgtctgtgtgaccttaggcagtttacttaacttctctgtgccttacttttcttatcaataaaataggataatatcaggacttaccttgaggattgcgacaatacatggaaagttgggaagagctcagtaaataaaaggtattattactaataatcttttcattcatttatgcaacaaatatttgttgagcacctactgagtgccagatatgaatgctagatgctgggagaacttgatgagtgagtcgcaatacaaaggggagacataatcttatatcctgtcttccaaattacgttttaaactcttggtagctaaggacagggcttggcacagtgctaagcacacagcaagcatctaataaataaatgagtgcttgaatacatgagtcgcctacgaatgaatgaacggtgc

SEQ ID NO: 1934 - DNA, 4001 bp, Homo sapiens
caggcgtccaccatgctaggctaatttttgtatttacagtagagatggggttttgctatgttggccagtctagtcttgaactcctggcctcaagcaatcctccggcctcggcctccccaagtgctgggattacaggcgtgagccaccatgtctggccatatcccttcatttttaagggaagaatatttttccgatcttctaattctatttcttagttcctctacaccccatcctttctgtgaccccattctgtccttccacatctctctcacctgtccacccccttcttcacacttcagtttaccaccccctctctgttctcgaacctcctggttgcaacctcagaaactggttccctttctatttttatctcacctcagaaaacctactgccttcgagcacaaagccttactttattgaggccactaaaactgcaacaccagatgcaagcccacatcctctttcaagctctaaagtcaagaccattaccaagcagggtctgacaggtacagccaagagcagagattatttccagtggacaagacttccccctggcctttgatttccaacctttcccaaatgcaatacatgtgaagcacacagcacgaaacgcactcagcaggctttatcactccataaaaaataggcacaacatttacaaaaaatcaaaaagaactgaaattatctgtaacagttttgcaaattccttcgaagtaactaaaaacactgcaggacggaaaaaacaacccagggctgcaaatctttgctttaggtaacatttcactagatgagggtgccaggattctcctcccacatggacacagagaacagatgcgctaagctgcagcaacaggtttcttttcaaaaagaaaatgtgctttaaaacacttcaggcaggtctggtagagcttggagtccctaataaatacacaaaacaccggagatcaggttagggcaggccgtgggcaattcaaccacttctaggacctttccagggcccactgaggtaataactgctttccctcttgccctggaagtaactggtgacgccgcctccagcccttgaggagccggagaaagggtggcccaggcccaacctttggaggatactgccttggctctctctcacaaatgcaacggcccgggacggtgtcgccttccaggaagggcctttgcgtctccctcccccggggacaccgcgaattcccgcctcccggcggaaagcgggagaagcgagagttttctccccgcccctcccccagtaggggcaaacccgcccctcagcaggcctgtgctgtgcgctcctctcccggggaccaccgtcctcagatctccccagggaatgggtcgtcctcttcctgcccccacccgcgagacgcggcagaaaagcccgcggctatcttcccgccagcaacagcctcccgccgagccggccgggacagaggcggcccccacccccactgggcaggggactgcagacggcgctccccgactctcaagacgaccagggagcttcccttttcctcagcggggtgaggggcatctgtcgcccgccgacttggaggtggaggggcagggacattccctcgccatcacctcaggagctagaacgcgcccttctcgcagcagggcgtgggcctcccaatccctccaaggggcggacggcgtgcgcaaccccctggagaagcaacaggcgcccccatccccctccaagccgggtaacgccgaccccctcgtccctcccgctcttcacctccggaagccgggccaaagcctgggcgaacgactgcgcctcactccgccccctgcgccattttatcgccccctccccgacctcccctaccccgagtcagccgggccaacaccagggggagggcaaaccagcagtgattggcaggaaaccgtcccgcctctaggagggttgtgccccgctcaggcgcctcagccccgccctccgcaccgcccaccgtgcccactggctccaccttttcccgtctcatcgacctgctcgactctctgctgctcctcactttttccggccgctgccggaggggtccaggccgagtaagcggagcgccgagcccagctgatgcaacctggctggactcgcgtgacagttcccggcacgcggcggcgacggtgacccaggaaggggctctggtgccgggctgagcgggggaagcaggggtagcggagccatgggggacgctcccagccctgaagagaaactgcaccttatcacccggaacctgcaggtcaggcctgggggttggaaatgcgccgttggggattaggagcccgaggttcagtgattttgagccccattacggggttctaagtatgtggggccggggactcggcgctggcgcagctctgagagagcctgtagatctcactgctggtcggtcagtcaatcaagcagcccttccctgggttccccagaaatcacagtgggctcacctcttgcgtccagttgtcttgtgttggagccaaactttgaatccaggactcccattccacccccctattaagtgccagacgtggtgcttagtcgctggggatacgtcaagggcctgccagagcttgtctgaaggggatcagacgttaaaaatgacccattacggttcaagtaagtactggaagatgctatactgggagctttaaagggaaagagagaagggaaggcttccctgaggaagtgacctccaaactgcgccttgaaggaaatggatccccccccctcactccacaaatgttccgtttgttaccaagaactacaggagtagaagtgaaccagaggaagaatggaagaataaggagggagagcatttcagatggaggaaacagaaattgtggcaaatttagctggagtggagtgagcaaagttatgaggaagcacttaaatatttatattgcttaccccttaactttttcaggcttctgactgttgtcaccttatcagcgacgcatgatttccgaccactttatttaaataacaaaccctctggcaccagaactgccccataccttgctctgccttttttttgttattgtttctacatagtatacattttatttatttgtttaagagaggtaggcagggaccaagtcacgggagccttgcaggccttattctgttcaattttaaattgggcttccttctaagagtagtgataaatcagttgggccacacagcctgttctgttttttctttttagagatgtacttcacatactataaaattcacccttttaaagtgcacaattcagtgggttttagtatgttcacaaggttgtgcaaccatcacactatctttttttttttttttttttttgaggcggagtctcgctctgtcgcccaggctggagtgcagtggcccaatctcggctcattgcaacctccgcctcccaggttcacgccattctcctgcctcagcctcccgagtagctgggactacaggtgaccgcccccacgcccggctaattttttgtatttttagtagagacggggtttcaccgtgttagccagggtggtctcgatctcctgacctcgtgatccaccctccttggcctcccagagtgctgggattacaggcgtgagccacggctcccggccacaaccatcacactatctaataaaacttgcacccgttagcagacgctacctattacccactactcctagccttagagaaacactaatctactctctgtctccaggtatttgcgtattctgggcatttcctgtaactagaatcatacaatatgtttgttgtgtctgactttttgcacttagcataatgttttcaaagttcatgcatgtatttgcacctagcagaacgtcattcctttttatggttgaatgatactctgttgtatggatatacattttgtttatccgttcatcagttgatggacatttgggttattccatttacaacttagtcttaaccaaaggtttttgcacgcttcccctagctagattctttgtttcctattctc

SEQ ID NO: 1935 - DNA, 4001 bp, Homo sapiens
gatctgggctcactgcaacctctgcctcccagtttcaagcgattctcatgccacagcctcccagtagctgggattacaggcgtccaccatgctaggctaatttttgtatttacagtagagatggggttttgctatgttggccagtctagtcttgaactcctggcctcaagcaatcctccggcctcggcctccccaagtgctgggattacaggcgtgagccaccatgtctggccatatcccttcatttttaagggaagaatatttttccgatcttctaattctatttcttagttcctctacaccccatcctttctgtgaccccattctgtccttccacatctctctcacctgtccacccccttcttcacacttcagtttaccaccccctctctgttctcgaacctcctggttgcaacctcagaaactggttccctttctatttttatctcacctcagaaaacctactgccttcgagcacaaagccttactttattgaggccactaaaactgcaacaccagatgcaagcccacatcctctttcaagctctaaagtcaagaccattaccaagcagggtctgacaggtacagccaagagcagagattatttccagtggacaagacttccccctggcctttgatttccaacctttcccaaatgcaatacatgtgaagcacacagcacgaaacgcactcagcaggctttatcactccataaaaaataggcacaacatttacaaaaaatcaaaaagaactgaaattatctgtaacagttttgcaaattccttcgaagtaactaaaaacactgcaggacggaaaaaacaacccagggctgcaaatctttgctttaggtaacatttcactagatgagggtgccaggattctcctcccacatggacacagagaacagatgcgctaagctgcagcaacaggtttcttttcaaaaagaaaatgtgctttaaaacacttcaggcaggtctggtagagcttggagtccctaataaatacacaaaacaccggagatcaggttagggcaggccgtgggcaattcaaccacttctaggacctttccagggcccactgaggtaataactgctttccctcttgccctggaagtaactggtgacgccgcctccagcccttgaggagccggagaaagggtggcccaggcccaacctttggaggatactgccttggctctctctcacaaatgcaacggcccgggacggtgtcgccttccaggaagggcctttgcgtctccctcccccggggacaccgcgaattcccgcctcccggcggaaagcgggagaagcgagagttttctccccgcccctcccccagtaggggcaaacccgcccctcagcaggcctgtgctgtgcgctcctctcccggggaccaccgtcctcagatctccccagggaatgggtcgtcctcttcctgcccccacccgcgagacgcggcagaaaagcccgcggctatcttcccgccagcaacagcctcccgccgagccggccgggacagaggcggcccccacccccactgggcaggggactgcagacggcgctccccgactctcaagacgaccagggagcttcccttttcctcagcggggtgaggggcatctgtcgcccgccgacttggaggtggaggggcagggacattccctcgccatcacctcaggagctagaacgcgcccttctcgcagcagggcgtgggcctcccaatccctccaaggggcggacggcgtgcgcaaccccctggagaagcaacaggcgcccccatccccctccaagccgggtaacgccgaccccctcgtccctcccgctcttcacctccggaagccgggccaaagcctgggcgaacgactgcgcctcactccgccccctgcgccattttatcgccccctccccgacctcccctaccccgagtcagccgggccaacaccagggggagggcaaaccagcagtgattggcaggaaaccgtcccgcctctaggagggttgtgccccgctcaggcgcctcagccccgccctccgcaccgcccaccgtgcccactggctccaccttttcccgtctcatcgacctgctcgactctctgctgctcctcactttttccggccgctgccggaggggtccaggccgagtaagcggagcgccgagcccagctgatgcaacctggctggactcgcgtgacagttcccggcacgcggcggcgacggtgacccaggaaggggctctggtgccgggctgagcgggggaagcaggggtagcggagccatgggggacgctcccagccctgaagagaaactgcaccttatcacccggaacctgcaggtcaggcctgggggttggaaatgcgccgttggggattaggagcccgaggttcagtgattttgagccccattacggggttctaagtatgtggggccggggactcggcgctggcgcagctctgagagagcctgtagatctcactgctggtcggtcagtcaatcaagcagcccttccctgggttccccagaaatcacagtgggctcacctcttgcgtccagttgtcttgtgttggagccaaactttgaatccaggactcccattccacccccctattaagtgccagacgtggtgcttagtcgctggggatacgtcaagggcctgccagagcttgtctgaaggggatcagacgttaaaaatgacccattacggttcaagtaagtactggaagatgctatactgggagctttaaagggaaagagagaagggaaggcttccctgaggaagtgacctccaaactgcgccttgaaggaaatggatccccccccctcactccacaaatgttccgtttgttaccaagaactacaggagtagaagtgaaccagaggaagaatggaagaataaggagggagagcatttcagatggaggaaacagaaattgtggcaaatttagctggagtggagtgagcaaagttatgaggaagcacttaaatatttatattgcttaccccttaactttttcaggcttctgactgttgtcaccttatcagcgacgcatgatttccgaccactttatttaaataacaaaccctctggcaccagaactgccccataccttgctctgccttttttttgttattgtttctacatagtatacattttatttatttgtttaagagaggtaggcagggaccaagtcacgggagccttgcaggccttattctgttcaattttaaattgggcttccttctaagagtagtgataaatcagttgggccacacagcctgttctgttttttctttttagagatgtacttcacatactataaaattcacccttttaaagtgcacaattcagtgggttttagtatgttcacaaggttgtgcaaccatcacactatctttttttttttttttttttttgaggcggagtctcgctctgtcgcccaggctggagtgcagtggcccaatctcggctcattgcaacctccgcctcccaggttcacgccattctcctgcctcagcctcccgagtagctgggactacaggtgaccgcccccacgcccggctaattttttgtatttttagtagagacggggtttcaccgtgttagccagggtggtctcgatctcctgacctcgtgatccaccctccttggcctcccagagtgctgggattacaggcgtgagccacggctcccggccacaaccatcacactatctaataaaacttgcacccgttagcagacgctacctattacccactactcctagccttagagaaacactaatctactctctgtctccaggtatttgcgtattctgggcatttcctgtaactagaatcatacaatatgtttgttgtgtctgactttttgcacttagcataatgttttcaaagttcatgcatgtatttgcacctagcagaacgtcattcctttttatggttgaatgatactctgttgtatggatatacattttgtttatccgttcatcagttgatggacatttgggt

SEQ ID NO: 1936 - DNA, 4001 bp, Homo sapiens
ctgctccaattgtgttgttgttgatttgttttaaagaaacttggggagagctcagggagagagattttttttaaaaatcaaattatcttttttcttccttttttttcttttttcaaaaaaggaagagggggaagaaaaagagagggagaaactctatggccacattcactcaaagggaaatgggaattacgatgttggctgtgggttgacaaaaaaaaaaagatgatgaaaaggaaaacaaggagtgggaggaatgggaaacctagagaactacaccccattttaactccactcctgccctctcaccaccccacaccccctcacccccggatttccagccatgagattctctgaagcagtcaccagcttagctgcacgctcaataccagcccacgtctctcctcggaaaagactcaactgccagtctgagggcgaagacacacacctctgtcccccatgcccacccccagccccccagttcaaagatactagcaccacctcctaattgccatgtgccatgcaagaaatcagatttgcaggaaaatcatttgaaagcgtaagccatttgggggctctattaataactctctaggagcaggtgtgcttagggtccgagggcgcagtgaggtgtgggcagccaggcccgccccgccttgctgtaaacaggaaagcttagcgcctccgtgaagcgactgccttttctttcttcttcttattctccccgcctccccccgcgcccccccaccccaccccccaccccaagccagggcaagtaaatttaaaggtattcagttaaaaccattcataacagattgcagcaaatcccagaagtttcgtacattagttgattgcataaatattttttgctttgtttagtttagccaaaacatacacaaaagagagaaatcaaactactcatgacagccataatacatgctaccacatttctaatttcgattgcaaaactactcttcagaaactcacattaaactgctccctggtgcattgctaaatttgcgtgggcagttttatttactgcagtcccccaacacgttgactcctctcctaggactagaaagttacaaagaaactttctaagacggcactggtcagcagaagtctacttctaagttgcttaaatatttcaaggtaatgcagcaatgcaataaaatgaggtaatagagatgagaacaatcccagcaactccgcgaacagcagaggctgctcaagccaagaagctccgcattttcccccaactaattttataccctgctcctgggcagtactaatttaagccattacccacgctccacaccacccaccatattctttgtctataggatttccaaaatttaacgccttccctcctattcctccgaccaactgcaattttcactgcccctacacccgtaggttccacagttgggaattaaccttttttctgaactccataaatcacaagtgcccaagaacaatctgatcgagatgggctccttagtagcccagagatgcaaattttcagcgcccggagatgcatgttttctaagtttttgtttgcctcgttcgacttaaaaattcgtttctgacacctaagccctaccacaaccgggctccccgcgcccgcgacccccgccattcgccgccccctacctcgctcaagcagggcgaagttgcgttcggagagcccgggatctgtacggctcgcttcgcatcttgctgctgcccccgactgactgcgtagtgctctcgcaaacttactcgagtcggggtcccctccctccgcagcggagcactccaatggccagtcccgctcgccgcggccagttccctgcctgctacgcgaagtcacccagcgccgcgccaaggctgggtggtttcttcaggaagaggctgggaggggttaatgccttaaccccccacgccctctgtcagctgggggcccccggatctgaactgctgagacgcactgtccaggaaagatctggggcagaagcaaaaaaaaaaaaaaaaaaaaaaaaaagaacccctcctccccaaacaacaaatgaaagaaaaaaagagagagagagaaggggcggagcccggtaacccctggattctactgtataaatcactgccctcgcccagatagacgctgatccctggctgtggagaggattctcccgagcccctgaaaaaaaaaaaaggtggagagactttgaaaacttttctctcgaaaagtctgaggaggcagaggacggcccggagtctcgtagcgcaccgccctggtcccacaccccccgcagccctaggaggatcggtgtgctgagcttgtggccaggagctccccgagccactttcgcgcgagcagcagaaaacctgagccgcggcccggcgagtgtcggcggcgctctggggaggagaggctgggaaggggctgcgagaggtacggaggagacaagcagcccgggagggagaatgaaccgggaggttcctgtactccccccgccaccccagatcctcgtgctactcgcaactgcggtctgaggggcagtggctttcccagagtgcacagagaaatgaaccagcgccggttttggtgttgggcgaggggtttccctcagctgagcacaaagtcaggctgtgtgtcccagattctggccaatggagaggtcgttgagggggtgggctgctgctgagtcctgagagattcaaaacgcctgggcagctcaggaatttccaaagggggagattctcggccaggagctgcggagcaactgcagctgcccagcaggagccggcacccttctctcacattctgcttgggagtcgactcagaggcctcaaatctcattactagcactttgcccacccttttcttttgcttagatgctacttaagaacgtgaggctgagaggcggacttggtcagatctgcctgcgtgacaagctcaggacaggacgcttctgcccttgcattactgttgtaaaagtttccacccagtccctggtcgcactgcgttcccatcccggcagatgtgaactcaaaaacttcctccgctgtgcagtttcaattggcagacacaccctgtacctgaatgactcagaaggaggcagaatgaacaaacaacagacccctgacttctgggattttgtgagtttgccaaaaaaaaaaaaaaaagaagtgacagttaattcacagctgttttaaagcattcatcgacagcgacgcacccaatacatacccacagcttcaacaacagtacagtgcatataatgtggaaaccaagataacggtcctctaagactccagagtagatcctaattggatttgaagacttatttcacttaaaggggaagaggtatattgtgtctacccagcacaacaaaacgggggacttggcattcccccccttctcccgcctccacccacactaatttatgcattctttaaagccaaaggaatcaaagtgaaatttcacacctagtctgtatcaagcatgtgctaggttaatttaaccttactgctctgtgaagtaagtaagcattgctggccattttattgttgagagaagtgtcattcagacaactaaggtgacttgtagatttcccagctagtgagtggcagagctgggttccaaaacctaaatattgcaaatgccttgccttgtggctcaaacgctatcagtcaataaatagttaaggaattgaaatatatgttcctagagggaaacagacttctagatttaaagttttacatttgctgcatttctgactgtacaagtctacaaaatgcatataaaagtatgctaatgaatgtccttttaaaaccactcattttctacgtaagcatacaaagtgtatacatatgcatattaatgaatgttttctgaaacttctcattgtctgcctatgatatctcatgtaacattgtacttttagtatttgcacatagtgttacacatattaatccatttaatctgacaagttaggcactataattattctaattttacaaacaag

SEQ ID NO: 1937 - DNA, 4001 bp, Homo sapiens
ctcctcttggaaggtgcttggcctgcagggcccctgtgcagggtccccaaggcacatacacactcatattctgccccggagcatctgtgaccatgaggtgcacatgcctgcggatttggcatggggcttgggggagacagcctctgagtaagaaacatgggggctggaaagaaggggcccctggagttgcttcctaggggaagggtgtgggacaggcctgggagggactggcagaggcaggcctggatctgagccgtccctcacgcagggcagggacctgggagccccaggtgggggggcatctcctggctgtggccacggggtggggaggagatgctcacggaagcactgtcggaagagactgacgctgggctcaggctgtgtgctccccactcctgggggagccctcaagggggccgctcaaatccaaacagagacccaaggctaggcagcgggctgcccagaggagccctctccagcaccagctgcttgaaaggagggaactgggcctcttgccccgggtaggtctgtgacagcagacagggggctgccggctgtctgcacacctgcctgggaactctgtgagctgcctgcctgtgcgtgcaggtccatgtcggattgtgtgtcaggtgggcacatgggtgaggtgcggctgtgtccccttcccctgcccaacatgctgtatgtctgagggaccagccgtcttcacaggtgtgtctgcagccgcccagctccctggctacggcactcatggctcacaggcccctgggcatcccctcccccatcctacctcaggcccaaagcaggcaagcggaggtacgcccgggaccctcaggcccattttgcacctctgcctctcctaccctttcctggaagaaggggttcctgagtgtgtcaggaattgcagcccccacccccagcagccatggccctaattggctccaaactagtccttcccaacaggcattcttccttttcagatcaatcctctaacccttgctgcccaactagggggctggagactgggtagggggtgcaggtgcctccctgagcagaaggcagctcccagcatccccgtctctcctgcctgctccctcagtgagggtgtccatagctgtctaccctgggttggggccttgaaccagcctccgactccagttccctggacaccaaaggcccacactgcaaagactctgcccctggctagcctctgcgtccctaggacacacttcgacgtccaggcccttgcaccctctggccttcagcacccagagacacaagtcactcacacccaagcctgtagctccccaaaatgctgtcgtcccagaatcacacctcaccagctgggccagagaacacggtgacccccaagcggtgacagggcacagtgccaggcccacgttgaattactcctcccagggagaagaccctgacccaggactcgaggataagcagctaaaaggcacccaaggggaggctctaagacaagcgcggcccccctgtctccaccggggagggcgctcgggtgcccgaggactcctcccccgtccaggtagaagggctgggagagcacgaggtaaagccgcttccccctgcccttcggaggctccctccagcacacccgcaggggtgaggttaggactctcgatcctgaaaaccctgaaaaccgcagggacaagctccgcaggggagagtaactcccagccccaaccgagccccgcatctcaccaccggggaggatattcggcagcccgggcagtcgcagatcggaggatgcacctgcaggatccccttggacataagcgtcttcagacttttccctgcgagcagagccgaggcagaccctgtgagggagcggcacgcttctgcgcgcagtcagcggcagggccagtaccccctccccggctcgtggacgaaatacaccccgaaccccacacccacctcggcccgacttcccagcccgcttcccgtcccaccctcgcgaacgccgcagggatctgctgggctctgcaactccagcccgggtggagcgccctcccccgacgaagggcctgggcgtccccacccggcgcccctcctcccgcgctccaccctctccccggccccgagggaaccgcaggccgggcccagaaaggctgagtcccggagcggtgagcggcgccgtcgggaccctcggcctgcgcggcaggaagaggcggccaccgcggaaccacgcaccgctcaggtcccgaactttttaactccccgcggcgcctggcgctcaccgcaccccctgtgtcccggctcaggcgcccccgcgtcgcacccttgggcccaggcgcccgcaggcgccaaaacaggttgtgtgacctggcgccgccgctcgggctccgcgcgcgcccccgcgccgccccgcagcctcccccgccgcgcgctcgcacccggccgcacgtgcgcccctccagtctcccccgaacccggggctccgcgccctcccaacccgcctcctgcccgctctctcgagtccccgtaaacttccttcgggccttaaggcccaggagcctcgcagagaccttccgagcggagggagcggcccgcgagccccaagcgctgtggcccaagctggggggaggtgcagcggggggcgatctgtccgtgttcaccgaggcctccgcgcgcggcgggggtgtccccgcgcagccctggagctgcagcgccccctcggccgagccggaggctcccgggtgtccgagtcgggtagggggtggggtcggggcccgcgggtcccggcagcgaagggaggggcggcggcacctttgtggcggatgctgcgcttccagtccttggccgtctcgcggccgctgacgaactggaactcgttgggcgtgagccactcgccgcggtggcggatggacgggcccttgctgccctggcagagtttgcgcacgtagagcagcgcgcggttggcgccgcactccacctcgatgcacggctcgccgttgtccagcagcggctggaaatccggggccgcggccgcggtggccgagaagcgctcgagggccagcgggtccctgggcaggtggaggtgcggggcggcctcgtgcaggctgaggtaggcgcgcggggggcggagcggcggggccagcagagcctcgtaaccggcggccgaggcgggcagcgaggcggccggggggagggcggccgccgcgggcagtggcgccaggtagcctggcagcggcggcagcggcagcgcggccagggtcgggtggaacgtggccagagccagggccaggtcctcgcggcccgggaactccttcttgaccgccggcatggcgccccggtggctccgcagccccgctctccgccggcggcagcaacttattccggcccgggctggagttgggtcgcgggggccggggaggcgcctggccgcgcgcccacgccgtccgctagtgcgccccggcgcccgcagccgccgcctacgcgccgcccgccaggcctccccggactgcccagccggccggcggggcctcagaggccggagacatggagctgctatcgatcccggatcgactcgccgagcgccgcagttccagggcctcggggctccccggggcgtctggagtcccgcgccccggccaccagcgcccgcgcccggggcagtcccacgcccggctcgccgacccacccgccaggccgagcccggcagcgaggagtcgcggagtccccgcccctctcgggggtcccaagcccccgccccgccgcccgggccgcgtcagtcgtgcacccgcgtccactggcgcgcgcccgcccggcggggacttgggagactccgccgccgacgccgccgccacaacttggcccatttaaacggccccggcgcggcgggcggcgcgggctcccgcggggggtgcgtgacggccgactcggggcatccggcggcggcagcgggacagggctgcggcccccggcactatcccgagtaccgagtcactgcgagcggctggaatccaggactccgc

SEQ ID NO: 1938 - DNA, 4001 bp, Homo sapiens
aatttttgacttccttgaagatcagtgccaagaaagatttcaaatatttgccattgctcccttgaaaaggcaaacaatagtaatctaggaaccaattaaatatttttgagcagtattttttgagcatgggtcaggcatgtggatctttcaccagtgctgatctcaaaatgatggacttttatgtagataaagagctctttcactaacagattccttaacgcttttggacttgatctgaaattcctgaactattctcccagtaaatccaaattggaagcgagttggactgggagttctgtgtcttggggagctggggttgtcctgacagtgctgctcagaacaaaagcatgttcagctctccactcttgacggggaaaaggcaaagaaactgtagttacacccagctcttccttagacacagccacaggagaaaggattctgtgaagtttttccaagcatctcttcctgcatatacaaagggacatcccctcccatctggcctgctgtgatcaaaagtttgcctgttacacaagagtaaagtttcagaaagtgttgtaggaagttaatcccgttttataaaaagtgagccacaaagacactctaaattatgacaacaggtttcacttaccagctagtttctaactttggtagtaaactgacacttgtgaatataaataaataaataaataaatatatatatatatatatacactagtactcacacactccctccaacaaactgtttgccatcaatcctctgctgataaaaagttgtgtgtgtagtatgtagcataaagtatgtgagtgtgatgtgtgcactatgtggtgtactttgtgtgtgggtgtggtacgtatgtgggggtgtgtgtgtatgtggtgtgtgggggtgagggggagaggcaaccaaacaagaccttccgatccagcacattatgggatatgctgaaataactttagagatcctgaaatctccaaattatatgctgaaataactttggtgtcagtattctggagcagaactgtcgacccacttgggaatgcgctcagatagggagaggggaggcggttaggaagggcgggaagctgttgactttgattggcttcttttctagatcagcattcgtcccccaggcagaaaggactcgcctagggagccagcgcggtcccaaaggagccgccggccctgcctcccgggatccgacccccggtgcagccagcctgaagtcgcccgagggcagggccgacctcaccgagccgggaatggcgtctcaggggcaagtgagaactggcctgagaaggggacggtaggggcagaagacgccaggctgcctcttggaccagcagcgccggcccagagccacacgactctctgtggcactggcgacaaagcggggaaagtttctggctaagactttcacggagaggcagttcgctggcgtttagtgtgggggctccccggggaagccggtctttggaaagtggagggtggaggtgtggcgttctcggggtccccgccgagtcgtgccaccaccccgtcccgctccccgagcactgccagcagccccaggcgagccggggctctccgtggggcagggcacgcttctgcccccactccactccacagtgagagcccacgtccgtgggtgcaacgagctgcaggagcaccggacacacggccaagatgtgtttttgggagggcagagcggttttcattgcggcattcttcgtttcctttcatcctggagagaggagagggcgggcgccttcccacgccctgggcgcacaggcagatcacttacctccccgcatggccgcgccgggaggtttgccccgcgcggagctcggcggccgccacgcgcaaagccccggtgcagccggccggacgcgcgcggcacgccgggagttgtagtccagcgccggtcggcgggggtcggaggggcgggggcccccaggaatggggaaggccagtactagaagggacaagatctgggcaggacaagggaggatatttgcaaaaacttaaaacttccaggaagatggggggaggggaaccctcctagagagatttttaaagtgaggtttttttaggttaatgccattttcttcctgtcttactcgcttatgacaaccccaatgaagttttaagctggactctggcagtaatgttaagtagagattttctcggccaacttcatattatttagggttctattcttccttcaccttgaacacagatgtgccattctctgcttggatgcacacagaatattcttgctcacagaataactcagttgaagccctgagcatgtaaaaggagggtgagtagttagttgcaccttacacatgcagggtgctttatagctctctttacaaagcactttgtacttgattgattcattatataagaaccgtaaagcaactctgagagttagtcagagaaaagctaaagatgcagggagttttttgtttgtttgtttgtttgtttgttttttgagacggggtcttgctctgtcgcccaggctggagtgcagtagcgcgatctcggctcaatgcagggatttttgtgtatctgcatctgcagaggttgttggagccatcctgtctattcgtttctttctccagcctctcttagcagctgggaagagagagtggagagaaagagggatcaggacagatgtggacacggcagaagaagaggagcctgctgtgacggacttccttgaaatgacaaacaagtaaatatttaagggaataagtaaaaccaaaagaaggactcatgggttggaagaatggaaggagaaggaaaaggcagatgggatagggatagacattgaagattgcaaacaggctagtagcaaagaaagcaaaaacaaacagggtttttagaagccagataaaccttggattcctggtgttgtcacttctgagctatctctgttaccttaggtaagttctttaacctccccaaacctcttttgcctcatctgtaaaattaaaaaaaaaaaagttctgactttatcatgtggctgtgcctattaaaaagagacaggaagcacatagtatagtgctgggcatatgctaggcaattaatgttatttactattattatctgcagaaattctctttgtgttagtatcaaaaaataaattggagtggaagtaccagttaggaggctgtgacaatactctaagctactggcaatgatagcttgaactacattgacagaaaggcaactatgttgccatatgagatagggaaaacagagtacaatcaattggatgtggggaaggaagaaaaagaatcaaattggttgttatttctagattaagtagatgatgttgtcattttcataaatagatacaactgatggaaaaacaggttttggaggaagatgaccactggctttcctcattttattgtgctttgctttattgcagttcacagacaatgtgtttttgttgttgttgttgttgtttattttacaaattgacagtttttggtaaccctgtgttgaacaagtctattagtgcaatttttccagcagtatgtgctcacttcatgtctctgtgtcacattttgggcattctcataatatttgaaagtttttcatttttattgtatctgttgtggtgatctgtgatcactgatctttgatgttacgattgtaattgttttagggtgccacagaccatgcccattaatctataaatgttgtgtgtgttctgactgctccacttaccagctgttcccctcctctctccctctcctgctcctccctattccctgagacacaacaatattgaaattcggccaattaatatccttaccatggcctctaagtgttcaagtgaaaggaagagtcatacttctctcacttcaaatcaaaagctagaaatgataaacttagtgaggaaggcatgtcagaaatccagataagcaaaagttagacgtccggtgccaaacagttagccaaattgtgaatgcaaacaaaaagttcttga

SEQ ID NO: 1939 - DNA, 4001 bp, Homo sapiens
gattacaaaaggtcgtaaggaaattttggaagtgatggaaatatttgtcatcttaattgtggcagtagtttcaagaggggataaaaatatcaaaacttactttacacacatgcaatttattatgcaaggattatacttcagtaaagctgctaattttaaaactaattacaattaagtaaaattaaaagttcagtttcttacttaaactagtcacatttcatattcttcgtagccacatgtggctagtggctaccattttagacagcacaaatacagaacatttccatcattgttgaaagtactgttggataacactgatctaactcacacataaaacagcatctgtttctttcatttctcctccacctacctaccccaaactttagggatggtaatcagcatggcagtatggcactgatatataaattacccgagaactttaaaaaacagattttattaagttagttttaatgtaactttgctgtgaagcaaaatataccttctattcataaacatatagcacactgtttcctcatttagatatcacagcttctatggattatatttaattagtttcctccaaagctcaagttgacggcaattttaaactaaatgatatggaaagaaatgaaacagataactccctcttggaactcactttctccttgtaatcaaagtacttattgctttgctataactcctaagtgagaatatacatttttcatatactcataaatatcaaaatattatgttacatgtgcaattgaattttcccatttaaaataatcaaatatataactcttacatgacacatataaacacaagtttcaaatgtgagaacagactttaaaataaacaccatgtatgcacagaaatgtttcacattcattaaacagttcataaaattaggacggaggagttgttaaactatattcttactgaagctttttcccttcctgcactatagctcttagttttcagagttagaggtgattgtatttcaaaaaaaaaatttgaactctattttctgcccccattctgtgttgtctatggaagagtctctgcttggagtttttgtttcaatatacagaatgcagggctgaaatcctcaaccatccttgttccaaagcctgatacacaaacctttcatatatattttgatgtctgagtcatctctgtcttagaaatgcaatacagaaaaaggtaactggggtaggggggagaagggaggctgctggccagtgtagacaaaccaaggcgacccccaaactgtgtattgtagtagataagcaagaagtacgaaaatagaaactaagtccctctgttgtttgcagaagcagaactcagaagccagcttcacttacttttttacaccgacagagccattttccttgttttccatgtcaacagatagcatgggaaggctgcagggttcctttacttcagcaactaatcaataagggagaaaagcttgtgtttaattcttagaaagtgagagaagaatatatattctgaatcggaaacataatggtcccttttacagcttcacaccagttcacgtatgtttgtttaaatctccagttccctcggcgattggagagatgtgattaaacctaaagaactggaggagacggattggggtgctttcatctgtactggcactccctgccttgacaataagcatttgcaaatgaaattgaatcctcgttgaaaacaagtgctgtgtgaactggcacagcttcttctgggtgcctagctctcacttaagacactgcaactcataaatgagtcaaagtagagaaaaacaatcccccttttcctgcccccctcccattatgggctttgatttgttttttcttattgtgtttggttttttttttgtccactcccccttgctcctagattttttcattgcaatgcagaaggacacttaaagcttttgtcagcaagtattcccctacctcacattctcaacgaaagcctcaaaaacccgtctgtgagatggccatgctgtggtaaagcaggaagctcacaaaaaatgccagatagcccttagcacagaaaggtggtgctggtgtgtgtgtgtgtgtgtgtgtgtgtgtgtgtgtgtatgtgtaagaaagagtaggtaactcattagatttatgaaaaatcatcaaaacatttaaggagatattgtagcatccatcactctgtctttttgtttagtaggatgagggctgtggaaaattaaaagccttccacaattaatatgcaattagcaaaatgaaaaagctacgaacaaaactgctttaagaaaaaaaaaaaaaaaaaaggaagaaacagtcccgaaacgtgtttgctcttattcagctgaagccataaattaaatacatttccactcaaatcactttatacttcggcactccttctctagggattactctgacatggcaagtgcatcatttagtatattcgcaagattttatcactgttagagaagtagatgattaacaaataacactgtaagtgtgggataattttcactcctgaaacacacacatacacacaaacttccagctgcaaaccacttagatcattgatagagaaatccaacatttaatatatatatatagatattagcatacattcacacaccgttagagagtagacaggaagatagtgctgctgctccatgctaacagaatatgatttcacttcagttggaaactgttacacattcaccattttctaagcatctcagaaaacaaaacaaaacactcacaatgatactctgcaacaccacactacattgtcttattattattactattattttcttttctgtggaagagtaaaaagaaaacctacctataagcaactaaaaaatatcattttttataggcttatcaagaacagccaaagaaaccccaatgttttctttcacaaagtaggctggcaaaggaattcaataaggaggtacaatttgacacagtgaaataaaaccaggctggctctcagccaacatgacgttaggaatcacacacaagctgcaccaactgccttctggttcatggctgactttttaaagctacagtgtgcctgttcacttttgctaactaccttcagcacaattagtgcaagaaatgagtaaggagtccaaaacctgcagaattctccctgcacctgtcttgtacaaagaaaaacaagctgtctcaatagcttcttattttctccctccccttcattgttgctgcatgataggtcttagctgttgttctgagcatgaatgtcatgtttcaaactatttccttttctccccagagggaaaaataagagtgagaagccagtgcttatgggctataaccagagaacactcggaagctgcagtcccatgttactctttttttcctaatagagattcatggacaaagttcccagggctggcttttaagtaatctctttgtgagaataaggaaagcactgcccagcagcaaatccttttacttcattatgcaggaagtaacatatttcggaaaggatgcaaaatagatgaccagatctcctgaaaacgcccacattcttttattttggcatttatcctgccaaatgaagccagcaaaaattcaaactgaaacaaacaaaaccttattctacaaaacgaaaacaattagttctgggaggtttaattttaactgtttatcccagttggacaaaaagcataattcaagaaatttaaccaacacttacaatctatgagtacccggtactatattagttacatatgaatagaaagacattatgcccaccccaaaattcatagtctctcccgccatcatcctaaataccaaatcagaaaactgggaggtggagcagagaggctgggcaagatcttttgtttaagttaccctggtcattctcacagttcccttgcttggcttaaaccacttttccaggagaataatctcatcccattaatgttctgcacatacacagaaaacatacatggttgcctcttcatt

SEQ ID NO: 1940 - DNA, 4001 bp, Homo sapiens
gtctatggaagagtctctgcttggagtttttgtttcaatatacagaatgcagggctgaaatcctcaaccatccttgttccaaagcctgatacacaaacctttcatatatattttgatgtctgagtcatctctgtcttagaaatgcaatacagaaaaaggtaactggggtaggggggagaagggaggctgctggccagtgtagacaaaccaaggcgacccccaaactgtgtattgtagtagataagcaagaagtacgaaaatagaaactaagtccctctgttgtttgcagaagcagaactcagaagccagcttcacttacttttttacaccgacagagccattttccttgttttccatgtcaacagatagcatgggaaggctgcagggttcctttacttcagcaactaatcaataagggagaaaagcttgtgtttaattcttagaaagtgagagaagaatatatattctgaatcggaaacataatggtcccttttacagcttcacaccagttcacgtatgtttgtttaaatctccagttccctcggcgattggagagatgtgattaaacctaaagaactggaggagacggattggggtgctttcatctgtactggcactccctgccttgacaataagcatttgcaaatgaaattgaatcctcgttgaaaacaagtgctgtgtgaactggcacagcttcttctgggtgcctagctctcacttaagacactgcaactcataaatgagtcaaagtagagaaaaacaatcccccttttcctgcccccctcccattatgggctttgatttgttttttcttattgtgtttggttttttttttgtccactcccccttgctcctagattttttcattgcaatgcagaaggacacttaaagcttttgtcagcaagtattcccctacctcacattctcaacgaaagcctcaaaaacccgtctgtgagatggccatgctgtggtaaagcaggaagctcacaaaaaatgccagatagcccttagcacagaaaggtggtgctggtgtgtgtgtgtgtgtgtgtgtgtgtgtgtgtgtgtatgtgtaagaaagagtaggtaactcattagatttatgaaaaatcatcaaaacatttaaggagatattgtagcatccatcactctgtctttttgtttagtaggatgagggctgtggaaaattaaaagccttccacaattaatatgcaattagcaaaatgaaaaagctacgaacaaaactgctttaagaaaaaaaaaaaaaaaaaaggaagaaacagtcccgaaacgtgtttgctcttattcagctgaagccataaattaaatacatttccactcaaatcactttatacttcggcactccttctctagggattactctgacatggcaagtgcatcatttagtatattcgcaagattttatcactgttagagaagtagatgattaacaaataacactgtaagtgtgggataattttcactcctgaaacacacacatacacacaaacttccagctgcaaaccacttagatcattgatagagaaatccaacatttaatatatatatatagatattagcatacattcacacaccgttagagagtagacaggaagatagtgctgctgctccatgctaacagaatatgatttcacttcagttggaaactgttacacattcaccattttctaagcatctcagaaaacaaaacaaaacactcacaatgatactctgcaacaccacactacattgtcttattattattactattattttcttttctgtggaagagtaaaaagaaaacctacctataagcaactaaaaaatatcattttttataggcttatcaagaacagccaaagaaaccccaatgttttctttcacaaagtaggctggcaaaggaattcaataaggaggtacaatttgacacagtgaaataaaaccaggctggctctcagccaacatgacgttaggaatcacacacaagctgcaccaactgccttctggttcatggctgactttttaaagctacagtgtgcctgttcacttttgctaactaccttcagcacaattagtgcaagaaatgagtaaggagtccaaaacctgcagaattctccctgcacctgtcttgtacaaagaaaaacaagctgtctcaatagcttcttattttctccctccccttcattgttgctgcatgataggtcttagctgttgttctgagcatgaatgtcatgtttcaaactatttccttttctccccagagggaaaaataagagtgagaagccagtgcttatgggctataaccagagaacactcggaagctgcagtcccatgttactctttttttcctaatagagattcatggacaaagttcccagggctggcttttaagtaatctctttgtgagaataaggaaagcactgcccagcagcaaatccttttacttcattatgcaggaagtaacatatttcggaaaggatgcaaaatagatgaccagatctcctgaaaacgcccacattcttttattttggcatttatcctgccaaatgaagccagcaaaaattcaaactgaaacaaacaaaaccttattctacaaaacgaaaacaattagttctgggaggtttaattttaactgtttatcccagttggacaaaaagcataattcaagaaatttaaccaacacttacaatctatgagtacccggtactatattagttacatatgaatagaaagacattatgcccaccccaaaattcatagtctctcccgccatcatcctaaataccaaatcagaaaactgggaggtggagcagagaggctgggcaagatcttttgtttaagttaccctggtcattctcacagttcccttgcttggcttaaaccacttttccaggagaataatctcatcccattaatgttctgcacatacacagaaaacatacatggttgcctcttcattgaaataaacatcaatcaacatttggacacttttaggtcaagatggtcaacaaaaccactcaagacagggcacagaacacaggttccccagaaagatcctggaaaaagttatcacttgctgtaatatcctgtagaattcaggtagaatctgaggaaaaagctgcctgcttccctttttaaaaataatcttttaggacattaggagattacctttgatctaaatttggaacctgaatttcaaggtcaaaaaatttgttctttacttattccaggaattatattagaaatttttgacttccttgaagatcagtgccaagaaagatttcaaatatttgccattgctcccttgaaaaggcaaacaatagtaatctaggaaccaattaaatatttttgagcagtattttttgagcatgggtcaggcatgtggatctttcaccagtgctgatctcaaaatgatggacttttatgtagataaagagctctttcactaacagattccttaacgcttttggacttgatctgaaattcctgaactattctcccagtaaatccaaattggaagcgagttggactgggagttctgtgtcttggggagctggggttgtcctgacagtgctgctcagaacaaaagcatgttcagctctccactcttgacggggaaaaggcaaagaaactgtagttacacccagctcttccttagacacagccacaggagaaaggattctgtgaagtttttccaagcatctcttcctgcatatacaaagggacatcccctcccatctggcctgctgtgatcaaaagtttgcctgttacacaagagtaaagtttcagaaagtgttgtaggaagttaatcccgttttataaaaagtgagccacaaagacactctaaattatgacaacaggtttcacttaccagctagtttctaactttggtagtaaactgacacttgtgaatataaataaataaataaataaatatatatatatatatatacactagtactcacacactccctccaacaaactgtttgccatcaatcctctgc

SEQ ID NO: 1941 - DNA, 4001 bp, Homo sapiens
ccatctcaactaaaaaaaaaaattagctgggtgtggtggtgcacacctgtagtcccagctacttggaggctgaggcatgataatctcttgaaaccgggagatggaggttgcagtgagccgagatggtgccactgcactccaatctgggtgataatgagagactccgtctcaaaaacaaaacaaaacaaaacaaagaaaagaaatgacttcacatttaggattaagttttttaaaacaataacataaactacataaactgcttttcataaagaatataaagtgccctgaagacagaaaatattcacgcctctaacaaacctttatcaaggccttaccaaggaccaggtacagtgctaggtactgggattttatgtataaatgtgtatatgtatatccacatatatactgtatgaataaaattgaatccttgtccctgaagaactcaccacctatctacttttcagataagggacaaatccctcagatgtggacattatacccaaaagactagctaacacattcaaagtcatttagcactggctaagggctggactgacacaaaaatctgatactcctgacttcagattcagtagaacagtgctcaggctagttttatcctaaacaaaaaatgtggcaaaattaaattccattgcaactcgaaacttcaggtcaagtgtggaatctcacaatcaaacaaactactacaatagagggcctaagacatagaatcagcacaaaactcaagttaaacaaatattcttttgacatccaagatccttataaacaggagaaaatcaattttcctaatagaaatccatcacactcttggatagtggctgcctttgcagtgtactgtcatcgacctagctcccagatggttgcagacctattgcatcagacaaatcaaatcacaagtacttgacagcatccgcccaaccagcgaccactccagttaatacaggcagagatttatgggcagatggttctatggttttattcggcttcatgatagatgcccgatatgactccaagatccggcagttccaggttctagcccaactctgccaatgtctttaaaggaaaacgtccacaaatcacaattaaacagcttcagtcattacaatcttttgctcgcctcctcactcccctcgcgtttgatctaccacggaaaagacttttctaattcttaaaggtatgcccataggtcgggggatggccttccgaaaagcttcagggtcatttattttggccaagagcggcctccaacgccccgaaatgcttccgataccgaaggaatgaatctactgtgttgcagaagtgacgcagtctcaggagaagcctttgatcctatcaaaacaaaggaaaaccactctggccttgctgaagatgagaaaaagactgggggggaccaaagattcgtgttaggaaagccgcgtagaccccacaacctcccgccccggcatgttctggcaacccctggggcaggaaggcttgacagctcccgatgcgcgtgcgtacgcacactggcagcgaacggcactgagcacgcgtggaagggacctcgctccgcccgggtggaggagaaagtgggatgaccccggcgaccaggctgtgttttcggggatggggagaacctcggagccaccgcaccctgggagggggtctgacgaagggtggaagctgtggcctcaggagcggtggctggatttgagagagaaaattgggtttagcatcaaggaggtaacccgcccgtcccggtacttacatcgtcgccactcgctgtctgccttcaccagctggtccactagtcccgggtccttgaagcgcttctcctgcgtctctcggatgagggctgggtcccctcctttatccacccgaaacaaatccagatccagcaccatcttctttcctcccgggccaacgctcagggaagcaaggatcgcgccgcagcactcagcctgtgaccgccgcactgcgccggcgcgctgacccgcccttcctgcgcaggcgcagctggagcccgcaggcgaccctccccgcgaccggaagcggctggttggaggcggggccgcggagggaggggaggggagagtgggtgggcgtgggactatacctctggttcctgctccccagctctgctacagtctgcaggaactgtgatcgccacataaaagtgtgaatgcctcagtttcctactcctgtctcaggctaggcagaggcctgtcccctcatccctagcttagaggccggggccttcaccaggtgcccgttttcctctcactaggttgggttcttccactgggctctttccctgaacctcggccgtcttctccatcttgatacaagaggatggcatatttagtcccagggctacctcagcttaagattcctgctctcgtgccttagaaatggtatacctttattaatctgattattggataaaccaaattgtcactttaccaactcttaagagcacagctttgggaaagtgcggttgtcttttagagagagacgagagaaaacttttccaaagggacattaagcagatttgaacgccgtataaggtgttgaggtcatgtcttgggtcaatttgaaagcgtcttgaagaacggtttgtatcatactttgattttataatgttcagacctttaaatgaaatattctagttgccgagtgaagccaaagttatcaaagaatctccctgataacaagagattatttgaaggatttgggaacaggtgatctcctcccccacccccacccccaatccttccactctgcagaaactttaaagcctcacttccaatgccttctcgaagctagatgtgctaagaccttcttgatcttataccgccgtcatggactcctgagatgagggtgtgacatagctaactatcatattatttatttataatatgaaatatatttgggctttgtccctggttcctgacacagcccctaaaacccttgaatttcctgggttatacgtaatgggtctctttgataacacctgagtttataataaggaggtgatttaggatgggggccctagataaccttaggatggggccagtcaccagagagaccaagtgattggaggattggaactttcatccccacccttcaacctccaggaaagggggaggggaggagctggacatcaaactctataaacgctcgaacaacaagagttgatgagcttcagggttgttgaacatgtggagatgccaggagggtgtcttgcccagaaaggttatggaagctctgcacccctgacaccttgccctatccatctcttcatctggctgttcatttgtaccctttgtactatcctttataataaactggtaaatgtttccttgaggtctgtgagccttctcagcaaattaatcagaccaaaggagggggtagtgggagccccagtttatagctgctaagaagtataggtgaaatctactacttgcaattggcatctgaagaggagcagtctagtgggatcaagcccttaccccatggaatctgacactacctccaggtagctagtgtcagaatcagaatcgaattgaattatagaatgcttagccaatgtccactggagaatcgcttggtgtctgaggaacttaccccccagggcccctcaccactgcatctggtcacagaaatgttgtgtgttgagtgtgggtttttgtttttgttttttgttttttgtttttttttgcctcttacactatccctgctccccaaaaagcctctgccaagccaaccctgaagtgtaggtcaggtctaacaacaatgatagagctaagtagagaccctgagggaggcagaggaaaggggcttgtctgggtgtgctctccttggttcaacctgcctatggtattagatttaaaaccagtggaaaggaagggtgaggagctgcagtcttggaggaaaacatctaagaagactctcctcaaagtgttgggttccctaaaaccttctgagggcaaggtctgtgatgg

SEQ ID NO: 1942 - DNA, 4001 bp, Homo sapiens
cccctattatacagataataggaatatattaaaggtttctaagcagagaaattgagtttttagattaactgtgatggcaatgtaaccagaaagagaccatctaggagtttccatattgaaaccaaagtcatggcctcctttatctttctataatcattctaaaacagtgttgtccaatggagatacaatgtaagccacaaatgtgagccaggtatgtaattttaatttttttctttttcttttttttttttcagagacaggatctcgctctatcacccaggctggagtacagtggcacaaatagtagctcactgtaacctcaagcttaggctcaagcaatcctcctgtcttggcctcctaaagtgctgggactacgggtgtgagccaccatacctagcctacttttaaattttctagaagtcacattttaaaaagacttttaaaagcaggtgaaattaattttaataatacattgtatttaacccaatatacccaaaaatattgccatttaacacataatataaaaattgacatattttacattcttttttcatagtaagtcttaaaaatccaacgtgcattttcatatgtaaagcacaacaattcagataagccccatttcaaatgtctaataaccacatgtggctagtggctaccatactggacagcattaaaagaatgatcaactaaacctacagatctccatatgcagctgctggttttgggaccatctccttgaccggcttgccattgatttttgaccgaattctgaactatatatactacagtttgacattactggcaactcaataaggcaatgtcttcattttttatgttacatttgtacaccacttagttttcacatacgatttcacacctgatcctcattacaaacacgtgaatacgcaaaagatttcacacctgatcctcattacaaacacgtgaatacgcatgttatatcagttttacaaatgaggaaagaacgttcagagaaaaaaagagacaaccattgagtgttagaactgagaaaaaaaaagtaagtctcctgacctctggtcaaatctatttacgccccaataataccacctccttaatcaaagttgcacttctctgtgcgactggtctttatttcctccagtgattgtaaactccatgaagaaaaggactgtttttcctgaccactgtattcccagtgcccagtaaggtgttttacaaggaggcaatatttattgaatgaattaatgacgtttctgcttttctcatttttagtcggttaaatgtaatttacttttttaaagcaactgatgtgaagagccaaagtacgccaccaaattggtaggtttttaaaagttgaactttactgccaacatacttcaaaagagaacgagggggaaaggctcggagccaaggcctgagttctagtcctgaccctgccatgaactggctgtgagccctcacgtaaatttttttaacttctctgggccagagttcttatctgtcaaaagggaagagtagggctataatcttcacgattccgtgcacaggtagggtttttgacattaacttgatgtgagccggcttcctaactcctcacacccttcctccagtcccctctgcaacggccgacttggtgagagaggtaaccaccgggccctctgggttccctatccgcttcctaggggggccgactcgacacctaggtgcaaggtggatcccacgggccagaaccgccatctttccccattggcctgaccccaaccgccacccgcgggcactggatgacgcggaccttacctctcctcacagtctttgcatttcacctgcaacgggactagttggtggaacagcacttggctcatgttggctcgctgcctcggctggtgtgcagaaaagcccaacaggcccggccctcgggattagcctgagaggtccgggtcctgataaagtttgagtttggcgctcggcttctgcggaggaggcggggagggagaaacgaggggaaggcgtaagagacttggccctcgccagccaccatcggattcttccggttctgcggaggataaagggaagacggttgtggtagttccgggtattaacctgtgtggcgcgggggctgaggcagccatgtttgttaagggaaggagacccgaaggaagcttctaacttttcttctggttgccggatgctggacaccggaagcgagccctagaattatggcgacctccgcgacgtcgccgcacgcgcctggttttccagctgagggtagatgcggttactatgtggaaaagaagaaacggttctgcaggatggtggtggccgcagggaaaagattttgtggtgaacacgctggagccgcggaggtgtggtatcgccctactctctcaagagtcggaaataagtatcctggtcctgtcggtgctggaacccggcccctcccctctttgacagctttctgcttgtgtcccctggattctccagctttcactttaataaacccagttttgccctccttgcggagcgattatgagttctagtgatgagaaattttttatttttctaagtaaagcgccagcagtgacccatttattttgatctatttatctcgatcttaactcatggtaatgctaggttttaatttttaccccaagctaccgctccgtcttcctgctggaaagtggtagtttagaaaaagtagtgattgaagtcccaaaggtttcactagttgtgttctaattgttatttcatgaaagagaagcacttctcgtgaatgcggttggaagaaactttcttttaaaaatttagacttgaggcccggcgcggtggctcacgcctgtaatcccagcactttgggaggccgaggcgggcggatcacttgaggtcaggagctcgagaccagcctggccaacatgatgaaaccctctctctactaaaaataagaaaatcagccgtggcgcgagctactaaaattaagaaaatcgtggtggtgcgagcctgtaaccccagctactcgggaggctgaggcaggagaatcgcttgaacccaggaggtggaggtggcaataatccaagatcacaccactgcattccagcctgggtgacagccagactgaatctcaaaaaagaaaaaaaaatttttttcgacttacagtttttaagaatgcaactttgctggaatgggaaggaaagatttttaaatatatacgaattgaccttttacaattgagaacaaagcatacaattttgtttgataattatgcatataaatgtactatcaaacactttatatttgtatatatgtatattactttaggatatatatgagatgggaaaataaaaaccagaggagcaaaatgctcataggaagagagcatgtccttatagttccacagaactataaagaataaaccaaagcgatcagcatcagatttcatgcttctgaatgttcagtattatttgcattattttatttcttaaggaatttattcttctagacaatatccagtgcagatcagtcccctgacccccttcatctgccactctccatcatagttgtagtctacttcctattttgttttgactggcatttaccaaaagtgaagcatactgaaacaaggacattcttgttttggaatatgggagacgtgatttgttgtgggaactctgaattatgcccatagtctattgactggttttgaggggactggcaaacatcccttgttgaagaatgagagttatgataggagaaggatttagactccaccttatccagatatatggaaggtgaaaacaaatagtgatgatagtagaatatgaataaatccttacaagctgattagtattcctatagaggaacgacatattgtcattagacacttgaagagagaccgcaaaacatcaagtggaaacacttttattgactactatctcgttttaaattgtggctatcctcctgaatctgtaatttatgatgtaactggatgttgtgtttccatctttttttct

SEQ ID NO: 1943 - DNA, 4001 bp, Homo sapiens
tctgccttccggttgagctcctcctgtttcttcagcagctcagctgtggctgctgcagctgaggcctgcccagtgtgagcagacggagatgtgagccctgggccccaggactggcccttctccccagccctcacctgcacacctcctgtacctgagtgctgtatgagccatagttcttaggttctgtggggctgagctttctcgagggctgcaaggagggagctgagggtggaggcaatggggcaggggctggaggctcataggctggtggtggctgttgaggaaaagaccttagtgatcatctagtccctcataacacaggaatctagagtctgcttgaatacctttagacccagaactcatgatgtaaggaagcagcctttcccccatttgttaggaagctagttcttctgttgaatttctgtcagagaactctatgatgacctgtagcagccttatcatccctcatatccaattccttagtgaggactcaaatcactcatttaccatatctccccacttaactgtgttttttttttttcttttcttctggggatggagtgtggggttgtctctctgccacccaggctggagtgcagtggtgcaatcatcactcatcgaagcctcaaactcctgggcccaagcagtctttccatcccagcctcccaagtagcaaggactacaggcatgtgccactacacctagccaatttttaaaacgtttcaagagatgggggtctcgctgttgcccaggatggtctccatcaaattcctgggctcaagcaatcctcccacctcagcctcccaagtgggattacaggcatgcacaccatgcttggcttttttttttaagttttaagtaccatgaaaaccccttaaattcttacaactcaccatcttctaatccagtgggacaaacaggtgtagtcctcctcattccttgctttcaaactgcacacctaacctaaactccaaccagccccaacctttattttcttcaagaaagccttcccatacagaacattggttaaggccttgccagcctccagatcttcccaggactgacttttagagctcaaaccatttgggttggtggccctggtggccctagaaggatgaggcatcccatggctgactagcctctctcagggaactaagatcacagtgcctcttccttcctgtgcatgcagaaaagtcccctgtacccaagctaacttgtctcactggcaaacccttcccttccttgaactcctatgctctccagtagctcacctcccgggtctcaaaagggttgtagacgtcaagcgtggcatactgccggctgggtcggtgctggatcacagctgggtcctgagggcagagacccgggtctcagctggcacccagtgccacctaggggaattcccagggaccattcccaaactgcctgtggctccaagtactgcaccttcggggccacgccgttgtcccaggactgggacaacatttacctcaaatccatcatccaacactgccagcaccagcccattaaggggcagggcccgccccccagagtgctcactggtctggagtcactgtcaccccacgtggcggctcttcccaggatcaaatgtcacaaatggggatacaagttagcccgaccctacagaaccgggaagaatcaacctgaccgcccaaaagaggccgactggcgcaagtcacctgaaaggggttgtcaagctcgctgggctcggcgaacgggtttccgccgtctctgctctgagccatgtttgcaactgcggcctccgcggccctctgccctccacgcccctgccgcagcagtggcggtagcggtagccctcagagtccacttcactcgcctcagttcgccccgcttctctgtgcacggattggttccaccgaccggaagggccacaaggatccccgcagcagccgtgggttgcgcctgcgtcttgtccaaaagctaagacgaaagtgcccccacgtgatacctctaacccagtgcccacaaccaactaccgcccctcttccatgtgacttccttccactaacgaactacacttcccagcaggcctcgcgtaggaatccggccttcctagtctcccgagatggacgacgggagccttctgaccggtcgtggcaatcccccctaggagccaggttgagcacgttttcaacctgagtttctggctctatactgggccgcggcctaatgactctaggagtcagatctttcccaactctcataattccacatccgagaagtgccacctcataacacttctctgttttaatctgaaagaaatgctgccccacccatcactaccctcccatatgataaggtggacaggggaaataaactggtagcctggctgtgcttcattttggagggtaaggaggactcccttcatacccaaactcagaaagtttgccaatagtttcatccctccaccccagcattcccaaacctccaactccagggatgggggtcaaatgaagcacgttattttatttcacaaagactgtacaaaattccttataaaacatggggtagatgccacctggttacctcactcggcccccatccaactccgtatgagggggcaggtgagggtggaaactgtgtggatggaatagtattatgtacaaggcaggggttgaagtgataggtacaagttctttcatatttacactatttcacatattcacaggtatatagagagccaggaggaaggagtgaactctggctcgttctcttgtataaaaaagcaccagtgtcctggactggacacccactgctataaaagatgcaggggggcccagggcctgatcgtcaccgactgatatcccgactggagtcccacaacttgttgggcggctcagcccgaaggcgggcgaagaaaggatgctgaagggcttcacccaaggtcagccgcttagctggttcatactctagcatgctttcaatcagatcgaagagctggtggtgttcctctgcctctgaggtcagataccgctggtggaggagggcaggaaaaaggtgaggcaggatgccttacaaaccctgccttcttcaagaccctacctttcattcttggagaaccaaggctctgcttgcaaccaatttgaaggctacctaaccacgaccacaccaggaccaacgtttctgatattatagctcaacctaccttcccactagcacaattactccataatctttgaaagttctttctacttgtatatccttgtcaacttcatgaatcttctttagttcctcattaaaatgtaagctcttcaaaggtagtttattcttttctgtctgacctaaagaatccaggacattgctttgatctctggttgtctcaaggttaggctgtctaacctccttccctccacaaaaccactccctcttatgtttcctctgttgaccaaagatgtcttctttcagctttcctcccctcctttcctaaccctctgcttgtgaagagcattccagggggcaaaccaccctaagaaggaagtgacttctggacggtgggcactatttatcccgagcccagctcacccgcagcggtttgcagttctcacgaacatagcgcccagctgatgtgttctcatcccaatccaggcgaccccggtaaaaatatttctgctttctagaggggaaggggaggttgaggaatcagaaggtcacccttgttacaattcccttatttccccatctgaaagtaactggggggagaggaggtatcaaagaaaaaagaaaatgatgtgaaatagaccaattctgtggagagaaaaggaaaagagttaactagtgccccctcaaggttcaccttgtctttcggatcatccgggaagggataggacccaagatcctttccatcatggctagatgctctctgttgtcatgggtctgggaaacaaaaacagaactgagcatgggactgaaaagggcatgctaaggatcagctgccaggaaggcaggcaatgtggagaact

SEQ ID NO: 1944 - DNA, 4001 bp, Homo sapiens
gaccatcctcactaacacggtgaaaccccgtctctactaaaaaaattagcagggcgtggtggcgggcgcctctagtcccagctactcaggaggctgaggcaggagaatggcaaacaaacaaacaaaaaacaaaaaattagaactctgaggtgaaaagcacacgctatataaacacacacaggctcataagaaaataattggaattaactggctcaactaagtgatgcaggtttcaataggtgaaggtatatccccccacaatgaaacttgatttgggcattatatatgataagtgactaggctgtaccggtacgatcttgctgagccgaaaaaagaaatggaagcatatattttcatagtaaaattacttctgttggaaaaataacgaccaaaaagctctttggtcagaattacgtgttggtagtgtcagcaccaaaagctgtaggagagtccagcctacgtggtgtcttctgtacataaccacgaacaaaagcactccgagcagggcattgtatgaaagtagattaaacagaaagaatgtagtatttccagaactctaatgggtgtctgtataagggaaatctacgggagttaatagccaaatttaaaggctacggagtcgtaagtcagatgtctccccagccatgaaggcagcaggatccgtgtgtctgtctcctctctgtcccatcctgcaccccagactcgggacaggtcttagcatggacaacgtcactcaataaatatatgctccttcaatgcttagagaatcaataaatatatgctacctgaatgcttagattatcaataaatatatgctacctgaatgcttagattatcaataaatacatgctacctgaatgcttagagaatacgtaagcgtctaaaccagaaatacacactttttattctctgaagaggaagactgctggagtattcttacacacaaaacaagaaactaaaacagaatagccacaaagacactgtcagtacaactcgtaagcttgctctcccgtcctcaaaacacgaggcaaagggagactccgatctccaagagaccaaagccctcctctcctctccgaccaaacatctagaaacccgcagattcaacaggtgcccccgctgcggggcaggatgaagcagagagagggacaactcaagttcttgaccatttcgccaggggagctccccaaactgaggcagaaatgcaaaaagcgggaaagaggagaaggaaagaaaaaaaaatgtgtgtgtatattatacacgcacgcgcacacacacatatagttaaggaggtgggacaaagctatggcagtatttgaaacatctctccctctcctcttcttgtcctcacgcagggctcggggacacgtagggcgcatccctgcgggagaaacgctcgtttggggcgatgcggggtccccggcccagccgcccgcgcagccccgtcccgccccgccgctgtacccagcttcagggccgccttctccagcacccgctgcagcttctcccgggagcggcccgccacggcccagggcaggcgggagctccgctccgggtccacctgctcccgggccacctcctcggtcacgaactggccggtgaagccagacgcgccgaacaccaccaggtggaaaggcctctgctcggtcgccatgacgagtccacagcgagcccaggccccggggcgggtggagtccacggcgcctgcgcctcaggcagcgaccccagtacccggcgcagcaacggccgccgtcgccgcagccagcgcgccgggctcccttcaccccgcgcgcgccgccgcgccagggccgcgcccacgcccacgccgcctcgcgcgggagccgcgggtgagcggcttgcttgggaggcttccgacgggaggtttcctagggcggtggccctgggggcgagtccgcttccaagcctggcaggcgcggacggcggcccctaattccgtgcggcggtttgttctgcagggctctggccgccccgggcagcgcatcttctagccctgctggaagctggaggcggcagccggttgtccttgttgcacgtgggggtggagcaaagagtgcgagaaaatctgcggatggcctcggggatggcccaccccgagaacccttgagcttgcttgctttcttcctttctttcttcccttttttccctttcttttctcttttctgtttttgagatggagtctcactctgtcgcccaggctgcagcgcagtggcgcgatctcgatttactgcaaccttcgcctcctgggttcaagcgattctgcctcagcctcccgagtagctgggattacaggggagcgcccccacgccctgctaatttttgtgtttttagtagagatgggttttcaccttgttggccaggctggtctcgaactcctgacctcaggtgatccacccacctcggcctcccaaagggtcgggattacacgcatgagccactgcacccagcccattcctgatttttaaaaactctcattaaaataggaataaatgaatgcttttaaaaattttgaaatatatgtcttgcaaaaaaggtacagccaataacaaatatgtaccctcaacacagcttaagaaaaatattccagatagcgaggcttccaggtattcattcctgaacacatttccttttgcgtccccaagacggccacttgcctgaatttagtgtttattattcctattcctatctttctgcttgttatatatgtatgtatttataaatattatagtaccgttttgcatattttgaatattttgtaaatgtcaatcctgcagctttcttatttggtcatgatgtcgtgaacttattcccaaatgattcagaataaaaaaaaatgtctgtgatacgtgtgtggagagagggagagagagagaaatacaccaaattctacaatgcttttgtacaatgttgtatagtgcttttgtgcaatataatacaaagaatgctacaataaaattcttgtacctttctcctaaagcacctgtgcgaaagtgtattgaatatgtgtcaggaatgaaaatggttggtgctagaatatccatatttgagttatctcactgctctttaaagcacatgcactaattttcgctctcagcgggatacaagaatcctcttgctttacgtgcttgtcagcacttggtattctcagacttcatgcttgtccatctggtgggtgtaaagtagtaagcattcaagtatttattaaacacttaactatatactgggcactaggaataaagtactggggatatggcaacaaataaagcccctgccctcaagaagtttacattctagtggagtaaacagtcactaaaaaataatcttacagagccaggtacagtggcatgcacttttagtcccagctacttgggaggctgaggcaggaggattgcttgaacctaggagttggaggttatagtgagctacactccagcctgggtgacaaagtgagatattgtctctaaaaagaaaataaaaacaaaagaaaacaaaaaaccctaaaaaaacagaatatatatatatatatatatatatatatatatatatatatatatattttgttttttgggaagcatgcttgctatggtttggatgtttggcccccccaaatcacatgttgaaatgtaatccccagcattggaggtggggcctggtgggagatgtttgggtcatgggggtggatccctcatgaatggcttggtgccatccccaggataatgagtatgttctctctgcataagttcatacaagagctggtagttgaaagagcactcatccttctctctcttggtctctctctcaccatgtgatacattggctccatttcaccttctgccacgattggaagcttcctgaggcctcaccagaagcagatgctggcactacacttgatgtacttcctgcagaaccatgagccaaaatataaacttttttctttataaattaaccagcctcaggcattcctttaaagcaacgcaaaaatg

SEQ ID NO: 1945 - DNA, 4001 bp, Homo sapiens
atttaatagaggctcaatatgagtttctgagtgaatgaaaagaagcacacaagtaatattcctattctttcttggactaataaaataatacctgggatatagttctgaaaactacactttgagagagagcaaatctgagtttaaatgattacctagtgatggtaaacagacccaaaaccacatcacctgaggaccaggtgaaggaacatgaacaattagcatgagtaaaaaagtgaagtctcagagccattccccatccatccaacaaatatttatagtgtgtgtcaaagcactgtgctgagtgctggacatataactgtaatcaaaatatcatccttaacctcacagagcttcagtctagtgacagacagagaatctagtgagggacagagactaaacagtcaccactaagataatgtgataagtgctacactggagagacagagggtgctacaggagcacccagagtgcttgtggaaacttaccaaagaaagctctaggcttctaagctaaagtgtaaaaggataagcaggagtcaaagaaaaaggaaactctttttgtttgtttcagacagaaagaaaggcattataaaggcccagacatgagaaaaagcagttctaaatgcagatcttttggtatggctgctgggtggagtttacagaaaaagtagtttagaaaaaggttacagataaaggcagtgttcagtcattagcgagccaaatatactgtattactgagaagaggaagtcttcaagcgtttggggtgaagtcattctggctgtagtgtaaagaatgggcaggagggtgatagggctggaggcaaaaaagactagttaggaagctgttttaataatctaggtgtgagattcaactatgaaagcggcagagtggcaatgagaaggcagtccctagagcttctctctaaaaatcagggccagtaagtgaaaaataggctaaccctgtttcatatggccagaaagtcagagggatgactaacagaaattacaaaaagagcaaatttttgaccaataaatatgtctaaatatgaaatgaattacgtgaggaggttctaagtcctcaaaaacttgaggagttcaagataagacattttacaaaaaattcaaaatgttgagttttaaatgctgggcaagggtagattattttatggtcttttccaactttgagattccacagatctactgaattttatttcagtttgctatttggagctgctccttatgctagatggtaaaaatgaaatatgcaggattaacttacatcagaggatatgcctatgcaaccaatgctctaggaaaaatacactttcaaattttaacatcttttagtaactgatatactctatgttaaattgagtacccacatttcacaactccccatcaacagtttacaatatgccttaagctgtcactgagctacaattgttattatcattcatattagcgacaaaaccaaaaacaacagcagctatcactgtcttccatttgcctgtaccatgccagactacgtccattatctcctgtgttcattataacctgcaaagtaggttttactcccattttaaagatgaggaaataggcttagaaagattaagtaatttgcctgaagtcacaaaactggtaagtgggaataggaatttgaaccttggttcaaattgtctgactcctatgtccatgttttttctaccacacatcagtaccttaaaaagcttgaggaaagttttaaagaataataaaaaataactatcatttatcaagtgccaggcacctttacctgcattatttcatttcattcatttcttcagctcacattcatagaatgcttcacttcaaagaatgtcagaagatttgacttttagagtaaagtctgagtatagccgctgaacagaatgaaaatcataataatcctccaaagttgaaaagtatttgagagtttttaagatgttttcacatccattagctcatgtaatcttctttacaaccctgtgaagtaggcagaatgggattattatccccattttacaaataagaaaactaaggatcagagtcacaaagttactaagtggcagaactggctctcaaaaagcctaggagttctgactcctagtctagtgttctactacttcatgttatcttctgtgtcactgggcaatggaaagtaatatgttgcaggaaagaaaggcaagaggaggcaaatagacaatgataataatagagctaaataaatatcaagttgtaacaaaatatatcaaaatacttgaacaaaaattgatacaggtatctggatatcaaaatctatgtaacatataaaaggattttaaaggattctaaaatgttaagactgatgtttatgcaggaactctgattgagaagtattagaactagttttattactcaaatcttagtcctgaaatacactaaccagggaggaaaaccaaatgcaattattggtctgacttcttacttgataatattttaatatttcagtttttatttgtcaataaagttagaaaatgtttaggtttagtttcagttcaatttatcttacaagtaatttttttgggggaaaaatcccaccaaacactgatttatggatggcaggggtttgttttagttctggattcagtaaattaagatggtatttccagtttggttcagttcctgttctcccctataccccatgtaattaaccaccttccctcccttcttgttagcttggtctgtggcctactgataagcaggacttgatgtgacagctgagatgaagtacatgggataattaggcagacaagagcacaggattcactggtttctgagacagagacacgtggaattcttttcctcgttggttaaaactggttataatctaatccctggtttaccaattccccttatttaacagaaacacaagaaaaatagcttacctagatccaggatgtcagcagcttctagtaaagaaaaaaatgttggagcataagtcattaagacaaacataccaacatgatggaaggtgaaattctggggtaaaataggaaatcgagtatttgtctagttcagttatctcatcctaaaagacactgagattcttagtagtcattgtggaagcacaccacccaattttgcctattcccaagcctaaacttatacaaactatagaaaacccagagaggctaagcaaccgtgcctaaaactatgaagctaatttgggattacctatactcagaatctaggtttcctatttccagctaaaacaaagtatattgcttatgaccaatacctctgtaaactgcaatatttgcttctgatataacaattgagttatttgtaaactcagacctctaacaacgaaggttttatgggaaaagatgccgagtaaaatttttccacaccaaacggagttttttcccccttaccttgatattgggatgcagactctgataggtgaccatatttgtgttttctaacatcactccagtctatcactgcagagggagagaaaaatagtcatgtggaaagaaagtataagattaaatacttttccaatttggcagtatgtattaacagtttttaataaagtaatccacttccgagattctatgctaaggaaaaatactccaaaatacaagaaaaaggttttatgtaaaaagccttggcattgtttacaataacaaaaaaaggaacacctaaatgttcaaaatagaagactgattaagatttgataatacaaacacttgacaaagtattttgaagctgttaaatttttaaaaggctaaagaacaaatgggaaaatggttatgttatgttattaggtaaaatatggggataaaaattatattcatggaatgatcacaattatttaaaacactaaaaacaaacagcaccccagttatgggctcaactgtatcctccaaaacttcatgctaaggtccccactccgcagtaccgcagaatgtaactgtatttgtgatggcagcggtgggccat

SEQ ID NO: 1946 - DNA, 4001 bp, Homo sapiens
catttgcctgtaccatgccagactacgtccattatctcctgtgttcattataacctgcaaagtaggttttactcccattttaaagatgaggaaataggcttagaaagattaagtaatttgcctgaagtcacaaaactggtaagtgggaataggaatttgaaccttggttcaaattgtctgactcctatgtccatgttttttctaccacacatcagtaccttaaaaagcttgaggaaagttttaaagaataataaaaaataactatcatttatcaagtgccaggcacctttacctgcattatttcatttcattcatttcttcagctcacattcatagaatgcttcacttcaaagaatgtcagaagatttgacttttagagtaaagtctgagtatagccgctgaacagaatgaaaatcataataatcctccaaagttgaaaagtatttgagagtttttaagatgttttcacatccattagctcatgtaatcttctttacaaccctgtgaagtaggcagaatgggattattatccccattttacaaataagaaaactaaggatcagagtcacaaagttactaagtggcagaactggctctcaaaaagcctaggagttctgactcctagtctagtgttctactacttcatgttatcttctgtgtcactgggcaatggaaagtaatatgttgcaggaaagaaaggcaagaggaggcaaatagacaatgataataatagagctaaataaatatcaagttgtaacaaaatatatcaaaatacttgaacaaaaattgatacaggtatctggatatcaaaatctatgtaacatataaaaggattttaaaggattctaaaatgttaagactgatgtttatgcaggaactctgattgagaagtattagaactagttttattactcaaatcttagtcctgaaatacactaaccagggaggaaaaccaaatgcaattattggtctgacttcttacttgataatattttaatatttcagtttttatttgtcaataaagttagaaaatgtttaggtttagtttcagttcaatttatcttacaagtaatttttttgggggaaaaatcccaccaaacactgatttatggatggcaggggtttgttttagttctggattcagtaaattaagatggtatttccagtttggttcagttcctgttctcccctataccccatgtaattaaccaccttccctcccttcttgttagcttggtctgtggcctactgataagcaggacttgatgtgacagctgagatgaagtacatgggataattaggcagacaagagcacaggattcactggtttctgagacagagacacgtggaattcttttcctcgttggttaaaactggttataatctaatccctggtttaccaattccccttatttaacagaaacacaagaaaaatagcttacctagatccaggatgtcagcagcttctagtaaagaaaaaaatgttggagcataagtcattaagacaaacataccaacatgatggaaggtgaaattctggggtaaaataggaaatcgagtatttgtctagttcagttatctcatcctaaaagacactgagattcttagtagtcattgtggaagcacaccacccaattttgcctattcccaagcctaaacttatacaaactatagaaaacccagagaggctaagcaaccgtgcctaaaactatgaagctaatttgggattacctatactcagaatctaggtttcctatttccagctaaaacaaagtatattgcttatgaccaatacctctgtaaactgcaatatttgcttctgatataacaattgagttatttgtaaactcagacctctaacaacgaaggttttatgggaaaagatgccgagtaaaatttttccacaccaaacggagttttttcccccttaccttgatattgggatgcagactctgataggtgaccatatttgtgttttctaacatcactccagtctatcactgcagagggagagaaaaatagtcatgtggaaagaaagtataagattaaatacttttccaatttggcagtatgtattaacagtttttaataaagtaatccacttccgagattctatgctaaggaaaaatactccaaaatacaagaaaaaggttttatgtaaaaagccttggcattgtttacaataacaaaaaaaggaacacctaaatgttcaaaatagaagactgattaagatttgataatacaaacacttgacaaagtattttgaagctgttaaatttttaaaaggctaaagaacaaatgggaaaatggttatgttatgttattaggtaaaatatggggataaaaattatattcatggaatgatcacaattatttaaaacactaaaaacaaacagcaccccagttatgggctcaactgtatcctccaaaacttcatgctaaggtccccactccgcagtaccgcagaatgtaactgtatttgtgatggcagcggtgggccatctggagcagctgctgtcatcatgccggctgcagcagggaggcacagctgggaatgcatgctccatggagccggtgggagcctgggagcaggcaggagtcccgccatcctgggtgcagctgcagccacccaaaccgaggctgcaaacccagacctcctgctccatggaacaggcaggagccctgccgtgacgggcacagctgcagccacccaaatgtggctgcagacccaggtacccctgcactcttgggggtccagccaggacccctcttccctcccaggatcagaaatgcctgctccccctgcctggcttctccctgctgttggcacctgttctgatcttggagcaaagtcagggtggagtctggatgctatgaatggcagcaggaggcagataggttcctaagcagaaaagggcggatccctggtgaggcccaccttcaggccagggagagcctgaaggctgggggctgaactgccagtcctgcagactggagtggggacttgtggtgccttttccaggcctgcctatggccacccatagaccaatgggcacacacttcctcccctctgaggtccataaaagccccaggatcagccccagagcagagcagaggacgaagatatgactgaacaatctgcctgcagaaagaagccacccattctagggcctcctctttgctgagagctgcagagatgacgtgacaacctgcttgcagagaggagccacccactctagggcctcctctctgcctctgcagagaactgcagaagatgggatgaccagctgcagaggagccaccctctctgctgagaagtgagtgaacacttgttgggaaaacctacctgcagagaggagctatccttcctgctaggggctgaacactcactgggacgccctggcactgtgagtcttctctgagctgttccattgctcaatacagcacctcttcatcttgctcaccctccacttgtctgcgtacctcattcttcctggttgcaggacaagaactcgggatctgctgaacggcgtggctaaaagagttgctgtaacaccaaaagggctgaaatatgccccctgcttgctgcagtttgggcaaagagaaggagggaagagctgcagccctttggggagcccagacctgggagcttccggagtcagggctgtgactccctctttccggccctgtggttcctccaagcttttggggactactgcattctttggtgccagccagggaagctgcttgtggtgtgcctggtccagctgcagcctcacagagagctggcatccatgctgcacctggagctgcccacttgcggcaggagctggtgtgtctgactgcgcagtagatgggccccaagctcgttcatacacactcctcaccactccatgcctaactccagtctctcttggaggcgtgagatccaggctgatagcatgagcagcctgccaggccaagtgagtggaacgagcccagtgggcccaagcaaaactcag

SEQ ID NO: 1947 - DNA, 4001 bp, Homo sapiens
ctaaaagacactgagattcttagtagtcattgtggaagcacaccacccaattttgcctattcccaagcctaaacttatacaaactatagaaaacccagagaggctaagcaaccgtgcctaaaactatgaagctaatttgggattacctatactcagaatctaggtttcctatttccagctaaaacaaagtatattgcttatgaccaatacctctgtaaactgcaatatttgcttctgatataacaattgagttatttgtaaactcagacctctaacaacgaaggttttatgggaaaagatgccgagtaaaatttttccacaccaaacggagttttttcccccttaccttgatattgggatgcagactctgataggtgaccatatttgtgttttctaacatcactccagtctatcactgcagagggagagaaaaatagtcatgtggaaagaaagtataagattaaatacttttccaatttggcagtatgtattaacagtttttaataaagtaatccacttccgagattctatgctaaggaaaaatactccaaaatacaagaaaaaggttttatgtaaaaagccttggcattgtttacaataacaaaaaaaggaacacctaaatgttcaaaatagaagactgattaagatttgataatacaaacacttgacaaagtattttgaagctgttaaatttttaaaaggctaaagaacaaatgggaaaatggttatgttatgttattaggtaaaatatggggataaaaattatattcatggaatgatcacaattatttaaaacactaaaaacaaacagcaccccagttatgggctcaactgtatcctccaaaacttcatgctaaggtccccactccgcagtaccgcagaatgtaactgtatttgtgatggcagcggtgggccatctggagcagctgctgtcatcatgccggctgcagcagggaggcacagctgggaatgcatgctccatggagccggtgggagcctgggagcaggcaggagtcccgccatcctgggtgcagctgcagccacccaaaccgaggctgcaaacccagacctcctgctccatggaacaggcaggagccctgccgtgacgggcacagctgcagccacccaaatgtggctgcagacccaggtacccctgcactcttgggggtccagccaggacccctcttccctcccaggatcagaaatgcctgctccccctgcctggcttctccctgctgttggcacctgttctgatcttggagcaaagtcagggtggagtctggatgctatgaatggcagcaggaggcagataggttcctaagcagaaaagggcggatccctggtgaggcccaccttcaggccagggagagcctgaaggctgggggctgaactgccagtcctgcagactggagtggggacttgtggtgccttttccaggcctgcctatggccacccatagaccaatgggcacacacttcctcccctctgaggtccataaaagccccaggatcagccccagagcagagcagaggacgaagatatgactgaacaatctgcctgcagaaagaagccacccattctagggcctcctctttgctgagagctgcagagatgacgtgacaacctgcttgcagagaggagccacccactctagggcctcctctctgcctctgcagagaactgcagaagatgggatgaccagctgcagaggagccaccctctctgctgagaagtgagtgaacacttgttgggaaaacctacctgcagagaggagctatccttcctgctaggggctgaacactcactgggacgccctggcactgtgagtcttctctgagctgttccattgctcaatacagcacctcttcatcttgctcaccctccacttgtctgcgtacctcattcttcctggttgcaggacaagaactcgggatctgctgaacggcgtggctaaaagagttgctgtaacaccaaaagggctgaaatatgccccctgcttgctgcagtttgggcaaagagaaggagggaagagctgcagccctttggggagcccagacctgggagcttccggagtcagggctgtgactccctctttccggccctgtggttcctccaagcttttggggactactgcattctttggtgccagccagggaagctgcttgtggtgtgcctggtccagctgcagcctcacagagagctggcatccatgctgcacctggagctgcccacttgcggcaggagctggtgtgtctgactgcgcagtagatgggccccaagctcgttcatacacactcctcaccactccatgcctaactccagtctctcttggaggcgtgagatccaggctgatagcatgagcagcctgccaggccaagtgagtggaacgagcccagtgggcccaagcaaaactcaggcaaaggcaccactggccacaggtttccggccagaaaagcaacacccctaggatcccacaatatttggagaaagggtcttcaaagagataattaagttaaaatgaggtcactaaggtggtcgctaattcagcatgactggtgttatcataagaagagaaggtttggacacaggtacagagaaaatatcatgtaatcaacagagggagaagcctcagaagctaaggagtgaggcctcagaagaaagaaatcaaccttgccaatcaatgccttgatcttagacttctagccttcagaattgtgaggaaataaatttctgttgtttaagccacctagtccatgatatttgttacagcagccctggaaacttagacaactgcggaaattatcattagaaaaaaacatataagtaaacacagcaaatataaacaactggttatctttgggtggtagtactgggttccctgacactgcacccactttctactttataatcttatatattttcaaattttccataaaaaggatacattactcatataaggagaatatattttccttggttgaaaatttagattcatctactgactctactactttctcaccatcaatcacctatcatgtctttacttaatttcttgcccagctcagactccatggtccctcattaacatcattctctggcaaacactcttaattcctccttcccatctcttttttgtcaaacgtacctactaaaggctcaatcctaaatctggttaaatcacgtatcaacctatactgtgcctaccccagcagctcactagtgctgaagaaaaacatatgcaagctaattggtctcattttaaactcatagctataattctcaaatgccactttacaccacccagaaatcataccacatttctacactatgtttacttttccaatttctaaaaaaaaaaattcgtatctttctctctctcctcaaactccaaatatactctccccaacttcactcttaggggatgactttaattcagattcattgagaaaacagaaataagggtaagacccttccacttatttcacgacggtagagacttgatcttgtttagtggtgaatccccagtaagtagtatagtaacaggcgctcattaaatgtctggtgaataaattacctattcattcatgattttttctgacttctctcctgttactgtggatgaagtgtctctgtttttatcaaaagccaaccctccattttagctgcaggtcccagagtctctcatcctctcaaaaaccttgcaagtatcccctttattttttttgcttttatttgtaattggccaacaataattttacatatttatggggtataaagtgatgtttcaatatacgtacacattgtggaatgatcacaccagagtatagcaattagtatatccattactttaaatatttataatttctttgtggtgagaacatttaaagttctctctttagctatttcgaaatacataatacattattattaactacagtcaacatgctctgcaatagaacaccagaactactcctcctatctaactataagtttctacctgt

SEQ ID NO: 1948 - DNA, 4001 bp, Homo sapiens
tgacatatgtgctacaaagttcaaaactattgaccaatttaaaaaatgaaggcttaagaacaaaaataaagaaccaattctgactgctggtatgtgcttgtctaagttgtaaaaacactgaaactttgcttagtacttaaacaggatcccagatgtaagagcctggccttttatctacaaggccatctcatctctactgggcttaaaacattactaacctgcagagttgcttaggcaagagtttaggaggttggtaagtaagcaacaaaaagtgttctctttcatagtaattttgggcctcctgctggcagttagaactagagcaaagagttcaatgtaataaagcatttccctctgcaaccaaatattaaaattgcagtttggcactaaactaggtctcaatccttttcagagtttaaaaaaaaaaaaagagctattctatttgcctggcacattacacttcaacaaaacattttgatgtacattagttagcaacatttgataaagtgtttatagacattttttaaaaggaaggaaacccccaaatttccacaaaataagatgtcttttagtttgtttgaacaaacactactaaatgttttcttttttttttttttttaagttcaaaatacagtacagaaatgaggaagggaatctagagtacttttgatttaagcaggtcaatccttggggctgtttcttagagaaacttactacgttttgtctccaggatcacttttaagaaactctcctttaaggggatgggggaaactaaagctcatccagaggacagtttagagaaccacagcagatgagagacaactgaagaaagtggaagtgaagactcaggggacatgattactatcttcagatatcttaacagcttcccataagggaaaagaactaggaaggatgggagccagctgtttctttcaacttataaccaaatgtgtccaggaacagaatgggtttcctttaaagagattcgcttcggatcactggaagaggttccaaacgggctcgtcaaattatcggggggatttggggattttcaaagtcactttggcatgggatgggagaaagcgcccctagatgacttttaaattctcttccagtcaggagatattccggggttcacccatcggctggataccactttcgatgctctcgggctggcacacaactgtgcccacgtgtctggcccccagggccgctgtggctcacttcggtgcggggccgctctccctgcccgtttccggcggggcactggggcaggcggcacacgtgagtcggccagccggggcccagcccccaggacgctgctgacagctccgggccctaggcgccccagctctcggtgggggccacgccgccccgtcgacctctgtctctgccttccccgaaccgggacccggccagccagaatcacaggcattcccacctctggcgccggaggggaccgactgacccgcgcagacggggtcgcgccgccgcccggccctcggcccccagccagcctgccccggcccacccggccccgccggccagacacggcgacctatacggaccgcccccacgccgaccctccaaagggcccccggccttgggtttcccgtgccggggcccccgggcagtcctggcggcgtcagggccgcgaccggaccgtgggccccgcccgcccgaccgcagatgcagagccggcctccgggctcggggccgggctgacacggccgagaaagggcccagccccgcgcggaccacagactggcaggccggccagacagacggacaggctgaccccggcccgggggagcaggcgcagcggctgcgcaggtcccgccaccgccttctggccccaggcggcccctcagggcacgagctcttaggcgggcggaggcggccgcgaggcgcttacctgagggcgcggcgggggcgcggggcggctcactctcttcccgccgccatgtttccgctgcgcagggagggagcggagacgcgggaagggggcgggcgggcggctcgggagagcggcgggcgggcggcggggggctccaccgagctggcggtggcggctgaggcggggggcggggcgggggctcccccggcccctcccccgcgcctcccgctgcgaggtggcgcgcgcctcggccgttgggctcgcgcggggggcggggcggcgcgctggaggagggagggcgcgcgggaacccggcccggccgtaccccgccggcctgccgacccgggtccgggggcccagttggcgcccggaccagctctccggtctgcgtcctgtagatgggaaaactgaggcctgagagggcgcgagggcggggacgaggccgaggactcgggttcgaatctcgaggacgccagtagcccgctctgaggccgcgtggggctggtggaggagccaccggtcgggcccccaagaccggctgacgtgggcctcgcctcgggcgactcccgccgggctagtggctggccgtgtggtgaccttgggcgagttacttcgcacagccacccaggggcctcttctccaacacgatagcactgcacccggagggtaggtgagagatgagttggtgcttggatgccctagggagtgtcagcgtcctcggtcctccctgtggtgatcccttcaacgagtacgcactgagcccgtgatgggccaggtacaatgcacaggctcattcttccaggcccaccagccatgttggctacacaattctatttttgttttgttagagatggagcctcactttgtccccaaggtcggagtgcagtggcgccatcatagctcactgtaacctcaaattactgggctcaagtgatcctcctgcgtcagcctcccaaagcgctgggactacaggcgtgagccactgcgcctggcacacaattggtttaaccaccacatcattttagcagcttaggaaactgacgtcttgacttctgttttggctgcttgaaaatacagtgcaatataaatcccgagacctctgctgagctggatgtggagtgggtgtgggcatcatttagaacatggcaatcctcaggtcacacaggaatgtcttgttaatgatccttctgtgaacaatgttccttggagggaagtccacttaagcaaggctggagcagcagatggggcagctgagcctggattacttgccttgcctctagaataggtcttagagctttggactgaaggggggccgcctccttgtatcctggtattggtgtcagtatccgtctgcccattcttgagaaatggaaatggtcagaatctatccaggttctgatctgcatccctgttgtctaatttaaactttcattccatggcgttttggggagtacctgtctcatgaagagccctgaggttacaaggataattagagcctaaatctaaggagcccatatttggggaaactattatgtcaatagctaatgagagcacagtgttgtaagtgctcatattagttttctattcctgcataacaaattggcacaaattttgcagcttaaagcaacacccattgatttactcacagttgtgtaggtcggaaaactggcatggtgtggctgggttttctgctcgtggtgtcataggctgaaatcaagatgtctagcacctccacgagggaaaggtctgccccaggctccttcgggctgttggcagaattcatgtccctgtaggactaggatcccacagctacactgttttgccagctctctgttggggaccactctcaggtccttgccacgtgatcccttttatctcatcaacagagaacctttctcatgtcactccctctcattctttaaatatctctgatttcccttcttcaaccagtcagagaacactatgagcttttaaaagacttgtaattaggtcagacccacctagataatcttcctactttaagatcacctgtgccacatcacataccctaatcacaggagtaaaattcatcatagccactgtcccagggactatgcagaaggtg

SEQ ID NO: 1949 - DNA, 4001 bp, Homo sapiens
tacaaaggatttcagaatcatgaatttgggaaaggctagcttaaaattttacaagttttttttaatcttaagactttgtatagtttttaaaactgttattcttcaagtagaattacaaagtgccatttcccaaactttatttaaaaatcacaaaattctccttttctttttctttcttttcttttttttttgagatggagtctcactctgtcacccaggctggagtgaagtggtgtgaccgtggctcactgcaacctctgtctcccggattcaagcaattctcctgcctcagcctcttgagtagctgggattacaggcacacaccacacacccagctaattttttacatttttggtagagacaggatttcaccatgttggccaggctggtcttgaactcctgacctcaagtgatccacccacctcagcctccaaaagtgctgggattacaggcgtgagtcaccgcgcccagccaaaattctccttttcttgaaacactaagtaacatctccagaacactagtattcctcagaatacacactggaaaactcttttagagccatctgtctccttctgagccttcctacctctggctttcccgtcccatacctgtacttccggcggcagcaactgttatagtggggagctctgtgcagagcactctgggtgataagtcgtgtctgagttagcagaggagcctggtaaggagatgggagacagagtcagagccttcagccctccgcccttccagcctggtgtgtgcagcagggtcttgcctagaacacactctccactctctgattacctcagctttggtttcttcccttctcaattcattctgatgttttggattctgctttctttcctttcccggctgcttcttgccatagaaaagctgcaagcctgaggagaaagggaaacagaattaaaagcatagcaccaagagtggtgtgcagagatttcgagggtttattccccatcccgtcttccccctaacttactggacagatgtttcttgcctgcacggtgggcagtcagcatggccagggtgtccagtaccggtcgatgggggcagatggcacaagcaaagctgagcaggggtagagaagaggataagtggtccaggggaagagggttgggcccgtccctgccataggtcccaccctgtcctagcagtctttgcaaaacccaactccctggtgacccaatctccacttcttccagtcctcactggccgccaaagaatcctaggtactcctgctgtcctaattaataacaaaagtttgttgaagccaggcgtggtggcatgcgcttgtaaacccagctaatcgcgacgctgaggaggcaggatcacttgagccctagagttcgagggcagcctgggcagcaccgcgagacctccgtctcaaaggaaaaaaaaaaaaaagtctattgagcctctaaccgcagaaccctcaggcttgagccactccttgctcttaccgtccatcccgaagcatcagcgcctcatcctctggaatgtaactggctaggaggtccccgactcttcttttctgcagggagtaggggaagaaatccggacgggatcagcgggataggagagaggggtggaagtgaaattatagaaatgaggagtgaaatggaataaggaccctggggagaacagcgatcatagaccgaaaaaggagtcactacacagctctaagtcgcctggttctctcctgcacccccgagttgttgccagagcaatgaaacaaagctccttcccaaccttcagggagcgactgaagcggctccagatcctctccgctcacgcttactttgagcacattgagttgactccaatcgtctccttccctcttgaaagacatcacgactgtgagtcccagaagtgataaattctctgttccggtttcgccactcctccaggccaccgtagcaagagcgggacagcgccttctcttttttccttctcttcctgtcggcctccgtacttccggggacgcacttccacgcatgcattgcgcgatccggaaatccactctctggtgctcggagggaactgcatttcctatggtgccctgcgactccgcagacgcggagccttttgggaaatgaagtcttttctcaaagaccttgccgctcaactggatccaggcccttgcatcttggcggatctgaggcgtttggagggacaacaacctagatgtggagccgaaatttgagggtgtgacctatcttatgcggagcggacctttgaggatctctgagtggaaggtgtactacaaattcttgcaatcctcacgctcttcgtctgcggcgacagttcacctggggtgggcctgatttgttcctgactctagcaaacaaaccccgggaccggggagagctgggatgttggagcgccctgaggccaggctacttgggggcaaactgaggaaagagtgttgaggattatttctagagttcaaaggtcagaggtcaatgtagcgaggagttgtgggggagtccaaagtcggaggggtgcttaggggagaattagggagggactgaatactcaagggacagatttgtggataagtagcttggagggaggagaaaccgggagggggcagatggcgtagtgctggggaggcggggacacaggggaagagagagggggaaaggaatcccctgaatattcattcccagacttcaggcctgtcagtcgcagtctcggtcgtacctcccctagttgcaaccttagctgttggcagggtgaagagatggcttccccgtctagacagcccccgccaggggggtcaggactgcttcaagggagccgggctcgttcatatggaagcctggtgcaatcggcctgctccccagtgagggaaagacgcctggagcatcagttggagcccggagacaccctggctggactagcactcaaatatggggtgacggtgagttttccaggattggggtgaagacaacagtcaggagggatttagtcctgagaagaatgtagtggcccttctaggtaacctcccctgaaatgttcctaatgtgttgcactctgttctgcctttatctttgttttcccatcacagtgttgcacaagtcctgccctactattccaacggagaggaacagctcctattttattatgccagacactgtgctgagggcttcacatacgttagctcatttcaccctcacatctgtatcaagtatacatttatcgttcccttttggcagatgaagaaactgagacttggattggttaaccagtttggctaaggtcaaataatgagcgtcagatttgggattcaaacaggtctgtctgactctattaaccacacagaaaattttatgttgagagtgattaaacgtttacagcaactaatggagagctgatttttagttctcagttcctaaagtgcccacctctccttgctcttggttcctcctcaatgctctgccttctttccagtaaggtggcctcctttgtgcaaaacaggtactctacaccaagtatttcaggtcatgcatgggggaaattggatagatgtaaaaatgtacagcattgaagttgatggggttactccccctatccctgcccctgttttcttgttccatctcactcaaacaaatgttgaatttagccaacatttttatgcttgctgtatttaaagcactgtgataacttttctgggagatagaaacttaaactatatggttgctgtcctcatgtaatttatggcctaatgagaaatgaacagggacacaaataatgattacaagtgacagaatgtggtgagtttgtaaaggtattaacaacgaataggggtcaggcatggtggctcacccctgtaatcccagcactttgggaggcagaggcaagtggatcacctaaggttacgagtacgagaccagtctggccaacatggtgaaaccctgtctctactaaaaatacaaaaattagccgggcgtggtggtgctcacctgtaatcccagcta

SEQ ID NO: 1950 - DNA, 4001 bp, Homo sapiens
ggctctgtgttcctgacatcctgccccaagtggtgctgggtccctgggcttggctgggggagcccagccccacagggtccagcagcagagccatggctctgaggagggtgaggtcacctgcctgccggctctggaaggaagcagctgccaccggtgacgtcctggagaggaaagccatgctggagtcacccaggcctgtgtgaatcacagcttcgtcactggctgtgtggccttcccgagttactcaacctctctgagctgatttccttgagtgccagatggggctggggtgcctctccaagctcgcggcagggggcttgctgatgtcacagagaccccacaggtcagcggcagggcccccggacacagcacaggcctggggcttctcccccaccacatctgggcagctttgtgcgtgggccgcacctgccgaggagacagggcacacatggcccgggcggctacttggcaggcggggacaaggtcctaggtgcttgccagagattgtggctggaagcagcctgtgcctccctgtgtccccgggagtggcctggcagacagcccagccttggtgcagggtgcagagagagaaagagcccaggtccggccagtggggcccggtccagccaaagggcagcttgcaggagcaaggcccccggcttcctgtaggagggggagccctggccgggggcagagcaccccttccatgacccgtatgccctgcagggcctcagtcagagcacatctcggctggatcacgcagctcccggctccacccccctcccctcctcccgggcaaggcctctaagggctgaggttcagtcacctgtcccacacccctgtatcgggccagagagtaggcagagggggtagccacagagcacatgtccagcactggtgaatccacatggtcctccccctcttctgggccatcccctcgctggcccggtgcagggggtggggtggggcgaacccagctcccggcatgtgggggtcctgtggtcactgcaccatgaccaggtgagcctgaatgagagaagggacgggcaggcatccctggctccctttgggcccatgcctctgctctctcccaggaaagacggccaggccccattgaccgagcatggctgtgagctcacctccttgggccgctgaggtggccgggccacaggtaacgagggagcggtgttgtcttctgtgacagcactgccctggagatggcaggcgcctggcatctgtgggaccccagccaggacctcctatcccagagccccgtttcctcccctggggtgagcgtcccccactcagggtcactctgagtcagccctgggacggttctggtgcaatagacaggcagcccaaggtcgggattcccgtgggcatgggcaggccaggggtggcctggggtccctctggggtcctgcacccaggcaggtgaacagcctcccaggcagagccccctcggccccgggcatcaactgcactgtccagtggagcctccgcagaacaggcactaaggtggcaccaaggtgcccccggctgctggcctgggtgggtgctgagggtgggagtgtggagcttggggtctggccggtgtcccctgctgggaggagtaaggtgcgtgtgggctgccttctaggttccctcataaaccaaaaataaaattataagccctgaactgtctggatggacccctggtcttagccatgggcattccaaagttaacctgaaaaactagctcagctgtgatgggaagggagtcggacgcacctcatgcctcctccctgctggaattcaggcacagcatcagcatcacctcaggccttgagtctgatgagaagcatttatagttgattctctctgaggcttgtgacctggtggcttcatctgcgataagaccttcatctgcacaacgccatactgtaaccagacattcccttctactgataacaactcttttttttttttatttattgagatggagtctcgctgtcgcccaggctggagggcagtggcgcgatctcggctcactgcaggctccgccccccgggttcacgccattctcctgcctcagcctcctgagtacctgggactacaggcgcccgccaccacgtctggctaattttctgtatttttagtagagacggggtttcaccgtgttagccaggatggtctcgatctcctgacctcgtgatccgcccacctcggcctcccaaagtgctgggattacaggcataagccactgcgcccagcctaatttttgtatatttttttagtagagatggggtttcaccatattggccaggctggtcttgatctcttgacctggtgatccgcctgcctcggcctcccaaagtgctgagattacgggtgtgaaccactgcgcccggccacctttttcttaagacaaggagaacgactcccttttgggtaccccatttggtttctagctcggacgtgcgttcctaagggtcttctctgttgctttttctcccaaaattaagcccaactggcttgtgcgtgcatttgcatgaggaactgaattgttctttgcatagataaatgagagactgagttttctcagctccagaaagaaaggcattttgctcctcccagctgaaaggcgcccctgggtgactgtgagccaagtgggagtatctcgtgggctgatcccccacgacgtgcagcagccccacagggaaccccccaacacaattagtttaaaaaggtttgtctgctgggtgcagtggctcacgcctgtaatcccagcactttgggaggccgaggcgggtggatcacgaggtcaggtgatcgagaccatcctggctaacacggtgaaacctcgtctctgctaaaaacacaaaaaattagccgggcattgtggcgggagcctgtagtcccagctacttgggaggctgaggcgggagaatggcgtgaacccgggaggcagagcttgcagtgagccgagatcgtgccactgcactccagcctgggcgacagagcgagactccgtctcaaaaaaaaaaaaaaaaaaaaggtttgtccaggaaatgcacataggagctggtcactctgtgttttgagtcctctcggaggtgttggacttctagagagagaaacagagacacgtaagagggcgaagatgcctcagtggtgacacactggggagtcccgcccacgacccgtccacgaccggcacactcaacctgctccacggaaccccattccacagctcggttcctctgcgccccacctgctccacggaaccccagttcctccatactcaacctgctccacggaaccccaggccacagctcagttcctccgcgccccacctgctccatggaaccccaggccacagctcggttcctttcaagaaaaaaaaaagtgggaaataaataatgtaagcctcagcaaagacaagagggcgacctccttccaggcaccccgctggtttcaggcgcctctacctgcaagtgttggtataaaactgaacatgtcgcgggcatgctgggtttcctagtgccccagctggttccatattatggtcttttggggcacattttaaactgatgggcaaattccatccaggaaaaattcagagcccaaaggtcagcctgcaactacagaaccatagagttcctggccaggcgcagtggctcacgcctgtaatcccagcacttttggaggccaaggcgggcggatcacctgaggtcaggagttcgagaccagcctgaccgacagagtgaaaccccatcactactaaaaatacaaaaatgagccgagcgtggtggcatgcacctgtaatcccagctacttgggaggcttaggcaggagaatagcttgaatctagaaggcggaggttgcagtgagctgagatcgtgccattgcaccccagccagggctgcaagaacaaaactctgtttcaaaaaaaaaaaaaaaaaagaactatagagttcctaagttctctatctctctgtttcctttgctgcctgccttaa

SEQ ID NO: 1951 - DNA, 4001 bp, Homo sapiens
caaaactccgtcttccaaaaaaaaaaaaaaaagtgttacagtgttgtctagtcaatatttctccctcctccatcaaactctgtcccaaggtgcagaagaccagacctatagcaaagtacactggccagataggcacatcattaatggcactacccaaactcctcaccactttcctctggactgtaacacctccccgacctctacctcccaacttgaggaaaaaggaatacatctatttcccaaaggtttagacaactgtgcttttccatacagcacatataatcaggcattcagcagccagaggaaggtttgactgcattaataccttacttcgaaagatcctactgtccacctgtgttagaagcctccccttctgtgaaacactaggatgatgtccttccgcttcataaggtattggtccacttttccatttccatggatattttttgtttttgttgagacaaggactgactctatggcccaggctgggggtgcagttgcgtgatctcagctcactgcaacctccatctcccaggctcaagcaatcctcccacctcagcctcccgagtagctggcgtgtgctaccatgcccgactaattttcgtatttttagtagagacggggtttcaccatgttggccaggctggtctcgaactcttgacctcaggtgatccacccgccttggcctcccaaagtgctgggattacaggcgtgagccaccggccccggcctatttacatgttggactgaattaggtacgctcagcccactggtaaaataataaacattttagggctgttttctcagaaatagaactctccctaggaactctttcacaaagcatatccatttagtattgttcaactaacattcactgagggtcttcaagcatcaggaacgttcagggcgaggggcacagcagtgaataagccaggtacccagtctagaggagctgccatgctaagagggcgcgcagacgcctatgagctttagtactgcccggtactgccgagcacagtaagtgcaggacagaggtaagcacagtgcaaggctctaggggaaagtcaggaggatccgaggcgtcctggagaagatccgatctgaacggatcctttcaggatgcacaaaagttaacaggtgaagatacacggtacaaacagaacagaagcaaagcaacagaggcatcagacaactgcgtccggggagaaacgaaaggcagtttggcattaaggagcatgcgggcgatgaggggaaaacggccgtgggagcctgcggcgtccgggtcccaagcagtcactggagggacagagggaggccggaatctgccactcgggccgaggcgctgggcatcaggagcgtttctcctcgccatccacatctggagctgtctctgtgagggctcctgtgggggctgttcctgggagggccgagcaggcggcattcgcgacctgcctccctccggggcaagccagcccacacacctcgggactccgctcagaatctaaagaggtgagatccttggattatctcggggctgcttcatgaactctgaccagaagaaaagggaaggaggaagcagaaggccgcaggaaccagcccgagacgctatgaccccagagattccgcagagtacaagccaccaagtcgccacgccgatgacccacgcgcggagcagtcgaagctaggagaccggagggacagagaaacccaggcaccgaccgcccccgagcctcagagggccagcagggccgctgctcggtttaccttggtcatgccaacccccaccacgaacacccggcgcagggtcgcaggctcccacggggaagaggacatggctgcaccagtgcgggaccggggcgggcgccgcggacgactgccggcactgacaggcggagactgcaccagagctccctgaagcccgaagccagggccgcgggcggcaacacaggcgcgtgagagtgcgcgtgcgtaggggcaggaggagggggcggggtggggcgcgtcctgtggggcggggagcgttctctagcccttaggcagccgaatccctaatttgcggacttgggcatgggactgagtcaacctgtccccatctctgatcctgtgcttaggttctgtacggtgagcgggagtaggcttgcagtggggcctaagactgagaggaggggttggccggaaagcggactcatgaaaggtgaccctgaggagagccgttggggttcgtgttggaattggcctgtgtcctgttagcggtggcagttgagagtgaattcatgaatttaaactcacaggacaccaagaaagcggggatgggcaggatctcacacatggatacaatgtctaaatcaaaaaacccaggctccgtcaccagctgcgtgacctttttaatcttgtgaacaaaagttctccgaaaaggaatttggaagacagagactttattccagcaaaccggggagaaacagccttccatgtttattggagaccggagtctcgctctgtcgcccaggctggagtgcaatgccgcgaactcggctcactgcagcctccgcctcccaggttcaagcaatcctcctgcctcagcctcccgagtatctgggattacaggcgcgcgccaccacgccccgctaatttttgtatttttagtagagatggggtttcgccatgttggccaggctggtctggaactcctgaccttaggtgatctacccaccttggcctcccaaagtgctgggattacaggcgtgagccaccgcgcccggctccccggtttattttatcttatgtaaaaatgcagattcattgagctagatgaatgcataagtgactatttctctacccccctcacatgtgaaggttgatcaaagactcagaagaatgcaaccgtttgcctcttatctacccacatctttttaaaatttattcatctttccccaatatctgccccttcccctataaaaactgaagccctcaaaatcatctttggagaaaggcacggacctgtctccaaagatgatgcacgtccttaaacttggcaaaattaacttctaaattaattgagatccgtttcatatacttttcggtttgcagtatcagcatttagaaaggctctcctagaagattctaaggattgcttcttggccatttggctaagatcaagtttaggagattctaagaagccccctctgtgctaagtaaagaactactgagctaggactagaccaacttagtaaaattgctgcgctcagtgatgcacgcctcccatctgctcaggaggcttcggcagaaagatcacttgagcctgggaattcaaggctacaaatgtgctatgattacacctctgaatagccactgcactccagcctgggcaacataccaagaccacgtctctaaaaaaccaaaacgaaacaaaaaaaaaaaaaaaagaaaaacaaacacaaatcagggcactgacatgtacagttgtttcttgaaactgatggactgacaagacagcaatatgattggtggatcagacaaagttaccaacctaatagaacaacaagtcctaaggtcaagattaattgttatgtaacaaatcctggctgtccactggatattgctttcaaaataagagtccatagagggcagaggggatagatagtaatataaaaggtatttgttaataccgaaaagactgagaaaaaacacttccctttccaatgtgaaggactaaataatccaaacttttcccactataaaacacagacttttctaagtcattggatgtggggctctggggtagcctgagctgtttgtcccacaccaagatgcttcaaaacattattaaaaatgtttggatccccatgaagccctattataaccaagtttatcaggagatttgagtaggaatggggttaatgagcctcatcatttataaaatcaggagtactgataaaataagtaaaatattgaaagcttctccacctgcttatggtcatcactaaccagcttcacttagcatg

SEQ ID NO: 1952 - DNA, 4001 bp, Homo sapiens
cctccacactcctacaacagcttcctaagcattcctggcctctggtctctccaccaccagctcaaagtaatgtcagactgatctacctaatgtgtaatatagtcacatgatcttttgctaaagaatatctttccatattctataggataaattccaaactcctgagcattgcatctgaatcatttcaaaaccataatcccactttgtccctctacccaggcacacacaaaataatctactctgtacccacacagcacaaccacttgtcaaacctccttgtattttcaaatttctatacctattgtacagacttggaatgcccttcccctatacttctgttgggcaatcctagtcatctcagttcaaatttactttcttcataataatttcttcctctgagcttctacagcattttgaaaaaagtatgttgccttccccatatatttagaggaccatacaagactctgtctcaaaaaagaaaaaaaccccacaaaaacttaagattcaatactttttactcccattcaataaacatatgagagactccaggaacaagagatgtaagtcacagtcttaggcctcaaggatttcatataataaagggaattaaaaaccggatacagtgcaaccaaaccaactagatagtacccaaaaacatacaaagtgctgtggatattcaaaaagagatggtatttgagacgggctttaaattataagttttacaacagaaattatattctgggcagagaaagaggagaggacaagagaagagatccaagagcttacagaagaataacatagactcaataaaagaagtgtgtctccatgtatacatatgcaacaaacctgcaggttgtgcacatgaaccctacaacttaaagtataataataaaaaaaaagaagtgtgtctcatatcctttgttggagaaacaaaaaagtgtgaataaatgattaaataattaccaagaatttcaaaagaaaaaagggagccaattaatgtcaaaagctacagccgggttaaagagagtaaatagggaaaataaagacaaagttattcaatttcatttagatcctggtggccttacctgacactgacctcagtggtgaggtaaaaattagactgtgaggtattccggcttggaaaaataaaggtggctcaacataaaaggctcatcatgaacaacaacaattaaggcaaggagaaaaagagatctaagggaagacctgaacatgtatgctgacagagggaaaggagtcaatggaaagataaccaagttacagaaagtgactggaaacaaaagcatggaacaaggaaagctgagcctttgacaggaggggcgcttttttcctctggggaggaacatttctttgagagataagcaagggagttgagggatcctgagtgggatgcgaaagaaagtgcctgcaaattgaggagcatgggcagttgaaggagaggaagaaagtcagcaagagacaaaaagaattctagcatcaacgagggcttattagctggactcggaaatacaaatttgcaaagatccaatcagcacatttagtgactccctaaaccacctcagaagcctggaaggccatgaggagacctgcctaaataacttaggttgctagggccgagacccatacccagctagctcaggcttctagttcagtactctcgtgactatcctgggtcctttttcaacagaattcacctaaagttggttaaatttaaaacctgatggccacttttaaagccatgttcttaaaacaatgtaatgagatacttttccttaaatactaagacaataaaataagaaatttttacatgtaaaacatcatcaactgtgaaaagtcagaaggattaactgacacacaaaactctgaatgtcactcacctggcggcttccggaaaacccatcttgtagagtgttacaaccacagctcctccaatgcctaaattatgctgcagagccacctttgcaccaggaacttgcctctttccggcttcccctctcagctgccagcagagttctgcacactgagcaagacctaacaaatcgaacacagagcactgagctgcttccaccagctttctcaagccagaaaagggatgtttgtgactttaaattaaagcatttgattaagccgaggccacgtttgtgtaaatagtaacttctcttaaaacaccgaagggttttgcagctagttattttctctctaaatttctttcctgcactctttcaacttaacctgtcgttttctggcatgttgaaagagaaaacaccgaatctacaattctctagtccagggaaaatggcataaaaataatttaattttaccatttttaatgtattaaaagaaaataaacaaggatttggaagttcacattccctaaaagtttagctggtatgggaaatttttcctattattttcctccaagtagttcccaacaacaatgagttgttttccagacctattcacagatattcacaagaaaggttctggattcaaaaggataacattctgtcccctgaataataaaatcaaagatgtttagagctgaaaggaacttactgatgtaaacactgagaaacagaaaggttaatctgtgaatggttacaaagcaggctaatttcagaggtaaggttagaacccatgactccagatgtatatttgtttgcctttctatcggaccagctattgaaggagagctgggttaagaatgttctatcagggccgggcgcggtggctcacgcctgtaatcccagcactttgggaggccgaggagggcagatcacgaggtcaggagatcaagaccatcctggctaacacggtgaaaccccgtctctactaaaaatacaaaaaaaaaaaaaaaattagccgggcgtggtggcaggcgcctctagtcccagctactagggaggctgaggcaggagaatggcgtgaacccgggaggcagagcttgcagtgagctgagatcgggccactgcactccagcctgggcgacagagcaagactccgtctcaaaaaaaaaaaaaaaaaaaaaaaaaaaaaaagaatgttctatcagggcagactggtctgcaggtctactacttacagtgcctattcttccatacacatccccagccacaacttccaattcctgagtacctgtgacaatttcctgtataaaccccaacttccccaagaaatttaactgctgcttttcatttctaagcagtgtctatatatttacagaccatgtatcttaaacactatttaaaaataggtagctcccagtgtggacaacatagcaagacctcatctctactaaaaataaatttattttatttattatgtttgagacagagtcttgctctgttgcccaggatagagtgcagtggcacgatcttggctcactgcaacctccacctcccaggttccagcgattctcctgcctcagcctcccaagtagctgggactccaggcatgcgccaccactcccagctatttttttttttttttttttttttttagtagagacggggtttcactatattcgccaggctggtcttgaactcctgacctcgtgatctgcccaccttggcctccccaagtgctgggattacaggcatgagccaccgcacccggcctaaaaataaaatttttttaaatcagccaggcatggggacacatgtctgtagccctagctactcaagaggctgaggaaggaggatggcctgagcccaggaagtcaaggctgcagtgagttataatcatgccactgcactccagcagggcaagattatagggggagaccctgtctcaaaaaaaaaaaaaaaaaaaaaaaggtagctccacaactggtaataactttttgaattgtgaacaatttagaaattaatgaggaaggtcaaagtgaaatgactctattatacccaaacttgggggcaatcagttttactggaaatctgcctttataaatgaatatgtaagacaaaaaagacaaaaaatattca

SEQ ID NO: 1953 - DNA, 4001 bp, Homo sapiens
gactaaaaaaatcacttaaaaattaaaaagggatgactcaatttcttgagagaactggaaaggatgccattttcttgttttgaaagcatgttaactttgacagaagtccactgataccatcagtgtaatactgacagtggtaagattatattgtatgttcccagtgcaaactttattgggggaaaattaaaaaggtgtgctgattattgcaatttgagaatgttttgaagcagtaattcttcacactaatatatctaaagaagcacaaatactgttatatgaagaagtttttttgtttgttttttgttttaaatagagatatggtcttgttctgttgctgctggcctagagtgcattggcgctatcctatctcactgtaacctggaattcctgggctcaagctacctgccctccccagcctccctagttgctgagattacaggcatgtgccaccatgcccgccagtgctttaaaaatgataattcagctaaaattgatttattgaaatgtaagaaaaacacttggccttccaaaatgctttcctgttgttttgaggacggggaaaacacaaaatcttgctcattagctttgaaattaaaaagtcacaagaaggtagaaaaggatatcctagtatcccgtaataggtatttcgtagcacttagcatctccactctataataaaatgctgagttgacagtctctgacttgaatatgcatcagtcttccctttaataatctccctccactcttttgcctacttgggcagcacataaaatttctggaccgcttgtagattaagaaaacccttgtctaggtcaaagggcaactcatacactcaactaagaaacccgtgtgctctatggaaatgtttctaccaaatattttcttttcccagcaattactcgagactaccttggtcctagctcccttagcttgaaagttccaaagataatggcttgcactctgagtattaaggatgcactgtactggctgatattctggtatccagcggtaacgttactccggcccttgctttcgtgtttcaggtatatattccctctgcggaactcagtccagcattgctagctgacaagcaatacacaattaagtctttatggaccaaaataattgtgatttcagctcaagatacattttataagaacatgggtccctaaaaacagcagttaacagtgacccccaaaattcgagacccgactccgagaatttcacatggattcctgaatatgctcttccgagaaatgtttcatctttattctaaacagaaagcactatgccaagacaggagccagctgggccttgggggacgggcactggtcttggatcaagaatgaggccgccttcccgagggcgggcgcgcccccaggatccccccgggctcgggcactgccgccccgggacagtgacccgcccagccgagcaccctcgccctgcttgccgcgaccccgcggggtcactgaagggccgaggcgccgctctcgcttcgctggcccctcaccttccacacctccctgcgaggaccgactccgcggccgccttggagagctctggccgcgggcgcctcacccgtcgggggccgcccgcgaagcgcagattacagggcgccccacaatcagcaaggggaggctgctccgaagctgagagcacagctcaaccggccgccggcgccgcgccgagctcgctcccgcgcgggccccagagcgcagacccgcgagcggggcgcgcgcccgccgcctcctccccgcccggccccttcccccacggcgcagtcctgcaaggactgggggcgcagcgcagggctccctgttacctgcaggaaggcggcgggggaggaggccgagggtcttggctctggtaccctgttggcccccctgttgacaccaaccacccctgcctgcctgtaaggctgtggccactacacccacaatcttctgggggccgggtttctcctacaccatagagacgggtccggaaacgggacagaaggcccaccttcctccctccgacgccaccaatgaggccaactaaccaggaaccgaggtagagaggccgcacagctgagtctcaggccggtgccatcttaagtgtgggcgccgcgacgataccgagtttcactcactgccccagtggtctagttagtccacgaagatgccccctttctagatgtgttggtcgaatgcttaagtttgtcttgacttgaatttttaggcttttaacagcacagttttaatttcatttccgcccaaatccaaaatggctgctggccacttgtagcaaacagtagaggtgcagggcggagaaaaggagtacgggaattagcgaggactttcaggagagtgacgtcactcaacctgtagctttgattggctgggctgcgagggtggagtcgtgcagagccgctgctggcggaggtcgtggtgatctcgcttgatctttgagagggaaggtcctgaatcacatttcatttagcaaaaagtaatatttgaaaattttaatattaatgcagtagttttgcccccctccatgctttctgcagtgtcagttacctgtggtcaaaccttggttcagaaatgttaaatggaaaactccagaaataaacaattcttaagtttcaaaccgcctgtattctgagtagcccgattaaatctcgggccatccactctgtcccacccttgacgcgaatcatctgtcgcaggtagccgcgctgtgtacagtatccactcattacccactcagtagctgctttggttaacagatgcacccgtagtatagcagagataatgagagataccacctgcttatgttcaggtaacccttattttacttaataatggccgcaaagcacaggaattgtgctgacaatttggatatgccgaggagaagctgtaaagtgcttcctttaaatgaaaaggtgaaagctctggacttaataaggaaagaaaaagagtcatatgctgaggttgccaaaatctatgataagaacaaattatccatgaaattgtgaagaaggaaaaagattcgtgctagttaactaagcacctatcatgcactgtggctgtaacttttgtagtttgaggtgcaacagcaaaagacggaaaaggcattacatttgtgggtgggagacatgaacagaaaacgtatttcagctgaccgcagtaagttttgccagaaagtgttgagcctataggaagacttaagaaagggatcccctgaaattaggcacaccaagctatttactgcaagtaagggatggctacacagattcaggaataggtttggactgaaaaacataaaaataactggagaggccacatctgctgatgaagaagctgccacatgtctggcagagttgaagacattggttaaggagaaaggcttccaggagattgatggataagttaggaaaatcattcaggtagcaatgaaactgcctttgcaaaattatgactaaggcagttaaagagatccaatttaaccaactccatcttgtccttaacctccatgctatccttgttcattcctgggcataggctgaactaactttggaaggaaattagtttataatttacagtttaaaacaaaaacaataaaagccctttcccaaaaccaacctccttcttgcctggggtctagactaccaacattagccacaagattagaaattatggtttgggagtcatgcagctggaggccacaagattctgaccctccctaaactgctcctgagatcagtgcttcagatgttttgcagaccctgcacttgatggatcagctggcaacacccagatgataaactggcccatctgatcttgtgacccccacccagaactgactcagttcaagaagacagtgatgccccatagtttcatctccgacccaaccaatcagcactccctgacttactgcccctccccacccaccaaattgtctttaaaaactcgactgctggaggagactgatttgagtaataataaaactctggc

SEQ ID NO: 1954 - DNA, 4001 bp, Homo sapiens
tcgtcagtcatcccattgaatttttgccctctgaggaaggggtcattagccccatttcacagagggacaaccaagggtcagagaagtaagaggacctgcccaaaccatgccacgaatcggcgggggtagcaggattggaacccagggttgtgtgattcccaagcctttgattttaaggatggtctttcagaaatttggctgagaaggcgaccccagctgctagggtgtgctgggtctctatccctcccagggacctcttcctctcaccccacttaggggagagctgggaatgagacatcctggccagcaggcacttcacacaggtcagccctcaacacttcccctccctccagctgacagccccctagatggggaaggctgaggaggggcctgtccatccaagaagcaagcttggagcccctgcctgtcctcctcctgtcttactgactggcccactgaggctgggaaagggaaggaacttgcagagggcggctgggcacccagtgttgcttgagaggcctgggtccttttcagcctgggggatgcaggacagcatagctcctggaaccaacctgggaggctggacctagaaatccccagcccgcctgagccagaacctggacacttgtccaacaagaactcatctggggcctggatccctcaaagggggatgaggtccttcctttctctgccatccctgacggagctgggaccaagcatggctgctacggtcactcaaagggacactcaagggtcacctcatacataccatcacctccacctgcacatgcttggttcccctcaggggtcctcgtcctatgtccagggtcccccatgcacctgcatgcacacgctgctatgtgcactcacacacattcatgggtccaagcacacgcccaccagaggtctttcacacacacaccctcacccactgcagccacacacggccatagccaacagtggcccagccaggcacaggcacacatcatgcacaatgggtcaccctcccacgaccacggacgggagggcacgctggcatccacccatgtggcagacacatccttcacctgcacacgccccacaggtccccgcacccctcactgagttggccacacacgcccacacacgcccacacacagggttaccctcactcccccctcaggtcaccttcaccaagtcaccctccacctccacctccccttcccgggcccactgccctggccggctgccgcgaccctgggaagaaccaaatgcacaccctcccctcggaaggggaaccgatccgattcccaaaaagtggccatggtctgggcacacccacgaggcaaaagccaggctcactcccaccccaagacacacccagccgggacggcgacccccagcccgccgccgggtccttctcgcgcctcccaggccagcgcaggggtcccgcttcgtccccggggagacagttcccggagccactgggaggtgggggaacagggctgaggacccgcgatcgggttccctcccgggattccctctggggaggggtcccaaaaggaaggagagatgcgccccccgaagatgaccagcggcgggggcggcctctccccgcggatgccagctagggggagattccggaggggggggagcagggtgcagaaaggggcgctcgggggagggtcgaggggtggcagggaccgcggccccgggggaagcagccgggggggagggagcggggtcccggagggggggtcgcgggcggggaccggcaccccgcgcggggggcggccccggggagccgtggcggggatccgggcgcgtgtcactcacccccgcggcgcgccccgccagcagcagcagcagcagcggtggcaggagcagcccgcgggccccgggcccggccgcggccccggccccggcgccggccccgtgggcggccccggcacggtgcggcggccccggcttcatggcggcggcgcgggcgcgggcggcgggcggcgggcgggcgcctttgttcccgaggcgcggcgcgcggggcggctgcttggcggcggcgcggcccggcggctggaccgacgcgctctaggctcgcgggctcccggctcggccgcccggctccgcctcgcagctccgcgcccacagcggccgcgcccgcaggaagcgtgcgccgccgccgccgccgccgggccgcccccagcgcgggcggaacggaggaggggcccggggcggggcgggccccagtgcgccccccgcggggctccgcgccctctgaccccagtcccagcccccgcccccacccagagggagccccgcgctgccgagtgggcacccggacacctgagtgagcagccggcctcgccgatcccggggctggaggtcgcggagcccgccggacgcacctccgcggccgccgtgctaggtagaagggaagggtcccgcgtgggataccagggcccgggcctggctccctgaagtcgccgagcggaggggtcgcatgggcgttttcatctacagcctccccctgtggctccacgcacgtgtctcttcctggactcccatcgtcaccctcacacactcagccagtccacccagtgggccagaggtcatccaagaccacgggctttcatgcctccaggacacccaggggctgtgtgacctcagatcagggcccggccctctctgggcctcggtctccccaggggaccatgggggtggtcacttctgggccctgtcactgtggatctgcagaggaaaagccacgcagacctgagcgcagctgcttccacaccagctgtgcgcctccagcaaggcccccagttctctgagactcagaccccccatggttgaatgggaccaccccctccagtgcaggatggcgagaaaagtacatctctgagtggcagtctctagcgctggtggtctttctaccctgtgtggtcacggtgccttttcccccttcaccttcatccccagcggcataccccatgctgttcttacttctccaagtctccaatggcgtgttagctccagcgggggcagggttttgtgtctgtcttgttcactgctatgtccccagcaccagcacagagctcggcatgacatcgatgctcaatccaaatttgctgaatcaatgaatgtgtttcccatttactggggctcaaaaccaagtgttttggggcaagataggggagagtgaaacatttctggaaccctgaccacatgccaggtgcccagcgctttcatgtgttatatcatttctcaggaaccccataaggtcggtctgtcaatatcttcacttcttaggtggggaagctgagagccagcaagaagaggttatttgctgatgacagctggctggacgtctctaccctcagttactctcctctctggcccctgtgtcccagcacccagcttagagcctgccattagaaaataggaatgaaatcaggccggtcgtggtggctcacgcctgtaatcccaccacgttgggaggccgaggcgggtggatcacgaggtcaggagatcctggccaacatggtgaaaccccgtctctactaacaatacaaaaaaattagccgggcgtggtggcgggcgcctgtagtcccagctaccaggagggtgaggcaggagaatggcatgaacccgggaggcggagcttgcagtgagccgagatcgcgccactgcactccagcctgggcgacagagcgagactccttctcaaaaacaaaaaaaaaaaaaaaaagaaaagaaaagaaaataggggaacgaaattgagttgaaactggaacaattccctcaaggaaaggggaaccaaaaccaggatgaatggaggggcaggccttgaggaagagactctgggggaccagccatgggtttttggtgttgggggtaactgtacttgtcctgcagggcccttgggaggaggaccaggggacaaaggtcaactcaacataaagtagagataaattagaaggggctccccaggagggagggagagcccagtccctaaagggtat

SEQ ID NO: 1955 - DNA, 4001 bp, Homo sapiens
cattaatttaaaatgaacccctttactgcgtcaaaatgcctaatgttaaacagcctccgacaattatataaagacttaaaataaggtcaaaggaagagaagcatcaggaaaaactttcaatgaaaacaaaaaatttttgccaatcttaaaaattacaattactcatatcattgtgcacagtatttttcttgcttccaaatgaaaagttagaagtgcttattttgtatctaacagctcttgaaacatcagtaggttgaggaaggtgttcattaaaaccgatttttttactcctgcagtttgaatactgagaatgtcgacagtttgttaacacaattgacagatgtaacaatacatagtaacccttataaaatctagagtcatgagaagataaactttctaatattgaaaaaccttcactttgctttaagtaacaagtataaataacaattaacatttaatgagtgcttgtctagtaagcactgatctttacccttactttctatcatagtaatctataattattttttttttttgtctttctccccaactaatccagaagctccatggggataggaactttgtcttgttccttactgcatgcctagcacctagtatgcttaacacatagtaggaggcactgacacatagtaggcatattatgcagaacaacacatgcttcataacttagtattctcaatgtcgcaaacagtcatgacctagaggcttatgaaaatgcaacagaatagaaagcagagtttattacatttagtagaataaaaattcttcagtgaaacttatagtttatatgtacacatatgtcccatataaaatttatttcttactataggtaaacattttaagaagtcttaaaatcactgctttatggggattatttcatttgctccccacaataaccctatggacaattccataacttccattataacagaatcgaaatttctagatgttatatatgctgtccaagttgacagcgccatctaaaagtacagacattaagtccaacagagcttaaaggaaaataaatacagacattatttgtacagatacttgctcatatggtaatgtggtaagaaaatctaaattaataaggttttgataatagtaattatggcttgattagtaaatacaaacataggctttgaaggcaagcctgataatacctggctctgcaactaaccagctgtgtgggctctggcctgtaattcaacctctctgagcttcgctttccccatgtgtaaaatattcacacgattggtgtaagctgcagatgatttactgtatgtaaatagcctaaatcaattaaaagggggctcttgtgattaaaataattattagtgtttccccccactgatcccataaatcacattcaatccactgtgccataatttaaatgtgtaaaaactgtgaatcagacttttattggattaaatagcaacgtatgggaactgaacaaaaatggcatagagctatccaagagtttctgctgtcgccggttgagaaagatgccaagttaagatcaaggagttgattgaggtaactacgggaatctgaggaaacatcgttgcttaactgtaaaaactaaatcaaactatttcatcctcctcaagaccacagcaacatccatcttgctcctctgtagcgtggacggggcagaacccaggtgttaggaaacgcacctggtctgctcccgcccactaggccctgggcacctcggggctagggacagaggtttggagcaactcaccccggagactccgttgatactgccccagaatctcctccagggtagagttctccggggacttcgccatgcacgcactctaggcccagagctgggagttacgtggggaaatgtccagctttctcccttccgagaacaacaggcctgtggccggggagcgcccgcctgcttcctgccgcggctgtcacaggggagcctagaatcccgcacagagctcttgggggctcttcccacccactggccctcgctttgcacgtcgggagttgtagtcctcacgttcagaacctgcaagctcgacaatcctcagggccttccagttacactacaattcccagaaaccactgcgctccaggcgctagcttggacggtttggctgccagagcctgctgccaagagacaggcttgcaggccccgcccttttcctccagcccagcctggtttagtcccgcctccatcccactcttcagctgcctggaccacccaaatgacagaaagggctcactgaaggccttgacgcttcgaaatttgctaatatgcagcagttgatccccaggctactcaaggacgcagatagtaaactctgaaccctgcttcagttgcgagattttttaaaacggtcgaataaatcttcaagaaatagaagctctaaatcttccaaacagcctagattgtaaaggcggccgacactacaactcctagcatgcccagcaaccggaccttcacttggagttggcgctctgcccgctgggaactgtagtccttgttggttgcggtcccacctaacgccgaggtcctcttcattgttcaagctggtctttcggggcacgcctgcgcagtgggcaagctggaaaagcgtgtgggtgagaccctcgcacaaccccttttcattgtctgtgtgtggcgcctgcgcagtaagggatcgttggaactgggcaggaggggatagggtccggctcctcgccctttcccgaggcgcctgcgcactaggcagtcggtctttgccgttaccgctatgtgtggggcgtgtgtggaataacgttattgcccagcggagctgagggccccggagctcgaccgcagcggcagcgacgacaacagcggcgacgacgacgacgacgaggtggggggaggacggcgtgcgagagactcacgggacgcgacgcgccccgcctcccccgtccggtccctctctccacggtaaggggtaagtgatgcgatcggctgctcggtgtaggcgccgcagccgcagccaccgccgcggctgctttccacatcctgctcctcgggtttgcggcgaggactcgggcgccgcccgccgcggggcgggggtgcggggctggaccgcgaagggggcgcttcccgggtgctccgcgcggcgccgccacccccaccctctgcccgcctgggacccggggcttgacgggaccacccttcccatcccccacccgccgccccccggagctccagtcctgcggccccccggctttcccgagccccttgctgccgcctccgcatcccctaagtgcattgaatcattttcagctttcgactggctttgtgcagccctcccccctccgccgtagcagtttgcgaggggtgcgggcggagcattggagggaatggctgcgctgccgctggggaagggatttttcccccattggagcagctccccgggccaatcccttttgtgtgattggttttggggtgtgaggcggttggcgaggtcaggcgagcaaccttttggacgcgttgggagggcgtggaagacgcggtgtcatgcaccctgcctggcgactgcaccccgtggaggctctggctctgtagtaaacccgggggaggagagagtggcttcctgtcggcttcattgtcctaggattcagatgtagggttttggtacgtttcgcttccattttatgcaagcgatgaaaaaataacatttgcagctgcctaacacagggcgggaagacgtgggatttgtatactaagtcacagaatctctgttcggtggtgtttcgtagagttttatttatttatttatttatttatttatttattttgaggaatgtaaggaagacagggactatgcctgctggagtccaagcactgccaaggtgatcaatataaaattactaggtgacgttggagcctgggctagagagggcctgacaacgaagctgttgtgtcagggaaatgaacaagcagaattgttttttcattgggcaggtaatgcatttatgtt

SEQ ID NO: 1956 - DNA, 4001 bp, Homo sapiens
tttctattcatatttgctatggtcatgttccttaagtttctgactgaatccactcatttatatttctttatatatactttttcagaccgagtcttgctctgtcacccagtttggagtgcaatggctcaatctcggctcactgcaacctccacctctcaggttcaaatgattcttctgcttcagcctcctgggtagctgggattacaggcgtctgccgccacgcctggctaatttttgtgtatttttaggagagatggggtttcaccatgttgccaagctggtctcgaacttctgacctcaggtgatctgcccgcctcgacctccctaagtgttggaattacaggcgtgagccaccacgcctggcctatatttcttgcttccgatttaaaaattcttttttccaacatacctcatgattaagatcctattttttctggtttcactttggatcaattgtcagcaagtttgaaaactgtactcataggccgggaggagtggctcaagcctgtaatcccagcactttgtgaggctgaggtgggcggatcacccgaggtcaggagttcaagacctggccaacgtggtgaaaccccgtctctactaaaaatacaaaaattagccaggcatggtggcgggcgactgcaatcccagctatttgggaggctgaggcaggagaaccgcttgaactcagcgaggcggaggttgcagtgggccgagatcacgccattgcactccagcccgggcaacgggagtcaaactccgtcgggggtgggggagggggagaaaagaacactgtactcatgaaataagaattattttcaaaggaattagaatgcaattattttcatggtcaaaaacagttgtgcttacagtttttagactggattacagagcaggaaggaaaacatggaaagtgaaaaaccgtattatttgcaaacacacattgcttcttcacggaatcgatccaagtctcttaaaattttggtctagactgcagtgttaacatttgttaagcttataaatagtaagcagaggaaatagccgaggaaagcacggatgaggtgcggaaagaacagagttctagatcaagtgccaacattaaaattagattcagggaaaccactaaattcttttgacaactgaacaggtttaatatcttatagctggtaaaagcttacttacttgaaagttcagtaaaagctcacgtgtaactctggaagtccctggtaggttttcacaaatatgcacggacaaatgagaccatcaaattaatagtgaacacttctacgtaacaggccctaagaacccaggccctcaacaggacacacgtgtgaatgcttggtcacaacgactgaccagaagaatcaattttccttcccaatcatcctttggcctgggtttggatatgacatacttctctaggctggggctaacaaggctgtgtgatgagtggacaaaatacacgtcacataaccatagtaagaaggtgaagactggagccttaaaaatcagccggcccaactgccagaagaccattatatttacggataaagaaagagaaacaaagtatttgtaactgtgagcgggactaagtgcctgtaacagtttttttctccctcttggtgggaaggcaaaaccaccaccacaaaagaaaagcaaaggaaggtctcagtaacaattcgaagcaccttaacactgaggaactctcagcctcaacgagtgaaaaccccagagaataaacgtacccccgccccggacagacctactccgcacccagcgctgccacctgtctgcctctttctccttcctaacaggaaccgaaatcctcacctgatcttggcagtgccggtggataaaatcccggacggtgcaccgacccgaggcacaccgcaccgccttgcacccgaagccagggccgcgaatccacaccagcgccgcggcctccgccatgtcaccgactacccgaacctcaagcctctctgagacaccaggcgccgcaactcgcccggcgcctcttgatgacgcgagcatcttccaacgccccgcccctcacgcttccgttcacccctcccctcccctggggcgggtcaagtgagccgggcggcggggcggtgcgggctgggggaggggaacaggaaaggcctggcggaggcagataaggcggcagagcacggggcgaggcgttgctaggagaagttgctagggcggggctcgagggaccggctataaaaggctggcgctgggttaggtttcgagcttcctggccgtaagcgataaggctttaactgagaaccaccttgtgctgtaggctttggcccttttcctcacatctgtgtagttatttttgggtcgcggagaattgtggcccgagaaggctctgctccttgagagtgtggggagagaagctgcagtcccggaagcggttttagggggccgcttccttggcctagaggagctccccaacccgagggggcaagggaaacgacccccaggaggcccctaaacagtggccggcgtggtttctcctccagctttacagagccttctcttcccctccagaaacagccaacctccgggtttctgcctgccacgcacggtttattcttatttccgcctgtttgtgcactgcgttatctccacttcagctctgttttcaaaatatttcacagcaagtgggctcttgtgaaaggcagtgacaggagtgacgtttatagtcatgctgcttcaaaaaaccctaccataacttttattctgcaccatggaaacacactcggacagatttgcataacgtaaccttaaggctcagggaatccgaaagagtcccttaatatttaacagaatgagattatggtatttctaaaaccctgaacaattcaaaagccaccagtgtgaagataggaaggttatttggagatatctgtgcctgctaaacacaaatgcatcggcccacagaattgccttctctgctgttaaaatgcttggcaaatggaactcctagctgagggggtaacaacaaaaaattcagaaatcgtttagcggtggcagtatgtgcgaaaatggaatttcaaggcctgggaagttaatagattcagtggtctttatttcacacacgagggaaagttggggagagaaagggcctccatggggatgccagtagataaataaaaattacaaaaaaaaaaataataaagatagattgtactggccgggcgcggtggctcatgcctgtaatccagcactttgggagactgaggcgggcggatctcgaggtcaggagttcgaaaccagcctcaccaacatggtgaaaccccatctctactaaaaatacaataattagccgggcgtggtggtgcgcgtctgtaatcccagctattcaggaggctgaggcaggagaatcgcttgaacccgggaggcagaggttgcagtgagctgagatcgtgccatcgcactccagcctgggcgacagagagagtctccgtttcagaaaaaaaagatatattgtacctaggaagcagtatttcggaaaggtggtgccatggcaaccctggggcgtgaaggtgtcgccaggttacatgtaagccgtccaaactccagaaacctcaagtccctctgcagtctgctccccagctctctgtcctccaggttcctgaaaaagtaatctacagatctgagccttaagcctcttctttttttatttgtgatttcttccttctggtgatcaaaaatgactatttcaaataaataaataatttttttaaatgaccatttcaaaggtctgagatcctacaagtaactgtataaaggtcagtttgggtttccaaaacattttttgtgtcgggataatgcttcgtgtcttgtgaggaattattatgattagtcttttttttctttctttctttcttttttgagacactcgctctgccacctgggctggagtgtagtggcgcaatcatagcacacgcagccttgaactcctgggctcaagtgatctgccacagactcca

SEQ ID NO: 1957 - DNA, 4001 bp, Homo sapiens
ccaaagggaactcggggtccttctcacccacgagcctactcctttcacagtctgcccctccggcaaacacctgcgggtcctttcgggtgccgctgaggccccgccatgtcacagctgttccctcaacacacatggactgagactcctgttctgtggccgtcttattcagcttcactgttctggcacctgccactctgcctgcacacagtaggcgctcaacgaatgctaccctgggtaatattaaacgaaaaaatgctgcctccaggtatcgagaaacaccagtggggccgccatgaaagtggtcctgaagtcagtgcagtctgccacaaaccaagaggggtacaagcctgagttcccccaaggaaggaaaccctgggtgaggggctcatgtctgattttttttttttttctgagacagagtctcactctgtcgcccaggctggagtgcagtggtgcagtctcggctcactgcaacctccacctcccaggttcaagtgattctcctgcctcggcctcccagttagctgggattacaggcacccacctccactctccactaatctgtatttttagtagagatggggttttgccatgttggccaggctggtctctaactcctgacctgaagtgatcctcctgcctcggcctcccaaagtgctgggactataggcgtgagccatgcacccggcctgattttctgaacatggctgagggcttttcccttccctagtggtggcataattctattcctgtcgtcccagatcgcctgaccaggggagagtcctggataagaaccaagacacctcctcctggtgctgactccactaactacagtcgtaaaacacacgctgtgtgcaaagagactgtactttgttcctagagaaaataaagctagttcttgattctacatatcttgatgagttacacggtttacttgaggcaggaggatcgtgagaccagcctgggcaacacagtgagactgcgtctctttaaaaaacaaaaacaaaaagataagaccctgtctcgaaaaagggggaataaaaagtaacccaaaagtaactataaatatcaggagtccatcaagtggcgcttcctctcctggcttcagagtatctattcatcacggtgtgccaggttcgcagcacagcggagcgggccggtcccaccggaatggggtttcgacttcgccatcccctagcagctcagttcccagcaaggaatcaacacacccttgcaaaacggacgtgggaaacagcttaggcagagacgctatttctttgccatccctgggcttcagctctggtggaacgaggctatttctggcagttaacaacacacacggttagattctaaaagctcaacagggttcataacaccgcctctgagccagacatcaagggctccacacagccgacttcacatctccaaatcctactaactggggatgagggtccacgcggttcagaagcggaagcgcaggcgcagggaagcggggcagcttgtccaaggtcgcctcgccgataaacgcgagtccaaccagaccccttgggcctccgtttcccggtggcattcgtaggttttggccagtaggagaccagacgtgccggcggccggggaggccagcgtcgtcggcctgtccctgcccccgggaaccccgggagccccggtggcggcggagtctcgccagggctcaaggccgagcggacggacgatgccccagcccaaggcgggaggcggcggcggcctccagacccgccctcgccgtccggccggcgtacacttggccccgcggcctgcagcggccgtcccgggcccctcactcaccggtctgcctccccgcgctcgggatccgaggaccggagcgaagcgtcagtgacgccgccaacgggcccggatcaggccactgccatctttcttgcgggcgggggcggtgcgaacgggcgcgacctcacggaggggacgccggcgccaccatctctcctccgggcggaagcggtcgcggggccgctccgaggttgaccaatgacaagggtgcccgaggccacgtgacggccgccgattggccgccggcctccgagcgccccggggctcggcgtctgcggaaggccccggcgcgctcccaggagcgccgtgcgcacgcgcaccgccccgagccggcggcgcctgcgcactcgcgagtccggcctgggccgccggcccggcgcgggcgccatgaagctgctgcggcgggcgtggcggcggcgggcggcgctaggcctgggcacgctggcgctgtgcggggcggcgctgctctacctggcgcgctgcgcggccgagcccggggaccccagggcgatgtcgggccgcagcccgcctccccccgcgcccgcgcgcgccgccgccttcctggcagtgctggtggccagcgcgccccgcgccgccgagcgccgcagcgtgatccgcagcacgtggcttgcgcggcgcggggccccgggcgacgtgtgggcgcgctttgccgtgggcacggccggcctgggcgccgaggagcggcgcgccctggagcgggagcaggcgcggcacggggacctgctgctgctgcccgcgctgcgcgacgcctacgaaaacctcacggccaaggtgctggccatgctggcctggctggacgagcacgtggccttcgagttcgtgctcaaggcggacgacgactccttcgcgcggctggacgcgctgctggccgagctgcgcgcccgcgagcccgcgcgccgccgccgcctctactggggcttcttctcgggccgcggccgcgtcaagccgggggggcgctggcgcgaggccgcctggcaactctgcgactactacctgccctacgcgctgggcggcggctacgtgctctcggccgacctggtgcactacctgcgcctcagccgcgactacctgcgcgcctggcacagcgaggacgtgtctctgggcgcctggctggcgccggtggacgtccagcgggagcacgacccgcgcttcgacaccgaataccggtcccgcggctgcagcaaccagtacctggtgacgcacaagcagagcctggaggacatgctggagaagcacgcgacgctggcgcgcgagggccgcctgtgcaagcgcgaggtgcagctgcgcctgtcctacgtgtacgactggtccgcgccgccctcgcagtgctgccagagaagggagggcatcccctgagccgccgcggcccggccctccgggacacctgcttcacccggcggcgccttggggcaggtgccgagcgggcgcactacgcccgggccccaaggcccccgtcccgcagccacgcttgtggtcgctgcgtcccggtctgcgtttgggagacccctgggggttgccggggcagcgcgccgtgtccaggtggaggtgcccgttcctggacctcagcgagcctgagccgggcccggccgcacgctgacccccgtgctgtccccgaccggctcacggggctgggctccgatcttccgtgtctcttatcagtggcgtttctcacgtctgcgtctcagatctaacgtggtttcacatcaatccgctttcatgggattttggtctctgtccagtgacttcgtggtaaatgtaactcagtgtttgcttgcgacttatttataaatattgtaagtttgtgtcgatgagtgtaagttggcagtgcgcacgtctcggtttttttacatgatttaaggaaagacttttatgtcagaacttggtgcctgtaccgtcaaccccgctgctgcccgtgtttaaacgcaggagaactttaaaactggccatctatcttttcagtgtacaagtcactgaacccattgtttctttctgaagagactttcctttcaaggcttcccatgggtccgcgccacacagggccggtgctgctttatttcagactctgccccaggttccaggaatccgaaccccggagtgctgacgcggttccccaacttccgccttaagaaaacaggaccagccggcaccaggcccgt

SEQ ID NO: 1958 - DNA, 4001 bp, Homo sapiens
ttcttgtcctaaaggagttcatagtccagatgaagaaataaggcaacacaaacaatagttaatatactacagtcaaatacttacaggcagaattgtggttcagtggtcagactataagcataaaaagaattcagaacctgaacctgaatgttacccacaggtaacacaccaagctcattactgaattcttttgaggtggcttttgtgggtatacatgtacattcccacaaggaaggggaggccttggggctcttctattttctgttgccctcaggaggccctgcaaagaccttgcctggaattacaaaaatgacctatgaaattagccttttctacaatgcattcttagaagaggggcttggaactctctcgttagtggggctctcacaatttaattgtttgctcagcaactataaaaggaacaggtaaacaagctcattatcaatcatcaatttaatactgagaggatgtcagcttgaggctctggtaggctgtcttcttcctctatctccccttttcagaaaggctgatgcagacagagtggatccaagttcacacacagcatgctggatagaaccaggattggaacatgggcaatatgtactgtgttatgcagccatagcaggcacttaagatgaaagatgtcctcatttaagtgcaagagaggaagaggaactaaaatttcttggacaccaaccatgtcccaagatctatgctaaggagtttttctggtaccatgttaaaaaactgcctcaggtctgcttcttgggaatgtgatattttgagcaagccaaaaattttctttctgggggcctcaagttttcaaagctccaaaaaggagggtaaggattcttgcttgcccaccttaaaggggttgttgagaatcccagaagaggaacagacttagaaaggatttgcaaatccttagtcccttatgtatacaaaagcaatttcccttccccttctaaatgttcccacttagaaggcaggtcagaaatgtgttgtttcttggccatacaaggggcgtgggaaaatctgttactgcacacggcatagtaataaacaagaacagcgccaagccctctacctgtcattccatgtcaactctatgaggtccgtattattatatgacctttagagtcagaaacactgagaggatactagtgaaactgtggtgacactgctttaaggaacccagtctttcctgcaacccccaccacccacctccgggatccttcgaggtagggggctgggtgcatttccctccatctctcccttcccctgccctgtccccaacaattcacatgtcctttcctcacccatcccggtcctcaacctcgcacccttgaggaattacctcgcttcccaattcccatccttcacaccccgcaggtctcccttttctacagaggcgatagtttggtggcagaaaaagggcttggaactccaatgtctggattcaaattctggttccagcagtcattcgcttgccatgtgaccttgagcaattcaagtcccctttctgaacgtcccccccccccgcacccttagctgtaaaaaattgcccgtgccctaactcacaagctgctgcgaggcgcagaaagataacttgacagggatgctcgaagccaaaccaaagcactgcaccagggggaggaggtcctccatctccctgaggccttgccctatgcttcctcagtctctccgcagccccatcagctccaggcagtctctgtggctttcctgacttttccctctctgaggctccaggactcacctgcaggcaggctccgccaagggttgtggccggcaaccggcgcctcaaggagagggcgaccaccgccgccatcttggctcctgacgtcagccccaccccttaaccccgaggtcgctctccgccggtgtcccgtcgaacatcgcggcgcccagcctacatccactgaggacccactagccgcgtacgagcaaccaagtgggaggcggcttccggtttcccgggtgggcggagggaaggcggggcaagcacagcgagcgtgcgcaatagcgcagtagcggcgcatgcccatttggcttcccccgtgaccttctcagaaaggggaggagtctgagaggcagggcgactttcagggggtggggctaagacttagatggggcggagccatcctatccgggtccctgccccgatttcaacctctttattcctggaatttttgtttgtttgtttgagatggagtctcgcactgtttcccgggctggagtgcaatggcgcgatcttggctcactgcaacctccgcctcccgggttcacgcgattctcctgcctcagcctcccgagtagctgggattacaggcgcacaccatcacacccggctaattttttgtatttttagtagagacggggtttcatcatcttggccagactggtcttgaactcctgacctcgtgatccgcccaccttggcctcccaaagtgctggaattacaggcatgagccactgcgcccggccaattttttttttttttttcagacagggtctcactctgttgcccaggccggtgtgcagtcttggctcactgcagcctcgacttcccaggctcaagcgatcctcccacctccagagtagctgggactacaggcgtgtgagccaccatacccgggtagtttttttttttttcttttttttgagatggagtatcgctctgtctcccaggctggagtgcagtggcgcgatctcggctgactgcaacctccgcctcccgggttcaagcaattccctgcctcagcctcccgagtagctgggattataggcgtccgccatcatgcccggctaatttttttgtgtttttagtagagatggggtttcaccatcttggccaggctggtcttgaactcctgacctcgtgagccacccacctcggcctcccaaagtactggaattacaggcatgagccaccgcgcccggccacccggataatttttttaaaaaattatttgtagagatggagtctggctatgttgcccaggctgggctcaagcaatcatcctgctccaacttcccaaagtgctgggattacaggcgtgagccaccacacctagcctccctaagaatttgtcagtcttattattcatctctgacgcttactggcttgagtcagccctttctgtcgcataccgtgcagcttgcccgaggctgcccaggtttctgcactgagagtcccaaacaaactgggcagttggtgaatgagctgaggtgatttcaagggtggctggcaaaggtgccattcttttgttcgttcattcattcattcataaatacgaatggagtggctactatgtggcaggcaccaagtgctgggatgctgcagggaatgagcaagccaggtggtcactgctcattgaatttactctctagtggtggagacggcaagtgagcagacagctagacactgtgagctctgttctgtacgagagggtgtgcccagagaaggacacccagtccttggtggctttgttagccatttaatataagaaaccatttctactctgtgccaaacattatggtccattatcccacttaatccccacagcagttctgtgaagaaagttttttggttttgttttttactgagtttccattttagacatctcagcttctttttccagccccctccatggatctgctcagagctggcctcactcttgggacttaccttgggcaggagtggcctggagcctccaaggcacctgcctcttcagtcactccacgcgtttgtgtagattgttaaccttgcaggtcccggggtttcgtaggagtgatttttttttcccctttctgtctgcttgttttggacatgtgaagggcgcctttctatagtctttggtttccactctcacagctgatgtggatgctactggagacattgagatggccaggtcaattggctggatgggctgtttctggagtccttgactggaaccccgctataccgccagtgtggcctc

SEQ ID NO: 1959 - DNA, 4001 bp, Homo sapiens
tacccagggacacaaaacactgcggtaggccgcaaggacctccgcctaggaaagccaggtattgtccaaggtttctccccatgtgatagtctgaaatatggcctcgtgggaagggaaagacctgaccgtcccccagacccccgtaaagggtctgtgctgaagaggattagcaaaagaggaaggaacgcctctttgcagttgagacaagaggaaggcatctgtctcctgatcatccctgggcaatggaatgtctcggtgtaaaacccgattgtatattccatctactgagataggggaaaaccgccttagggctggagatgggacatgtgggcagcaatactgctcttcaaggcattgagatgtttatgtgtatacgtatctaaagcacaccacttaattctttaccttatgatgcagagacctttgtccttctctccactattatcctatgaccctgccacatccccctctccgagaaacacccaataatgatcaataaatactaagggaactcagaggccggcggggatcctctgtatgctgaacgccggttccctgggcccccttttttctttctctatactttgtctgtgtctctttcttttccaagtctctcgttccacctaacgagaaacacccacaggtgtggaggggcgacccatcccttcagtggacagcgctgcacaactcaaaatgatactgtatggatacacttaatgactataatgatcctcagcttttaaacactaattccaaaactcctaaaatgaactgtttggaaccaatatgatcacttcaaactaaatgttaattttaccaaaagcccctaacatcgataccaaaatatatcagagaattcaaaagcattcaattatggtcaaaccatctggaataaagaagacagcactggcaagacaagccttggcataccttagacagaagatacatatggagatgaaaaacagggagaaaatgaaggattaagataaccctgatttcaactccaagaggaatcattttgtcacagaaaaactaaacaaagtccctctatttttaaactgggtgactgaagtggaaagagaaatgagaacacatttggggaaatcagggattgaaatctcaacagcattgaagctaactttccataacaaacaatttccaaaaataaggctggcacaaaactatgctgggatttgtaccaggcgtgtctaaaggcgctagtcgctgtgactagagaggctgagcagagaatgagacctagacagcggaaagttcagaatgaaagaaaatctagggtatttctctggacaactaattcacattttagagaaaaactgggacactcactctccctcccaagtaaaatgattaactaaaaatgaattccccgggttgctctggggcagcagaggtccgccctgggtgctaatgctaatcgccaccccagtagggatccaccctttgccagcagcccgctgggaacccagacagcgcccactcacggtgggagcagctagtgtctgaaggcattcgaagcaaaggcaaaatacacgaagatctctctctccgaagctaaatgtctaaatacgctctcgaaatcgtaggacccatgggtggctgaccttgaagttattttctcagagctcggctctgggtgcaggcccgagagcaatttgcgttagaagtactagaggaggtggggaaaacagaaggggcgagagccgagggcccctcgatacgaagtcagtgaccccgaagccctacggagcgcaccggagcggctgggggggacgggaaaaggggtctctaggatccccgagcgcttggcctccacacccatgggtcctttccctgcccaggcacaggataaacagttatcagcaaaacgtgaggggccagttcagatctccggagggccgcaggcaccaactcccagtcccactgaagtcacctcagcaacagcgcagccatcttgggttccggtctggacggaagtgacgccaggcggccccgccacccgagggcggaggcgcgccggctgggggtcggggttgggggtgtcatgtgacgagagtctctttaaaaggctctggagcttctccgctcagctctgcctagctggtttgctggttgttttctggttttttagtctcctcctccgcctcctgcagccgacttctaccggaatttgccaggatttcggcagaaacgccgctggctcaaaatctgcagtctacgttccacctgcgtacatattcattttgtatcgcactcccaaacagcaaacggcggacttgtttagattcttccttaaggacttcgcagtctgttgcgttccccctgcctcccaggtcggcctaaaaacgtggtggttggccggttgagaccccgaagagaaaagatactttgggttccctccctttctaatacgaagctttaaccagacagatacataaattgtgacctaagttggggagtgtgtagaggggcctcgagaagaccttgcggaccaccattcccgaaaacgaggagcctcatctaaccacctcgattagaccccacaattcctgggtttgagctgccacatggaccaggcgcccactagccgaggacaatgctcccttgttcgttgtttcagcgctatgtgggtgacacccacagctagaagaacccggagtgaggggaagaacacgctttgatttatatatgtgtatatatatatatacagttttagggaacccaagcacaggaatcaactgccgagcactcaagactgaagaaagaagaagagcaaatgataaaggaagggaacagagcacaaaagttcttgactcttgtggggagtagggtggagaggagtaaaagggacaggctagagcaactcctatttctacaaaaaaaatactcaattatattaatattcagatcttatgtatatttagcatccctgcacttcaggatttaaatagcacaaattcacttatttctgcatcagatgaataatactactttgcatttctataatgcttgacaaagcacattcgtacactttaggattgaaagaggctctctaatccaatctactatctatgcagggatctcctctgcaacacccataacagctgatcttcaagactctacccccccatattcaatgatgggtacctcaaacaacaagttttatttaatgaacaacttattcgttagttattatatttaaatacagttttgtgctatcgaaattccagtcattgacttggctctctggagcttcacgttaacaaacccaaggaatgcctttttcactcagatcttttttggtttttctttttctttttctttttcttttattttgagacgtagtctcactctgtcgcccaggttggagtgcagtggcgctatctcagctcactgcagcctctgcctcccaggttcaagcgattctcctgcctcagcctccccccaagtagctgggattacaggcctgcaccaccatgcccggctaattttctgtatttttagtagagatggaatttcaccatgttggctaggctggtctagaactcctgacctcaagtgatccaccggcctcggcctcccaaagtcctgggattataggtgcgagctaccactcccagcccactcagctctttaaatattaataatttcatttagcatgtagttatggactttttgtcagtccgtgaaaagttctgtaggggattcaaagatacagatgtttgtactgtccccaagaaggttatagccttagcaggatcaataaagacatgcaacaaagaaagtagcaacaacccattgaagagggtgttgataaaaggggtggttagataaagaggaaatgattgcttacagttgggaggtggagttaggtggaaattttggaggggagagttttgggggtttttttttttttgtactttgaattgctgttttatagaaatgttgactacaacatcctgtaaacatttgtcaatgatgat

SEQ ID NO: 1960 - DNA, 4001 bp, Homo sapiens
atcctttgagggtgctgtggccttccctcgtgtctggggcagcctctggggagcccaaagttccatccttgactctctgaatttgtcctgggttttgagtaagttgtgcagttattttatcttcctgcagacaaaagaaaaaggaaaaaatcatcacttgaagcctatatccaaacatagtggttgattaggttttgtgaaaagagcagctatggtcctcgaaatatatctaaaacaaaccatatggtcacggatacagagaaatctgagaaacaatctcagatacatgaagcaaataacagactagacaattatattaatattgcttaaaaaattaaaaagtacatgtggaacaacgacagatgagggaggcaagggagacagataacaataataggtacagctaaaaatgctatcaaggaatcccagttgatgtttcttcacatattcccccagcaagtgtttatttaacacttacagcggaggccctgtggtatcataaacagagtgggtcttgcagagagctagatcagagttcaaatcctaactctgccacttaactagctagttcattttttcaagcctcaatttccttacccatgaaatggagactgtaaggactaccttgcaaggttattgacagagttaaagataacctatgcgaagtgcgtaacatgttacctaacatgttaaaatgctcaataaatagcagtgttatcaaggataaagattagggtagtatgagtggctgaagatgtttattaaacaaaaagaaatttagactgaccttttcaagaagcaccttttctgaatccttacattaaccccctcaaagaactagaacctatataatatggtcatacctgctcctcctccagaggagccaacaagaggcaaatttgggattgttttcataagaaaatagaaggccatatctcaggattcttcccggttggagattttaaatgctgaaagtctccctagcatcaaactaattttcccccacgtaatcctgaaaaagggaaattgctccaaggactgattaccttccaggttcctctgcccattgcacggggtagcgggggacaggggttgcacccacaaaaggaaagcacgcctcagatcttactcttgctcagggattccttgtgtcaggagcatccacaggctaggtcggcctcgatttttttcttccttaggaactgttttaggttgcaagattctgatcaaatcagttaacttgtttccactactgaaggtcccagcctcatataaaaattcatatcagaacaaaaggtcaaaagagtgggtgttgaaattgagacgtcactctgctcaaacaccagggagccgaggtcgacagctatgagccaagagctatgagacggcagaacacacaagaagaacaaggtgcggagggggcctcccacctcaaggtcactcacaactcaggggaacctctggcttccttcccatatcatctcactcccttgaaaaagccaggtgcaatgacagcctttgccagcaaatcccaggaaaggccaaatgtcccagacacagggaagggcacatgagccttttctgaaggctggtggaactcaaaaccatttggaccaagtaagcagaatgagaagaaacctgctttctccttgtccccagatagtctcattaggcagccctttcccaactgcaaaggtgcaacacccaatctttccactgaaatcacatcattttgctgccaagagacatcaactccagcaaatcagtcctcagattaaggacaccaaataaataacaccttcgattctcaaaatgaaggaattacatctatgatgacaaatcagactcacacattcatgtagatgacctttcctagccccagtaaaggcaatcttgcctttcctaatctgacggcacagcacgtccagctcaaagaggggaaagaagggagcgagtgttcccacacacctgctctgatggcttcccaccttccttcagcgctgctccagggacctggcccaagagtgcctcctctcctcttggagactgtcaaagtccaggtgccacatctaccaagactccccaggccctcagatctacatcatgtcagttacctttgcaactgcccaacctccatggagctgattcattagggcaaagtacagcccagataccgcagcccaggacccgcctgacttgacgaatttgctcagaaccctgtcagagactggcgcttctgtttgcctgagcatgggctgagccaggttcactcacatgagaaatcatccaaattcccacagcaatcacggaagagagacatcaggaagaggaagtccagaagccccaaggcagcctggtctggcgagaaaagcaccacctttggggtgttaactcggggctctaccactagctggttctgttacttaacctctccgagtttcagtttctttttctttaaaatgggaatggcaatgcttagcttatgagggtcattacggggctgaaatgttggtaaagcagcacatgatatataggtaagtatgccctgcagatcaatattatcttttccttcccaaagagacaagttaattccactggttgaggcacatggggaaggggacacgctcactggtgggagcaaacacctggtttgcccagtgtgggtttttcttatgtatatttctcaccattgggttctggttatgtaataaattctgtcatctagctggaaggcagatttatatccccagtactgaactgaaggcactaaaaagttttccattataacaagaaagtagtttctcgcacttgaaatatacatttcttctgcattattaaggtaaacgcagaaaagcacatgactacttctgaattaatattttaaaattctgaatttgctcttttaaaaaatcccaaatggtttattctttctctcaacaaatgcttactgtgttcctattaagggccaggatttgacacacataaatataaaagacacaaattagtctctcatgtctgtccttactagtccagggaaaaccacccctcttgggtctcatggtcatatagggtcatgtacctaagctacaagattttctctcagcccctcagctgactctagaacccagcaactgagcatagaattctctgactgtagctaatggtttctttttttttttttccaagacagagtctttctctgtcgcccagagatggagtttaatggtacaatctcagctcactgcaacctctacctcccaggttcaagcaattctcctgcctcagcctcccgagtagctgggattacaggtgcgtgccaccacccctggctaatttttgtatttttagtaaagaaggggtttcatcatgttggccaggctggtctcaaactcctgaccttgtgatccacctgcctgagcctcccaaagtgctgggattacaggcgtaagccaccatgcctagccactaatggtttcttacctcactcttgggctgtgaagtttggctctctaatggctgcactgttgtttttaatccttctgggaagaggaactagagaagaacatgcacattaacagcaggaatcagaatgtgggtgatgattacactgacgtgatatcaaattatatgttctgatatatcacaacaacattcacaaaagttcttgatgtcactcttttggcatataatgtgacattagtcttgccctgtaacaccagctgcattatgggaatgttaactttgaaaaggaccttagaggttattttagcaactatgcttttttgatgataaaaccaagatccaaacaagtgaaatgatttacccaagatcacaaagttacctagaagttcagtgaaaattacactggtgtgctctagctgccttgcacaccagtgcaagtttagtaagagctgattattaaatattcaggaattgtgtgagccggttgttaaaccatggaaaacttgaaatccaccatggtgggagtatttacaccacag

SEQ ID NO: 1961 - DNA, 4001 bp, Homo sapiens
aaccaataccaaatttataattaaaaaacaataaatcaattaatttttcaataaagtatcatggcagagagtaggggccactaatattaagtagactttcaagttcactttgtattctttgctaacactggaattcaatgcaataatttaaaaattgaccagattccatcccccctacccccaacacacagccacccactgtaggaaaactattttttagtcaaactacacatccttcaaggatattcccctgcactatctactttgttcaaatcatattcctaggttcatttgaacaattacactccttctgcaggatggtcctagagtattcctgaaaaacatttcacattagcaaatcggggtatgttaaattgttcacggtttatttcaaagattagactttgtttttatgtaatgaatagaatatatttcacttagcatgacctgcaactttattatctgtatcaccactctcctaaaagtgaaagtaactatatttccaaatcaaacctaaaaaggcatataaccaaatagaataatagttccttactactggatcctactgttaccttagtgtcataccttctgggaagactttcctgatttcctaaaaccaacttagatatattttccatgttcaagcacaaaaccctcttccttctccttagcagttaaactacattttaatagtttgttggttatctgatttttccactagactgtaagctccacaaaggtagagactgtgtactctaactccctgcattaacactatgcctggcacatttgatgtgctcagtaaaaattttttgcattaatatatgaatgaaaagtccaacagaagaaatgtgcaaactattttttcaatatctcatctttttttaaggctcaaggttttacttagactgtatggaaaagtaaaataaaattgatcactttaaacaaattatataaattccattctcagctttgtcttcagaacctcccaagcttgctccagaaacttgtcttacttcagaaatttccactgtgtttctaaaacacaaaacatctttcttttaagacatctggagttagtgctgtttttaatcaattcagtatacttttgagcacctactagcataaagcagctattgtaaaaggtatggataacaaagagatgattaagacccgtcgtttgcccgctaggaaactcaagttattgaaagacaaagaaaaaaataagttacaatgtattgcaggaatgtggtacggcgtattggagaaggtgggaactggggataatcctgaaagaatgtgatgtactgaaatttaacaggtgcttttatgtggcaatattacctcacccactttcaaaagatgtcagcaagctaggtcaaggatcaggtgccacgttatagacttgaagaacttggctgattttttcccaggatttatccatcagcagtcctattagcagcagaaaattagaaatcctgaattttaacaaagtccctaaagagtcaaagaacactgggtgatcacaatcaaccaaagctaccacttctccagagcgtttttctaaagagaaacagctaacacaaaaaacttaactcctccttcaggaaagatttcctcttcgccggtagtctctcctacaccaaaagataaaagcgcacttcagagaggtcgggagtgcccgggaagtcacaaaggtctcccggtcctaggaaggaatccgatgctgagggcaaagcgcgctgacagagacttggggtcgcgggtcgtgagtaagcagctcacctgttcgtcctcctgcatcgaggcggccagcgggagcccgtccgccactcgggcgatcattgttagcaacaccatcttcacaaactacagggatccaacactggcccggaaggcccttggcgccgtcctcacttcctccgccgcgacaacagttataccctatgtctcagttaccggagatccagctgcttgcgtctccgcttcccgctgaggtggccggaaacagcgcaagagctttccactaccggtccccagaattggcttccctcagagaaccacaactatcagaacactggttccgcgatctgccttccaccttcttaacttccaaggtctggctgggttttctgaatttgaggcttcgaataagcctcgccctttgagcggccattgcacccaagctgaatcagaattttctagttcctgaaactaagtcttgggagagagctgggaaggagggtgggagttaatgggtaatccccattaaccactaaccgttaaccatgaagggtatgtaaaaaaaggaaaaccctgaaaattaggctattttcatatttatttttttctgttttctatgtcatatattctataaaatgttctatatttatatatttctagacaaagatttttgtctatttttgcttgtttgtttatgcggtatccccaccaggctccttaaacagtttatggtaagaagtcaataaatatgtgttgtatgtgtgaataaatgaacaagtacaggacatcttgtaccacctaggtcagtcacctacaaaaagctaggatcaggccgggcgcggtggctcacgcctgtaatccaagcactatgggaggccgaggcgggcggatcacgaggtcaggagatcgagaccatcctggctaacatggtgaaaccccgtctctactaaaaaaacacaaaaaaattagccgggcgcggtggcggacgcctgtggtcccagctactcactcgggaggctgaggcagaatggcgtgaacccgggaggcggagcttgcagtgaaccgaggttgcgtcactgtactccagcttgggcaacagagcgacactctgtctcaaaaaaaaaaaataaataaataaataaataaaataaaaactaggatctctgatatatctaggtgttcccatctctttgttttttggtgtccccatctctaaagtggggatatgatcggcctttcagggttttaatgaatattagatgagaaaatctaggtgcaaggctttcaaaagctaaaaaaagaattatacaaatgcttttatttatcattgcttaataatgactactctttactaagtgcttacagttagttctcgcattaatagaaacactgttaagtatgttctagatattagttaagcaacccagtaagcttgtttagtattatatctccactttgtagttgagaggaaagcctcagagagctagcagtgatgggaacaggatttgagctcaggttcaacttcaaatcctgatgtgattctgtcttaacttgtacccattaattaaagagctcaggcttttgttaccttttatattggccttcaggattagaagaaaaccaatattatttttgtgtggcattttctttattaaaaagattcttatttcaatagcttttgggttacaagtgggtttttgttacatagatgaattatatagtggtgaaagctgagattttagtgcacccatcacctgagttgcgtacattttacttaataagtagttttttaaccctaggtcccttcccaccctccgccttctaagtctctaaagtccattatatcactctgtatacctttgtgtactcatagcttagctcacacttaagtgagaacatacggtttttggttttccactcctgagttacttcacttagaataatggcctccagctccatccaagttactgcaaaagacattatttcactcctttttatggctgggtagtattccatggtgtgtgtgtgtgtgtgtgtgtgtgtgtgtatcacattttctttatccactcattagttgacaggcacttaggttggttccacatctttgcaattgtgaattatgctgctaagaaaagtaatattatttaatgatagacttttgagaccaaaacccaataagacctagtgattgactccacatgaaagatgaaggactacaataaataagacaaaaaaaattgtgctattaacagagacag

SEQ ID NO: 1962 - DNA, 4001 bp, Homo sapiens
caaagttccaaatctgagtttcaggcccacctatcctaaaccttgatgctaatgtatagctgtggctggcacctaccgtagaaaatttacttcttcacaaactctgaagacagttcccctaccacaaataaacaagtaattaaaatatgtattgtgtgtgtgcatttttatatgtaaagaactacatatttgcctacagtatttatatatattttatatatatacatacacacatatatgtgtgtatatgtgtgtatgtatatatataaaatgtatataaatgctgtaggctatatatatatacacacacacatatatgtgtgtgtgtatatatgtgtgtgtgtgtatatatatacatatccacatattcttgcccacattcacacaaaacagcaaaagagagaaactttagcagttaaacagaatcttttggaacataaaatgaccacaatagagagcagtttttgcatgctgtaaatttgccaagatgcccacacactgaaactacctcccactgctgccgcaaactccctacctgtgtagcatagggcaagcttcttcttgctgcacctctcatcattccacatgcccacatctttttctctcttgatgtagatctccacgcagtcctcatctttttgcctattgttgggttcacctggagcccagttcttggcttcttctgtcagaggtttctgggttcctacccagacccacacattgttgacttttctgattccaatccagtaataacttggtgaatagctcaatatggagtttaggtactcaatctcttctttgttttgaattgcaaccaggtgtgtgtacctttgctgacaataagcactggcctcatcataagtcatagcttccgtggaggtgttgtaagaccaggctccactctctttaatgagaagcactagtgggagaaaaagaaaagaaatggtagagtttggtactgttgtggtttaactctgacaactgtgctttttattgtcttatttttggcaatgtttgtgacatggcccagacttttctcatcttttcaaaagtaagaagtacgtatgaagaaacagcgacttattgtttatctcttttgtgactgccacccactaggtaccttatccacactcactcacaacattatagtatacccattttgtagtagaataataatcagaataactaagctttattgagcacttagtatgcaccaagaagcactgtatgaggtactttccatgaaccatgctattgaatcctcacaatgcatctgggaaataggtcattatgatccacactttacacttaaggaaagggagacaccaagaggtaaagtaaatgaccccaagcccagggaagaacacattgcaggtagaggtcaaggatgctgccagatatcctgtgcaggacagccccagacaagcaaggatatttcagtctgaaatatctatagtgcgagaatgagaaatcttggtctaatggcactgacttacccaaagtgagagctgagagaaactgtgaagcaatcatgacttcaagagttcttttcacccaaaggtttaggcttgaaatactttcctggggagataaaacacaaaatgaattaaagaaggaaatcgtgggtagctagttacattattctaccatgatgtttaaggcagcatcctaagattttgggcaaaggacactagtgcaataatctttatttcagagtttaatcaaataaataaacaaattttaagactttcattatttaggtcaaagagaaaagacaggttttagctacaatacaataagagcttgtacagatgtggtttttattagaaggccttttgcatatctgtgtttcatggcccgaggctgcccttataaagcgttctgcacttaccgttttgggaagcagttgttcaaacacaggatctctcaggtgggtatcactgctgcctctgtctcaggtcagtataggagttttgatgtgaagtcagccaagaacagctgaacactacttcggctgaggcccttttataggagggattgcttcctgtgaataataggaggatattgtccacatccagtaaagaggaaatccccaatggcatccaaaaactttcccgggaatatccacgatgcttaaaattacaatgatgtcagaaactctgtctcttgaagctacttcacctttgtccatgcctttatatcgtatatgcaattttattaatatgacaaaaatgcatgatttttaattataataacataaagtctatgtctttaaaaagttgtaaaactttgcttgttagtagtgtctctcatgtagttgtggtagtaattagaatttcagaaacagaaggaaaccaagaataggtttgtcatccatagtctactaccttcaatttctcattcatagctgtggataaccaatcactactcattttttcttcctttttcacctgccaattcaacatatttaacatgcactgtctcacagaggaatgactcacaaggtagatattaatcttcagattttgcacggcagttatgcctaaattaaaatattatctaaaaataatatctaacactcaaatggttaaaataatgccttattttaaaaaaagaaaaatgggaaatagatatttacatctgggaaagtttcatggtttgttcagtgaaaaaaataaaaaggaggccaggcacagtggctcacgcctgtaatcccaccactttgggaggccgaggcaggcggatcacctgaggccgggagttcaagaccagcctgaccaacatggagaaacgccatctctactaaaaatacaaaattagctgggcatggtggcgcatgcctgtaatcccagctactcgggaggctgaggcaggagaatcgcttgaacccgggaagtggaggttgcagtgagccaagatcacgccagtgcactccagcctgggaaacgagtgaaactctgtcttaaaaaaaaaaaaaaaaaaagaaaagaaaagaaaaaaaataaaacggaaaactatatatatatatttaattggtcaaaattttgtttaaaatttttgaaatgttaatgtgcaaagaataaaaattcttccacaatgttaacagtgactaactctggatggcaggatttgggataatttttatatccttcattattattttcaggattttaaagtttttttcaatttccctttttttcacctttatagtaacaagaatacagtttaaagaaacttgtctctaggccaggcatgatggctcatgcctgtaatcccagcactttgggaggctgaggtgggtggatcacctgaggtcaggagttccagaccagcgtggccaatatggtgaaaccctgtctctactaaaaatacaaaaattagccggggtgtagtggcgcatgcctgtaatcccagctactggggagcctgatgcaagagaatcgcttgaacccaggaggcagaggttgcagtgagctgaaatcacaccattgcactccagcctgggcgacagagcaagactccatctcaaaaaaaaagaaaaaaagaaaaagaaaagaaaagaaatttgtttccaaatgcaacagaaggagatgtatgtggtatcctatattcctgctcttcattttgacatttcttctgggtgattgtatacattccccatctctgcatcttaccctatctaaatgatggtaacagtaaatggggatcattttaatttccatattctgtaggttttcagagctcaagtcaagctaatattctatatctacagcctttcaaaataggaggtctatctaaaaatgtactgtcagcagacctgaacgagtagtggtaaaagcctcgtttttctctttacttgttagcactggtctttctgtgttcataaagatgtcaagacccaaaaaaaaaacaagaaaagagaagaaaaattccaaaaaagacaactgattagaaaaaaataacttaattaacgaatttaattcaacccctatcaaaaagca

SEQ ID NO: 1963 - DNA, 4001 bp, Homo sapiens
tgaaagaaaccctggagtggagtccacaggcctgggccctgtctcctgccttgtcctgtggccagtccagcctctgccttcacagctgggccgcaagtggggagccaggagtaggcagagtggggcctccactggggcctgggactcccactcgcagcagccaagagacttaggaagctgagaggcagcaacagcgttcagagtctggaaacctggtttcaagtcccagttttgacgccccgtttctccattttctcctcttcatttacgaaaagtgggcaataatgatattctacctactttgctaggtagatatggaggacaaataagacaatgtattccaaaggcctttcataaaaatgaattaggccgggtgcggtggctcatgcctgtaatcccagcactttgggaggctgaggcggaaagatcacctaaggtcaggagtttgagaccagcctcactaacatggcaaaaccctgtctctattaaaaatacaaaaattaccctgtattaaaaattagcctgtattaaaaaatacaggcatacacctgtaatcccagctacttgggaggctgaggcaggagaatcacttgaacctgggaggtggaggctgcagtaagccgaaatcacgccactgcagtcactccagcctgggcaacaagagtgaaattctgactaaaaaaaaaaaaaaataatgaattactgtgtaaatatgggaagggctgtgccagaggagaggagaatgccagggagtgctcgatgcccagcgagagggctggaggtggggcagggagagagagagaggtccagttcacaggagttaaggagactggttctgttacacaatcttgctaagtcggggcttggcaccagatgacagggggtggggaaggaggttgctggatacagaagggaaaggagattttaaaactccaagacctcaagacagagatacaaaaaatacaaagctagggagaagctgagagggaagtaaaagtgcagagatggagctgcccgctctgcagcctcggcccaccccacaccccagcaaccccagccccagcatttcttagggtcaggcctggcatgccactgcagccccagggagcatcattcctctttctggggaatacccccatctgaaacatctcaagcaaggtctcggagcagctttgggtttgggatggactcatggaaagctcaagtgggttttccatgtcaggctggctgctgggcattctgccagctcggcattctgccagctcaagagccagccccgagcggggaaggacctcccaaccaaacctcagttccttcttagcctgtcacccagaagcctacagatggaggaatagcagggccaagggggatttaggggtgggggaggcattgaaacaggtccccagtgaaagagtgtgggggtctctgatttccctcccagagagctttgctgtgtggagtagctagagagtgacctgggcacagaaaggctttggactccctacctcgctggagtacaaagttggcccatggctgaaatcaggatcacctctctactatgtgagggccagggacctagtggtgttttctaagagcgcccatctgattttcccagctgcagaaaggcaccctggtcccagcctctgctggatggagccaagtcagggcccaggatcccatctcccagcagtgcctctgcccgtcttcctcagaaagtttggctgagctgggaaatgcagtggggtggtgggggagggggtgtgcagactggggacaatgaagcagagtccactactccctccccagctccccactcaggttttctagcattttctggaggagggccttccaaattaggggcagacagagcaggcaatgggtgattggaaacccctctccttacccatgctgccgactggtacactttgatcccggcgggtttgctgtgctggtgtcagaggccgctgttccggggaaggagcgaagggagggaatttatacaaccagctgggggtggggcagagaaggaggagggcccgggctgtagcccagagtaaactactcagggcagctggccaggatactctcaagtggcctagggcaactggtgtttgaattatggggtgtgcgtgtatgtgtttaagtgtgtatgtgtgggagcctgtgctttatttatttatttatttatttagagacagggtctcactcttgcccaggctggagtgcagtggtgcgatctcggctcactgcaacctctgcctcctgggttcaagtgattctcctgcctcatcctcccgagtagctgggattacaggcacccaccaccatgcccagcaattttgtatttttagtagagaagggatttcaccatgttggccaggctggtctcaaactcctgacctcaggtgatccacccgtgtcggcctcccaaagtgctgggatcacaggtgtgagccgctgcccctgaccagctcgtgctctttagtgggtgcctgggtgtgtgtggatttgtgtgtctgggcatgtgtgtgttcctgtatacctgcgtgttgctcgtgcacgtgcctgcatgagtgtgtatctgtgcctgtgtgtgaatttccacgtgtgtgaatgtgcctgtgagtgtgcttgtgtgtatttgtgcgtgtgtgtgtgtgcgcgcctctgtatgtgcctaccagagtatctacgcctgtgtgtgtgtgtgtgtgtgtgtgcgcgcctctgtgagtatgtgcttgctagagtatctacgcctgtgtggacatgtgcataagtgcttgtgtatgtgtagtgtgtggctatgtggctgtgcatgtgcttgtgtaagcctgcgcacgtatgtgttcctgtgtctccaaatgctcgtctttgtatttggacctgtctcttagcatttaggggcacccgggactgtgggcccatcagccagggtcacttcttccctaagattgccctcttattccagatattcatactctttggataaaagctctggggtgaagtttttattggctaggaaaaagaataaagtctgggcttgagattgcaagtagaatacagggtttccaaaccagagtgggggaaggggagcaaaattgggccttggtgcattgggtatctgtcttcctggctcccatcagtgagggatcatgtgcccatcaaggaagactccctgtggctgcccggggcaagggtcttctcttatccccagcgccactcaacccctcttggctccatcctgcatctattatcctcaccattgtgccatcagcctgccaggcatcaaagagagtcttgtgtgtgcagctgccccacggggaaggccctgaaggctgcttccttgtctttgccagcttcctcctgtcctgactacctccactcaccctgccttcacccttccctctggccctcccctcttcctcctcctgaggtctccatctcctgcctcctctctattctccggcttcttggcttgggttagtccaccacccaagatctgaaagagaaagaaactttatccccaccttctcataaaaaattattgagtcattaacttaaaaaaaaaaaggctgttattttgtttgttgtggtctgtcattgactacctctttcatgctcctgagctctgacctggctggtctctgcagcaactccatggcacccctcacctctgcctgtggttttctccctgaactcttgctctacagccagcaggtggttggggaagttatcctaatctgggctacagagggaggcagtaaaggtagaggggcgattctcctgcctcagcctcccgagtagctgggactacaggtgcccacaaccatacctggctcatttttgtatttttagtagagacggggtttcaccatgttggacaggctggtctcgaactcctgacctcaagtgatccacccacctccgcctcccaaagtgctgggattacaggcctgagacaccgtgcctggctgacctggataatttttaaatttttt

SEQ ID NO: 1964 - DNA, 4001 bp, Homo sapiens
atgcaagttctaagagggaaaaaactgttgtgtccactgctgtatccttagtgcctagcataaatttcacacattgtagggactcagaaaatacctgttgtatgaaaagagcactaagtttctatgtgacacagtgcagacatggcataaggaatgtgtgaacgggagagttagcatgtttgcttggctagagctgaaaatccaggctagggagaaagaagacattagtttacttaggaaatgaaaaaccaagttcaaagctattgctggagagtcttcaagaatcagatataaaatttgtcacaacaatgggagaaggaccaaaaaatgataaacccccgtcccttaataagctcgtattgtaattgtagaaatgacattaatgtacactgaactatgaataaaaaatagaaaatgaggtgctaaatatttggtacagattgtaagtaccttaacagagatttcttaattaacattattcctttataattgagggattttgtggggttattgggatttgaactctacagcatgggctattataggttaaaaatagtgttcaggagtttctggggaagaactaaaggtaagaagaaaagagatgtttacagaagggatagaattaacagctctgtgaaataattttcccttagactatgtataactagtggatatttaagaaaaatgaatataagtaaaatagacttagcgatatataaatatcataacataccacaacagagcattgtccacccccacaacttgaagatgttccataagtccctctgggtgctctgacatttccatggaaatatctgcaaatgaaatacaaaattatatttagatgtatactcttaaaccacacatttatagcctttgaggtggtgcttacaactttcttaataatcagaataaaacacatatgtctactaaccctgtctgaggtaacaggtttctcagacatagatgaaaaattacttcaaatttacatcagaactgatgcacagttttgttttgttctattttatttttacgctttagtctcaagttgctaatcggtactgccctgaattttttctatggtttggtaatttttatacctgcttttctgctgagctattagataaaactatttaatatttactatgtatattttttaaagtattgttgctgcttaattaactattgatgcttatatttaatgttatagcctcactcttgatcataatgggtcaatgcctcaaatacctaaaaaaaaaaaaaattagatagccagacaccaggaaagaaaagtatttctttttttaataaaaagaaatacctttttgagcaactgaaatgacaaagtcacaaatttcctgcacaccttaaaatatacttaatgtaaatgacgagttaatgggtgcagcacaccaacatggcacatgtatacatgtgtgacaaacctgtatgttgtgcacatgtaccctagaacttaaagtataattttaaaaaaattctatcttccaaagcatatcacttctcaggtagacacagtgtttattgcaaaagatctgatttcaatagtatttcttcaagagtctccccagagacaaagtcaagaagaggaaatcagcatatctgagaagaaagatttcaggatcactttttttgagggtctgagaaaatgtttagtttctatattatttaaaaccagaattgaaatggggtgattcctatccttgccacctgcctctacaaccccaagagtttctatctgagcatctaaacgtcttttaggctgaaaggctcaccatggctttgcttggtccttctctagttcttctgcagcccattgagcctcttgacttagcacaagggtctcaggtccttgcccaaagggagtgtgctgtgctgcaggtagactgcactgaatgtcaacagaaagccttgctttctttcatttctctaacccagtctcacatcctcctcctcctccccttttccctccccttcctcctgcacttctctttcctctttccccacccctttcctagactggcctctattgcctcccactgagacaaaaatgaactgctgatcagaaagtaatgtgactagattctctcttccttccctcctttctatccttccttccattctcctatgcatctttccttaccctcctcctccttcactcattgttgttgctgttcttcttcctcttctttttcctcctgctcctcttcttctacttgttcttgttcttgtttttgtttggttcttgttctcctcttcctccttctctctctcctcctcctccttcttttccaccaccctcccctatctttttcataaatgctaaactaactcttggctacctgtggtaaatggcccttggaaattgcaaatactacaaatcaaaactgcatttcagacatatttatgatgtttgcaaaacttcagtagagctaagcagtggacttgactcgtttcggttccttcacctccgtctttccttgctcaccacctagtggacgtccttgttagtggcacttcctgaagttaacccctgaagagagcccatgctctctagcttttcaccgtgtaggtttgggagcctacaagtacctttaatattcttggactataaaatgagatggttttataagactgcatgtgaaattaggacccatatgatgaaggacaataaaaaggaagacccactgatgtgagtcaatgagtcaaatgcaaatcagatttgcatttttaggaaaataataataacaacaacaaaaactctgaagctcagcgccccatatttattatattgtttaatctttataacagctctctgctatagatatgattattatccccattctaaagagtctcaaagaggttaagaaacaaattcaaaaactagcgaaagacaagaaataactaagatcagagcagaaccataggaggtagagacacgaaaaagccttcaaaaaatcaataaatccaggagctgcattttgaaaagattaacaaaatagatggaccactagctagactaataagaaagaagaatcaatagacacaataaaaaatggtaaaggggatattaccactgatcccgtagaaatacaaactaccatcagagattactataaacatctttacacaaataaactagaaaatctagaagaaatggataaattcctggacacatacaccctcccaagactaaaccaggaagaagtcaaatccctgaatagactaataacaagttctgaaattaaggcagcaattaatagcctaccaactaaaaaaagcccaggaccagatggattcacagccaaattctaccagaggtacaaagaggtgctggtaccattccttctgaaactattccagagaatagaaaaagaggaactcctccctcactcattttatgaggccagcatcatcctgatactaaaacctggcagagacacaacaaaaaaagaaaatttcaggccaatatccctgatgaacatcattgcgaaaatactcaataaaatacggcaaactgaatccagcagcacatcaaaaagcttatcaaccacaatcaagttggcttcatccctggaatgcaaggctggttcaacatacacaaatcaataaacagaatccattacgtaaacagaaccaatcacaaaaaccacgtgattatctcaatagatgcagaaaaggccttggataaaattcaacaccccttcatgctaaaaactctcaataaactaggtattgatggaacgtatctcaaaataataagagctatttatgacaaacccacagccaatagcatactgaatgggcaaaaactgaaagcgttccctttaaaaactggcacaagacaagtatgcctctctcaccactcctgttcaacatagtattggaagttctggccagggcaatcaggcaagagaaagaaataaagtgtattcaaatagaagagaggaagtcaaattgtgtctgtttgcagatgacatgat

SEQ ID NO: 1965 - DNA, 4001 bp, Homo sapiens
tgcgcctcggcctcccaaagtgctgggattacaggcatgagccactgagcccggccatagcccgctaaaactttgacaaacatcagtgcaatttaactataagttcccaatcaagagctactcctctgagatctatctgattgaaaataccccaccagaaaaaccttatcctcattttctcaggtcctaaaagttaattaaagccactctctgaacttgaagcaaaatttacacaggcagtttgaggtttctgaatctttggggccaaatgtgctcagaggaaaaggaagaggtcttgtctttgaaatattaaaaaccattccagggctggggccttagcacttcgctgtagagctcaagcctaatttcagggtaccaagagaggggcttctgaacataaagcccaggaggcaatcgagaagggttcttaccctgggatccacatggaggtctgggaacctcctgtggttgtctctaaaggttggtgtttatgtcgatgtttttgctttcatctgggaaagacaagttgtaactttcatcaaaatctcaaagaactctctgatccaataagttcatacctttgaaatagaggaggatgccaaggagagtagaaggaagagaggaataactgctcatttaagttaaccaattcagaagtatgacatgcaaaaagacaggacaaaagtaattcatatccttaggtcattgtggttcaaacttaagacaggctcaaactccttcctcttctctttatcatactcttattcctgttttccccaacacagaaacccacattataagtacttgaaaagtgtgctatagtaaagcaaagcagtaggatgaatcaggtgtatgcggtacttttttctggagtcccacagaaaggtgctcaaaaacagagacctgcctggttcctccatagccacagactgcaggatttcggaccctgggactatgtgggatactcttggaaagtctgaggaaaattggaagtagcttaaccatgtgcattttatctaggtgcatataacattgctgagttcaaaatgcctagctatccttggatcttccctgaattagaagtagcctaaccacgtgcatcttatccatgagcatataacattgctgagttcaaaatgcctagctatccttggatcttccctgaatcctaaaccccactattcctaagaattttctttttattgtaacaataatggctaacatttactaatcacttactatgtgtcaggctcagatctggatgcttttcagcaaaatcttatttaatcctcatgatgaaactatagagtattattactatatccattttatagaagaagaaactgagtcattaacaagattgagtcttagggcagaaaaggaaactatgtggatattccagatcagtcccagaagattcataggctcacagaaagaaatgggagggatggggatgagaaactattcaattgtaagcttgtcccagggcacctacccagtcttccatttattccatcatttatcccagagagaagtacagtcttggaaaatggggtgacaggtttaccatgatctattctcagagagcccctataaattctagtaggaggaacagcagctgcggagccagaggacaggccccagatcccaacatcatgtagcctaacagtgaagcttagataaaacacagcctctgtaaaccacgatggctttatttgtaaaatagaaatagcaacctcaactcacaagggtgttgggagggtcaaagtggacagcaagtttaaaagtactcacaaaatctaataggcaattcaacataaaactccatggctatcgctgttcctcactttctgaacctttacctgcctgactttactccataccactccaactcacttcaaccacttcccatgcagaaaaaaataaactcaccatctcctctgtgactctgctggttttctgccttctgcccaacccagactgcttacagtctcactgcctcccctcagtgtcaggctgtttagaaaaacaacttcctattcacattccagaaactcaccacagcccttcccatgaagttagaatgttgataatgcaagagtaatgttggcagcttagaaatagtggttgccaagaggcaaggggtcacccccttccatggaagatggtctggaggcaggcgcaaggtgaattactcctggatatcccaggctgagcaatgtgggaacagtacacacacaaaggtttccttggattatgatataagctccaatttaaagtagtacatttggaaaacatgctttgaattaattacaatgtgattttccagtgcccattttccagtaattatgacatgtcagtgaatgtttactattccggcagccttctgagggaaagaagcaaaattagtagcacaaaaaaaaatagagagaaatggaaaaagccactaacagttttctggcgcttgggaaattttattggtaagtttcaaaatgacgtattaaatagacataggtcatgtgaaaggaattctgcttcttatatcagaaataaaaaggtatacaaatagatacctttttattttcctcttcccatgggatgtgtaggaccaaaaagctgttggcatagtggttaagacttcagctgtgctgttaaactgcccgagacccatcctggctcctcttctggctatctactgggcaaactacttaagctctctatgcctctgtttcctcaactgtaaaacagaataacagaacttgcctcaccgggttgttgtaggatgaaatgagttaatatgtacagagtgattgaaatgacacttggcccacaattgatgctcaacaaatgttagtgattattattacttttcagattgatctcagacagcaaaatcaagtatcaagtatttagtttcaagtcagaaagccataactcctatttatactcttggaattctattgtacagtagtaggtattattcttcattcacttcatgatggttacagcttgtaaataggcatctcatggataaatttaaaatggaatgaagtagaaacattggaagaaagtctaaaggtaaagatgaattagggtatataaggctgcatttgcacgttggaatttgggaccaagaagaaaaaattaattatatagtagaagtagaaaagatggtgaaggaaatgctgttgaaggaatgactgtaggggaataagggaaacttagagagaggaaaaaatgaggaacttcttggcagcatgatgcagttcagagtccagaccctagagtcagactgcctggctccaccacctaccagctgtgttgggcgttactaatctccctataactcagtttcctcagtgatgtggtttggctgtgtccccacccaaatctcatctggaattgtagctcccataattcccacaggttgtgggaggcacctggtagatcattgaatcatgggggtggtttcccccatactgttctcatggtagtgaataagtcgcatgagagctgatggttttataaggggaaaccccttttgtttggttctcatttctctctcttccctgctgccatgtaagacgtgtcttttgctttctaccatgattgtgaggactccccatccacgtggaactgtgagtccattaaacctttttttttttaataagttatccagtctcgggtatgtctctatcagcatcatgagaacagaataatacactcagcaatgtgaataataaggataataatcaccaaatacatagacatgtaaggaccattaaatgaatttaatgtgtttggaacaatacctatcacgctgttaagtgtaagtttaagtgttggctattattctataagacttgcctccatgtctttctgttcttactttcactcaccagcccctctttttggcattgcctcatgttagaaaaaatatatatagtctcagatggggatgaggaagtgtggtatgtagactagtaggttctttttttgag

SEQ ID NO: 1966 - DNA, 4001 bp, Homo sapiens
aggctaagaaatcagatctctggggtgatttctgaggactttcaacagggcaaccgcacagcattaaaccaagagtgggcttttttttttttttttttttttttttgagacgaagtgttgctctgttgttgcctaggctggagtgtggtggtgcgatctcggctcactgcaacctccacctcccgggttcaagccattctcctgcctcagcctcccaggtagctgagactacaggcatgtgccaccaagcccggctaattttttttgtatttttagtagagatggggtttcaccatgctggctaggctgctctcaaactcctgacctcaagtgatccgcctgactcagactccaaaactgctaggattacaggcgtgagacactgtgcccagccccaagcgtggcccttatgggcaagcttatttgtgtcaataaagcgtttcagagggaacagaaaccttcttgaaggaaggctgtgaggtaccaccccctgcctctgcaagggcctcctggtcaaaaacagcaataggaagggcaccctgcccccagcagtgcacccctcacaccagtctctggggtcagaccccaagccccactgccatctcccctgcttcagctggcagggccccagccagtgctggcttcgtgggcacgagacctgtgcagccacacagggccctgtgctcagaagggccacacttggtttaatgctctgctgttgctctgttgaaagtcctcataatacttaaacaaggggctctacatttttattttgcactgggccccacaaataatatagcaggtcctgcacacagcatcaaagaagctcagggctgacagggtactcagacatacccttcctgacaaccgtacaaatgaggaaaccaaggccaaggagcagaagtaccttggctgggaatggtgtcaggcagcaggtcaggtggggtggcagtgggaaggggtcagatgttcagggacctgcccacaggggccgtgtcattttcacagctccaatctggggtttcccccagcccatttctccacaagccctggagcccagccctgggtcctgccatgacaacaacactgagtgcaccctctgccctgccagagtccagctcctcccctgcaacccttacacagcatgcgatgtagccccttcctgccaggttctattgtgcagaggaaaggtctagatgtggaggtgggaggggagatggagaggttgcttcccgccccgactctatgctacctctgagcttcaaccagccccagacgctcagtctcttctgagcccctgcagaacacggatgctgcactaaaggagcagctcctggagccaggagagaagcaactcctggcttcacgagtgatctggcaggtccagtttcccccacctcctccctttcagcttcaggggcagcccacagaagagtccagttctggggaacattgcctcctgacttccctgccttagctccacctgccctggccctcatctgccctcttgttatggtcacaggcaagtcaagtcaacttatatgtattgagtgcctagcgtgtataggcactagggacgtccccaagcctctacgccccctgtgtccctccacctcttcccatccccactgtctcccagcctttttgccacccaccagctcagtccctcctaaccccttacccagagcttcccaggtcccctcctccagtctgactagctctggaaggctgcgctgagtatcacacacaatagcccgacccctctgtcagccccctctttagggcagagccagcaccagacaatggccccgccccctcccttcagaactgtcagctcccccgctcccttacctggagcctggggatgccgctgcgtttccctccctctggaatgccaggctttccggtctctcagtgcctcagcccctgccacacccccacccccattctcaaccccatcccgcctcactggtcctcagtcaccatggcgaccgcatctctaagtgggagggactagaatctccccatattcttcctcctcctacccatgtcccactgcgccccaccttctgtggctcctggattcgcacatgtggaggaggaggggctccagatgcgggaggaggtgaaaaggaggtacagtagcccccggtccctgctcagctcccttgcccaccttcagcaggcaccaccgtgcacatgtcaccacctgggttcagggggtcagctggggcccattcctctttacaaccagttcctctgggtttccctctaccccgggaactgtgtatatgccggggcgacacagctggaccgcagcccaaccccatgcaaattcagtttgccaatgaggacacgaatgagcccacaaatatctatgcaactatgcaaataagccaagggacagactctgttaagaaccccaaggagccctcttctatttacagtatcctgacttctgagggagggggtccactgccaggttcaggttctgcctctccttcctaagctgcctgagaagaaggtggctcccccagaagccttctgtggctaacaccctctgagatgtattaaaaggggaaggtttgtgctgtagagagcagacttcagacaggactttccaagggtctagactagatggacatagggaaagaagacagccggattctttcccattcggggaggagcacaggcaggcagcggtttgtatggagcctttttgagagccaagcctgtgccctctcccagccctgatcctaaacagccttgttactagagctcccttatgtctctactgggccctaactttgttggcaaaatgaggagttgaaaaagccccttccggctgggtgcggtggctcacgcctgtaatcccagcattttgggaggctgaggctggcggatcacctgaggtcaggagttcgagaccagcctggccaacctggagaaaccccatctctactaaaaatacaaaattagccgggcatggtggcgcatgcctgcagtaccagctactcgggaggctgaggcaggagaatcacttgaacccaggaggcggaggttgtagtgagccgagatcatgccattgcactccagcctgggcaaaaagagcgaaactccatctcaaaaaaaaaaaaaaaaaagaaaaaagaaaaagccccttccaggctggcctctctgtcagctggcaggggactagaaaaggcaccatgagtctggggcgaagggccctagatcccaggcttggttgcctgtagcctgctgtgtgatgctgggcagagcatttaccctccctgcctcacatccataaaataatggctttttaacctgcctgggagcagcatggctccgccagacttcatagtatttttaagaggaaggaaatgagtgtgctggtgtcggccctgggtagagggtttcatggaccaagactgcttccccttcatatctgagctggggtggtggttgagcatttgctttgtggtgaagcaaggagggcatggcatgtgctgaaatcggaagtggaccctgaacggggccgccatgtccccactgattcctgacactccaccctcactgcctctctgcatctcggctgtggggactcagaaaggacctgcctgttcaggcttctctcccctgggactgggacacatgatttgaaattaagatggtggggagtagaggaccctgaactagtatgataacaggaaggaagcaggtgaactgcaggaagccctcacacccccattggacatccttgtgtccctgcccctattttcttcccttttaggggaattggatccagtctctgtggcagagaaggaaggagctacctttctgaaataacccaagggaatgggggagcctatagatcctacctggctccacttcaatccaggtcacccagccggactttgggggcctcccctggccttgccatatgagaatcaaaacttccagaaaagagctaaatagtcttgatgagagagtagggacat

SEQ ID NO: 1967 - DNA, 4001 bp, Homo sapiens
tctcctggaggccaggcctcccccagagctgccataaacccctcagttgctgaacagatcaccctgtattgatggtctgattgctcatgtcttcccccttgtgactgtgaacaccttgagggcaggggctgaggcttatccgtgtttgtgcgcccagcatccaacacagaggaggtctctgcatcaatgagcaatatacatttcttttaccaattgccccagaaagatgctaaagacacagccatgcccagtcacctacaactcctacagtgtctacatcctttcctgagtcttctccctggaggtgagggggccagcagcctccacagtctcagtaagaaaccagccaagctgtgcttgtgtgtgggttccagggcccattctccaaccagccatcccatggtcctggacatggtatggtccagcatgatctatgtggttggcatgggcctggcgagctccgggtcaccgggtccacatatggtcttctagcatgggccttgactttggggtacctgggagtgtgaagcagttaggagtttgaggtgcccagcttggtgacagtgatatttaaggaaggaaagaaaaattaccaacatggagaactggaagaagcgtgcccctggccccgtggccacctgttttcctcaatctgctctccagtggcttttctttccttttggacttctgtttctggctgtgtctctctttctccgagatcctctgtttctccctggcatctctctctgtgtccctgtttctccatatccatttcctcccctcctctgttcctctctccttcctccacccacctccagctctctattgctatccccacacttcctgctgtcggacacttacctgcatagtatctgaccctgggcatgggcccctgcccgcctccccccgcggtcgtcgtcggcagcagcagctgaagcagttggaagaggaaaaggcccaggaggctccaggggtccaggcccagggctgggagggccatgctcagccacagactgtcaccagggagctctggggaaacaggcacccgggcactttctgggtgagcagttcttaccacatccccccgaggaccaataggagagccccaggcagcagaagcgtgtgtattggtggcaggggtggggcattggggcagagaaggttccctatctggaagggccctaagacggtctcactttcatcatccttccaggcctcagcctgtcacctcactgtcccctatgggtaggagcccaggtctcccctatcctgcttcttctgttgtcttctcaccaacagctctggtttgcctttttttgccttactctcaggaagtctttcctgtctttcctcctttgccttccctcttctcatagcccaagcccaaaccgttgcctggctctgggcagggaacattttggggagcaggttcctgtacccaaaatataaattcctcagaccttactctcctgtcactttcagatctgttgacacctgtgcctcatactcagctctgacccaggtaggcagactgggtttgagtctgcctgctctaacctctcccccagccccagctgggttcagggtctttgaggctcaggcctgcctggcctgatacttccagggaggcaatgagggtccatcccaccaggttggttatcagcatttcccggggagctgcctgggcaggggtggctggccggctcccagcctctgcagctccccggcccccttgtctcttgctcctgtgtctgcctccctgggcctctacataatcttccccaagaccacccaccccaagccacccatctcacctcacatacccttgaaccagccacagtgggaaactcggtgtctggattctagggcgggggtgccattcaggagaaagaagaaggggggttcccaggccccagaggcaggggacagaaggctcagcctggctggaacgggagtgcggccctccaggtgcccatcatgccaaagccagcactgggagctctaggccagggaaaccggaatttccacctctcgagttgtgacagatcctggcttgggcggaagttggtggattgggagggaataaaaagacgttcacccacctcacaagagacacacctctctctccctcctctgctcggtccaaccagaaagtttaagaggcccttctaggtcatttcagcgattcccctgcctctccatcatgtcacagccagtataaccagcctagcagtggtttcttctcttgcttaagatttcccagataggggacatgacatattcttcttttcacttacccacaaggtggggtctctctactcctacctactgggaagtccctgcagtggtctaacctttaaacctcccactctcagctgggccacagtctttaaaaaaataaaataaaataattgtattaggctcttatccatgattttgctgaggaagtcccccttgcagtctaatctccatcactctttgacatcaggccaataggaagcccagaaatcaggccagtagaaagcccagaacatttcccatctgaactcgtgctcactggaccacactttggaggcacccaacccccaaaggtggctgctcacccctccctaaaggctccagggggagcctcataacgcggggttaatgaggcatccagcgccaagaactctgtggcctacaaagtgggtaggttcctgcccactcgacatggtcagctgactgcaggttaaagagcacagacatcccagggctaatccaactctaataaataatccacttccatctgacatgcacattcctccctggcaggaagtccttcctgtagtgtaacttccatccctcctgctacagcaccagccaacatgggggatgttacagctcaggctactccttataattcctcatctgaggtactcagccttctttcatctctctcagtttccccgggggttggtctcagacatatcctgcctgacaatcgtttctgtcaagacttgcctaggactcccccagactctcccagaggctggttgccaggtcccttccagtttcttagaatcaagagaaactcccatttatccagaccctaccttctgtgtctccccaacccccagctcagatttgggaagccagtctgcccctgggcctctctgcttaaacagattggctcatttgggtcactgggaagagttctgatacggggaggctgggggagttccagccctacactcccagcctgatgtcctattcccacctttctggaagtcatagactccatgccctgcccccagttcttcctccagacatccagaattctcccaactccggacgtcctcttccccagcccctctagccaatatgaatagttcacactatcaggctttagccctcccaacaattttagcagctaggtactgccataatcccattttacagatcaagaagggaggttacacagctagaagccaagttaaattcagatctgcctcattcaatagcaaatctcttagctacaaagactctacagagtcctagtccctcagtcctccctcctgccccagtccacagttctgagccacttggatagagaaggcaagggtgggctgggagggtagtgagctttatctactctaggctaagaaatcagatctctggggtgatttctgaggactttcaacagggcaaccgcacagcattaaaccaagagtgggcttttttttttttttttttttttttttgagacgaagtgttgctctgttgttgcctaggctggagtgtggtggtgcgatctcggctcactgcaacctccacctcccgggttcaagccattctcctgcctcagcctcccaggtagctgagactacaggcatgtgccaccaagcccggctaattttttttgtatttttagtagagatggggtttcaccatgctggctaggctgctctcaaactcctgacctcaagtgatccgcctgactcagactccaaaactgctaggat

SEQ ID NO: 1968 - DNA, 4001 bp, Homo sapiens
tgctgaacagatcaccctgtattgatggtctgattgctcatgtcttcccccttgtgactgtgaacaccttgagggcaggggctgaggcttatccgtgtttgtgcgcccagcatccaacacagaggaggtctctgcatcaatgagcaatatacatttcttttaccaattgccccagaaagatgctaaagacacagccatgcccagtcacctacaactcctacagtgtctacatcctttcctgagtcttctccctggaggtgagggggccagcagcctccacagtctcagtaagaaaccagccaagctgtgcttgtgtgtgggttccagggcccattctccaaccagccatcccatggtcctggacatggtatggtccagcatgatctatgtggttggcatgggcctggcgagctccgggtcaccgggtccacatatggtcttctagcatgggccttgactttggggtacctgggagtgtgaagcagttaggagtttgaggtgcccagcttggtgacagtgatatttaaggaaggaaagaaaaattaccaacatggagaactggaagaagcgtgcccctggccccgtggccacctgttttcctcaatctgctctccagtggcttttctttccttttggacttctgtttctggctgtgtctctctttctccgagatcctctgtttctccctggcatctctctctgtgtccctgtttctccatatccatttcctcccctcctctgttcctctctccttcctccacccacctccagctctctattgctatccccacacttcctgctgtcggacacttacctgcatagtatctgaccctgggcatgggcccctgcccgcctccccccgcggtcgtcgtcggcagcagcagctgaagcagttggaagaggaaaaggcccaggaggctccaggggtccaggcccagggctgggagggccatgctcagccacagactgtcaccagggagctctggggaaacaggcacccgggcactttctgggtgagcagttcttaccacatccccccgaggaccaataggagagccccaggcagcagaagcgtgtgtattggtggcaggggtggggcattggggcagagaaggttccctatctggaagggccctaagacggtctcactttcatcatccttccaggcctcagcctgtcacctcactgtcccctatgggtaggagcccaggtctcccctatcctgcttcttctgttgtcttctcaccaacagctctggtttgcctttttttgccttactctcaggaagtctttcctgtctttcctcctttgccttccctcttctcatagcccaagcccaaaccgttgcctggctctgggcagggaacattttggggagcaggttcctgtacccaaaatataaattcctcagaccttactctcctgtcactttcagatctgttgacacctgtgcctcatactcagctctgacccaggtaggcagactgggtttgagtctgcctgctctaacctctcccccagccccagctgggttcagggtctttgaggctcaggcctgcctggcctgatacttccagggaggcaatgagggtccatcccaccaggttggttatcagcatttcccggggagctgcctgggcaggggtggctggccggctcccagcctctgcagctccccggcccccttgtctcttgctcctgtgtctgcctccctgggcctctacataatcttccccaagaccacccaccccaagccacccatctcacctcacatacccttgaaccagccacagtgggaaactcggtgtctggattctagggcgggggtgccattcaggagaaagaagaaggggggttcccaggccccagaggcaggggacagaaggctcagcctggctggaacgggagtgcggccctccaggtgcccatcatgccaaagccagcactgggagctctaggccagggaaaccggaatttccacctctcgagttgtgacagatcctggcttgggcggaagttggtggattgggagggaataaaaagacgttcacccacctcacaagagacacacctctctctccctcctctgctcggtccaaccagaaagtttaagaggcccttctaggtcatttcagcgattcccctgcctctccatcatgtcacagccagtataaccagcctagcagtggtttcttctcttgcttaagatttcccagataggggacatgacatattcttcttttcacttacccacaaggtggggtctctctactcctacctactgggaagtccctgcagtggtctaacctttaaacctcccactctcagctgggccacagtctttaaaaaaataaaataaaataattgtattaggctcttatccatgattttgctgaggaagtcccccttgcagtctaatctccatcactctttgacatcaggccaataggaagcccagaaatcaggccagtagaaagcccagaacatttcccatctgaactcgtgctcactggaccacactttggaggcacccaacccccaaaggtggctgctcacccctccctaaaggctccagggggagcctcataacgcggggttaatgaggcatccagcgccaagaactctgtggcctacaaagtgggtaggttcctgcccactcgacatggtcagctgactgcaggttaaagagcacagacatcccagggctaatccaactctaataaataatccacttccatctgacatgcacattcctccctggcaggaagtccttcctgtagtgtaacttccatccctcctgctacagcaccagccaacatgggggatgttacagctcaggctactccttataattcctcatctgaggtactcagccttctttcatctctctcagtttccccgggggttggtctcagacatatcctgcctgacaatcgtttctgtcaagacttgcctaggactcccccagactctcccagaggctggttgccaggtcccttccagtttcttagaatcaagagaaactcccatttatccagaccctaccttctgtgtctccccaacccccagctcagatttgggaagccagtctgcccctgggcctctctgcttaaacagattggctcatttgggtcactgggaagagttctgatacggggaggctgggggagttccagccctacactcccagcctgatgtcctattcccacctttctggaagtcatagactccatgccctgcccccagttcttcctccagacatccagaattctcccaactccggacgtcctcttccccagcccctctagccaatatgaatagttcacactatcaggctttagccctcccaacaattttagcagctaggtactgccataatcccattttacagatcaagaagggaggttacacagctagaagccaagttaaattcagatctgcctcattcaatagcaaatctcttagctacaaagactctacagagtcctagtccctcagtcctccctcctgccccagtccacagttctgagccacttggatagagaaggcaagggtgggctgggagggtagtgagctttatctactctaggctaagaaatcagatctctggggtgatttctgaggactttcaacagggcaaccgcacagcattaaaccaagagtgggcttttttttttttttttttttttttttgagacgaagtgttgctctgttgttgcctaggctggagtgtggtggtgcgatctcggctcactgcaacctccacctcccgggttcaagccattctcctgcctcagcctcccaggtagctgagactacaggcatgtgccaccaagcccggctaattttttttgtatttttagtagagatggggtttcaccatgctggctaggctgctctcaaactcctgacctcaagtgatccgcctgactcagactccaaaactgctaggattacaggcgtgagacactgtgcccagccccaagcgtggcccttatggg

SEQ ID NO: 1969 - DNA, 4001 bp, Homo sapiens
tgctagaactacagggctagccttggcaaagggggtcactgggagagtttgtggggcatggcgaccactcccatgttaaggccctcagaatccaacagccttcttagcaaaagcgccttagctagggacaatagaggctaatttgcatctcatttacatgctcttcatttccaggcaaaatgatctgatagcaagcaccctcaaccctttccttcctccctgagagagcaggctgtgcctcccttccactcagtctacacacacacacactcacaccccactttaggctggattagtccagcctctacaaacacttggctggcctttgcattggccttctagactcaactatgatacacctttaagagggcttcttgtagctgtttctgggaagcagcatctggtcagctcctcaactcctggcctggagaaaagatcactctgccctggaagaatccgagctgcttcacacaccccatctgaagcacatgggagagacctggccgactctcccctttccagatcctcccgttgctgggaagaggaaacagcccttctctctcctggccccgaagccacctctggggaatggctggggtcacagccagagtctaggagagctgtggaagggatggagaaggggagactgggctggggacaatagcaggaagcctttgggctggtcgcccgccccagtccaccttcctcagagggagcagggtcgcgccaaggagcctgtggaaccggagctttcctttctccaagccatttcccccactcttagctcttagccccacactcagcacctaccctccttcccacccaacccccaaccaggacaatccaggtgtctaaagcctcgaaaagaggtgggcctagggccaggggctcgacctgtctccccctcaccggatccggggctccgaggaggggccggtagcagagtctgggccgggaccgggtcccagagccacgttagcgagaggaggggctggaggggcctgcaggcgcagacgaagaggggataggagcgggggttggggagcggaggcgggtctcccaggccagggaaacagggccagaggctgagaaccgacgagggcgggcctgaggccggcgctcagtggggaccgtgggctcaggaggcagttgccagctcggatgtcctccttgggagacctcagtctaacaaagccccgggccgagcgggctgaaggaaggagataggcgctgggaccgatgttgctcgagggccccattcgccgcctctttgcacgagccaacccttcagagggtgctcagattccggcttgcacaaggacagaggagcacccgtgacacaaagtccggaacgatgcgtccctcttcccatcccttcaggggcgtcaggagggtctagttctccgtgggtctcggagccctagtttccttgctgggaaagcaaggggccaggttttccacgctctctacggagcgcgcctcaaataatcccttttcgcgcttcccagtccagcgggatgcgactcgacgaaagcccaattgaacgaggtgcccagactctgctctcaccagtacagttacggggctcggccactgtccctccttcctccctgcaccccaatttcgttgaccctctccgtcagccaggcacaccgggcgccgacacctccctggtcccctagcgcttcagaagcttgccccccgccggccgcgccctcctgctccctccccgcctccccgcagccccttccctgcccggggtacttgctccaggattcgggtcagcgggatcgagatcgccgcgggcggccagcggccacgcgctgcgctgagttcgcaatccgtggttgtgctcaggcgagatgcgatgagcgtccgaattggatggtgcttgaatttgggttccagggcgctgtcgggagagccctgggtccaagtccagccgcggatccgcggaggaaaacaatgcgaccgcccggggctctgggctcggccccagtggccccgcccgcctcccagccgggcccacctcctgcccgcctttgggtcgccgcgactaatcccgccctcggagggcggctagacaccgccttctcgtcacctctccgccaatagtgctgcccggggaggggcgccaggagcaccgtccacccagagggccaggccgggaggctgaactggagaccagagacagacgcgagatggagagacccacggacagtcgccgacaccgggcagaggaagaaatacatacagaagcagagacaggctggcacaggagaggctctggggagaaatttcccaagagaggaagaggagctgggaggagaaacagacaggaaacctgggagcctcgcggggctgggctgggctgtcagagcctgcgcgatccgtcctcccttcccctcctatacggcttgggcgaccttgctcccgagggcgcatcccgcatctccctgactctgcccccaactctctgttgctcctctctatgcgttgtccctctgtctccttatttctccccgtaggcctcctctggttcgtcctgacccggataaggaggcctagcatgcgcgtgggggctggaggcctgggaaaggaaaggaaggtgtcagcaggaggtttcccttgtttccatgatctcctcccctcccacctctacaaagcagcatgagtttgggccactatggcaagaactagctagcagtcaggctgttgggtaatggaagagggcaggtgagagaggctgaagccaaaacagatgtggaaatcaagactaactgactcagagaaaggcacaaagagtagcaacgctaagacttgataaagtaacccacacagccttcctgccccacagacatacgtcccacctttcctcagaggaccgtgacatccctccaaacagcaaaactgccccttctccctccccacccttcataaagcccctgggaatgtcagtgaggaggaagaataaactactacagacaggattgcttggtaccttggtattgcctggtaggattcttctctatgtggggctgggacaaaagacattctcaaaattctccaggaaagtgggtggcctgggagacactggcattctcagatagttttatctgactgaacacttctacccacatcttggactctggactagaggaaaggagggggaaggggtttgccactttaggccagccttaactggactgtgatcagggaggggagtatcaacaactaggctaagccccacagcgagtacacaagagacctaaacatacacacacatgtgcacacgcacatacagagaaagagagagacagagagacagatttaaggccaggtgaaccagtaagatgaacagtaactcagtaaagtcagatctaaaaaaaatagaagaagataaacagggacaatatctacacagaattaacggccgagggatcttgggtccaaggcaattcaacaaactgtcagacagttggggttgttttaaaggctggaaagaaattttcagagaaagacacctcaaaatacagaggcactgagaggttaaaagaaatctcctcagctcctagcacagggtttaggtactcagatacatgcttatggaatagattagtgagtggggattaaggtgtaattcatttaaagttttaggacccagctcaaatctcagttcaatccagtaagtattaaacacttacttgagacacaatctactacacaatccactgtgggttgtggttccagactttaagaaaatgataatatatttgaattaaaataagatttgcacatactaaactattaaaaagtctaaactattaaaaagacagtactaaatattaaatatttaatagtactaaactattaaaaagacaacaccaagtctcaaaagaaaagctacattgaacataaatttccaaatgtgcaaagaagacaataaatattctccgaagactgcacagaaagatgctggatacattttatcatgaaggaca

SEQ ID NO: 1970 - DNA, 4001 bp, Homo sapiens
ggtatgcacactttgcaaagtgactctgtcattcctcccatgtagagatgaaatctatttctccatccctgaatgtgaactagtcttgtgacttgctttgagaaatatgtgatggaagtaatatatgtgatttccaaggcaaggctttagaaggcattgtagcttttgctcttttggagtgctgccctgagagtgccatgaaaagaagttggtctagccgactggaggatgagaggtcacacggaacagaaccaagtcctcgagctgacagcaccaactataaacagtggtaatcctggaacctttcggtttagctgacctactaggtcaacaaaaagcataaatgaggccaggggaaaaccaacataggtggagtagttctactccactgacccagaattatgagaaatcattgctgttttaagctactaggttttagggcggttacacagctatagacaactgacagtcaaagacagagggagatcaaaaaaagacaacctgaaatgttatctcgaatgacctaaagatgtgcaaaaacccttaaacagtagaaagtttagggagaggtgatccagtaattcctagcaccaaatgcctgaataacaagataattggaatgttaattacagaagttaagaatctaccttttggttaaagtagccaaagcaaacagccaggatgctttcaagctctttgagaaaggtaagtacaggtgttcatagaggactccggtgtagtcccttaacaccctcaaccttggataagtaaattaaaccaggtctccttattagagactacccgaagaattaagctaggataaaaaaacgtaaaagctttcagcactgtgcctaaaattttactattcacacagcagaacatggatatgagaagaaataagttaaaagtacacttttcccattcaaaggtcacccatctattctgccaatagagaaaaatgaaataaaaaacgctgccttaaagaagacaacgaacatcatttaaaaaactaacttcaaaaatgaattatactttggtatagataactccttttactccaacaacattgtttaaaagcacaaatcgcactcaagcgcagccagccgtatatgaatagcagaggagaacggaagttaagagactaacagaagtagtgaaaatgagagagcacgcgcgcgagagaggtaaacacaaactgttcgcctggaccaacgacttgaagacttgcctctaagagttggaagtctcgtcatgagtctcttgcatttctgtccatttaaaaacaacctccacttcttgccaagctttattattcccccctcccacctggtgtggtttacagattgtttttagcaagagccgtataagagaagctacgtacccaagacaatctgaaatcaagagaaaactgctgctagaaacccaaggcggggaaggagaaggatcaaccgagaaattaagccacgttgcattctggccgcagcagtcattaaggaagcgcagtcctccccacccttttcaaccaggaccgaatgttgcgtctttctcagctgcaatcactcctactctccctgtggcagctgcgaaggtgatctacactcaccgcttgaagcacagtcgccaacaacaaccgtagcccaaacgccggcaccagacacccactcggcccagccgccatcgctaccattttccgcaggtttctggctgcctagaaggacccctaagctaggggcgtccactccagagcctgatccaaaacagaacgctaacggccgttgcccttacatctctcatttggaagtgacaggtattaaataacggcatatgaaagcttaaaagtcatcaaatacaatcactgggtgctttcgattacccaaatcaggcacttgcctaaactccccacttctttacttctgcggtctcctttcttttattcacgacacttcgtcaagcagccaagaagccacgccttcgccagttttagccccgccttcttctccaagtttacccaattgaatgtcgtcttgattgagctctgtggcagaggaaaccaaccgtaaaccgaaccaagagcgaagcgcaggggctcttccgtccaataagcggacccgaacggggggaggggcggggcttctggttgccgagcagcgtacgcggatgcgtgcgcgtggtggcggagggggatgggcgggggcggggatgagggcggcgcagccgcagcgccggtggaggggcgcgcggccgcgagcaaaggagggagggaaggaaggaagagagggaggcgggcaagcaggcgggcgcgggggtcggggactgaggcagtagagggaggcgagagcccggcagccgcttcgcgctgtttgctgcgcgggcttttggagggggcggccgtttagtcggctgaggagaagcggacaccagcggcgttggtgatagcgcctgggggagggggactggagaggcgagaaggggggtcgctgcggtggttctctcgctgtcgctctctctttgcctcgctcccggctcggcgggctcctcccggcgtctctctcgcctccggggtcccgctccccgccccccgcggtatgtcttgatcccgagcagcgggtttcatggggctcctcaggattatgatgccgcccaagttgcagctgctggcggtggtggccttcgcggtggcgatgctcttcttggaaaaccagatccagaaactggaggagtcccgctcgaagctaggtgaggaactgaactgccccgggctgagtgctgtggaaggggccgaggaggcgctgccgccggagcaagtgggcgttcatctaacctggggtctggctcgggggctgaaagcggtttcaaagagaaccgggaacaaggggcagcgagagcacgagctccaagaatgggttgaattaagcttgagcggcgtgctgggctcgcgaggtcacggggcagaggttgcaaggttgggcttccctagccaaagggtagccccgaagtaggcattccgcggagagagagcgagagagaagaccgaactcagtggggagcgtgtgttgctggtctccggagacagaagcgcttagcatcgcgtgttctcttggaagtcgtacaggaagccctggcaatgtcagatgaggggtattctaatttgagctatgggcatctggatacgaattcttttgggggctcatgaagggataggtgcgcagaaatgggaggagatgctgggatgacggagagcaacatgtgaacactgtagcgagttgcactcttgtgctccgggcagcaaaggaccttgtaattgccagctgagggaggctggccgggtagtgcgggaacgcgagtgcaaagcttcatcggagtacggaaatgagggtccggagatttaaattcttctttagtggcgctaaactgatgaattggggcttgagaatagggatgcctatgtatgttgcttcacggcagtgttgatgtgaatttcgaagaggagggaacgctgaaggggaattatgtagtgaagtttgtgtttgttaaaggaaaagtaggattatgcggaaagctaaccatatggttaaataccttaaagggttaacaggtgctttaatggatgagggggtctaaagtacaaaaagttggtgtgaagttgtgaaagacaggccagaaaaaagcacagataataggtactttcggattaatagggcactttggcatttggaagagctcagcatggagagcgagagttaaaagaatgacagtgataaattttgatttaaaaatgtacatggcacttaaaaatcagctcaagaggatgtaatttgaatatggaaaagtaatgtgaagtgttttttgcatactctcacctcaaaatcattttaaataccttttgagaagccagcaaaaacaaaaacaaaaaaccctcagcagtgtaatttagactaagaaatagatgttactgtgagtggatgattaatttttaggaaaaatgtaccagaaaataattg

SEQ ID NO: 1971 - DNA, 4001 bp, Homo sapiens
ctctacaaaaatagaaaaatcagctgggcgtggtagcacatgcctgtggtcccacttactcaggaggctgaggcaggaggatcaattgagccagggaagttgaggctgcagtgagctgtgactgcaccactgcactccagtctgggtgacagaacaagaccctgtctcaaaaaaaaaaaaaaagttatagctgctgtctattggaaatctactgcatattcgtcactgtgcatttcttttctctactgaaacctgtgagctggtgcaggaccctgaagccagatggccccagttctagccctggctccgcacctttctagcttgggaaactggggagcctgcctgtgccttagtctctcagactattaaacatggggatcatgacagtgtccatctcccagggctactgtgaggtttaaagagagaacccacatgaaatacttaaatacctggcacggaggaggtggccaaggaatggtttttttgtttttttggttttgctttgtttgtttgttttgagacagggtctcactctgtcgcccaggctggagtgcagtggtgtgatgtcaactcactgcaacctctgcctcatggcctctagtgatcctcccacctcagcctcccaagtagctgggactacaggtgtgcaccaccacacccggctaatttttgtatttttgtagggatggggttttgccatgttgaccaggctggtcttgaactcctgggctcaagcgatccttccatctcccaaagtgttgggattacaggcgtgagctacctcgcagaccaaagaatgttagctggtattattgctcacaagtctgagaaaaacaggctcaggggttgctggagcagctcgcccaagccaccagctacaaagtgtcagagctgggaggagtccagggcctctgagatcccacgagcttccctccactccagacggccgctcctgctcagtgaagacaccgttggccaaggcgccctcctccccagccgccagtctctcctggtacctgttagcttctcagcaatgggtttgaactcctcagggctgatgtacatatccccgtcagtgtccaaggaggaaaagagaaaaaggccatctgtccccagggtcttcagcgccagttcctgcttgggaggagagactgggctgggcaccatttggcggcctggtctcctggtccccaacaggcagttgcttccgcatggagccccttctcccaccatcttcctgagctctcccagtgcctcccggtccatctgtgcaaatgttgcctctgaactgccccagagcctccagtccctcctggtccctgctcatccactgtctggtccgactgccccctcccagtttgtccccactccgccttccgcctggccctggctgcttggccctgttcctcctgcaccttctgtcctctcctgtgtcccctcctcactgtcccagggctccccagtaaccctttaagactctgcgggaaccagcttcactgtgtccaggtcacccctctggatagagacccctccagtctgtcccagccccacactggcctccgttcgccttccccccatcagcccggccccaggcaccccccacccgcctcccgtgtcccctccttcccgtgctccctcccgtccagtccccctccgccctccgcctcccccgactcgtccatgcccatgtcccccctgctgccgaggctgggtccttcagtccccgctcccgcgctcccgccccagccagctcgggcccggacctgccgcgcggccgcctgggcctcggcgtggcgggcgcagacccggacggcggcggcagcggcggcggccagcagggctccgagcagcgccagggaacgggcgcggcggcgcggtggcgcgggaggctgcgcggcggggccggggctgggcggcccgcgttggcccggccgggcccggcccatggctgcggctggcggcggctgccggcggcccgggaagcgaaagagcggggcggggccgggggcggggcggccggggcggggaggggcggggcggccgcaggggctgggcggggggtcgctggttcccggcttcgcagcccggccagagcccggggcggggtcagctacaccggaacgccaagaggggctgatcgcgtctatgcggtcgggtccgtagtcccggccaccccagcctccccaggccgcttcctgcctctccgcgccccttcccgtgcttccgttcccaaagctaagccaggcctctgcggcccacttgcctggcccagcccagagagcgattccagactggggactgggacaaagaaggggctggggagaagccacacaccctgtgctttcctggagaaggggcgtcgggggcctctgaggcctcgtgtcctcctctgctggcagccgggcacgaggccagagactgctgaggggcatccgtccatccttatcccaccagttttctaaaagttcctctgtcatctagagcaagacaaattaaaaagaaagcccagcccctgttcccctcatgtgcagttggggggccacctccgcagatgcatgggttatggggattggccttgttccaggcacagcaggtgcagctctgaacctgcacttccctgggcccaaatttcctcatctccaccaaggagttaaaagagccccccaacccccaccctccgggctctggtctggtgaggggaaggcgaggctccagcccctcagcagctggagctaccagaggccctggcttttctggagaacagcatgcggcatgcttggaggagggccttggaaataggggtgggtggtgttgaggacatattttcatgcctgtcaatccccaggaccttggttccttggggctctcttccattctttcaaagcccccagttaccatggggtggctctagatgtctctacctgcattttctcaggcgagggtggcagctgcagaagcctctagacaagaattctgagcccagaggtgagcagtgcctgcctttgcagagccccaccaacccccccagcgcaggggcacctgtcaggcctgagggatccaaaggatgctgagctctgcccatgtgctggacttcaggtggggtgatttacacattctctcactctgttctcaagccaccttgtgaggtagagactgcttccctggttttcaaatgaagaagcctgacctctggcacccaggtctatgggtccaaatctcctgccatcctgcctcccaggcttcccacgggatgacccggtcgactgagttgggggtggggtcctgcctccactgcccatcctgttcttctttggtggccagccatggcagcaccaggtgaggccttcccagagcccacacagggcgtggcacatcgtgggcactcctcagtgtctgtcagatgaatgactcccagggaccttccagagttgtgggcccacccaacccttgccctgtgctctggccccagtgtccttagagggacccactgagagcctgacatctggcgttggcttctgaaggcttccaactgtgccactttcaactcattattgctactgtttggggacaccctgtgtacgatacatgatactagaaaaccaaattctattctattggaagcaaaactagtagagcacaaagcaggttaggaggggaagattgatgagctaaggcttctggaaaataaacaaaggaagttttctttcccagataacttttatttattacacttgctttttcttaaagatacagataccccactggtctctgctgcccagtgctgaagaaatgggtttctggggcttgcgggacttgggggatgattctagaagctcgggaaggcgcacagtgggggtgggttaatgacaatcaggtcagatcagtgtgcctctgtgaaaaggatcaatcttgggcccagctctgggagatgtcagctctgggaggtgtcagctctgggactggcagtggagcagggctggtttcccactggagggcgccct

SEQ ID NO: 1972 - DNA, 4001 bp, Homo sapiens
acacattattcgtcagattcaactttttcgtgtactttcttaagcttaagcatagtttaaataattacacaagtcagcgttacttaacacacgaattaaatgatttatttaattgtgctagattgccataaagcttaactggctgaagagatacttggcctaagtgatatacatgctttctaatactccaactgtatttttcctcaacctataattttaccacaagaattaattattttcttttattcaccacctaggaccgaggttcttcattccgagcctcacaaaagtcctcaaaaaaaaaaaaaaaaaccctcctaaaacaaatcctaccacgagaaaattgttttgatttttaaaattagttcactgttacagaattcaactaaagctaaagagaaacaactcctttcagagaagcacgtggcaggaaggggtaatttcaactttcaacatataaatgcagctttaaagattcagaccttaggtccaacacctgcttgctattgatcatgcacgttcttatctccaaactgcttgctcttttttttcatccgcaacaaactggtaaagcgaatgcaaaaatcaagacaatcctgtgaaactcacagtgccctagaaacaactattaaccgccagtgaaactctgaccatgcttcacgcacatgtggtggaaaaaaaaaactgcgaactctaaagagctctgctgcgactaacgctgtgacagcctctgcactcacttcacccacgaggcccagaccccaccacgtgaaagattcagtttggggagtcgagagagaggatcgtgactcgaggacgttcctcgggatgtcctgcaatcaccagtcttcattcataattcccgctcctggttaatcgagtgtggccaaactcctccatttcccaacggctcaactcaccccagcaagttatgagaaagtcctaacagttgagaggtggaagagaaacaaataaaggacatgcggcaccccaacctgcagcttactccacacgtctgatggcctggaacgaccccctgcttttcagcggggatactccgcgccgtcgtgggacaagacggcaggacaggagcctgaaacaacagcacctcaaaggagcagctctgcgcagtaagcagcgatggacccccaagctcctccgtaactacggaaagcttcggtgaggggccggcttccccgcacctcagtccatgcgctcacccgccaaggaatccggcgggaaggcaacagcctcccaggacctcgagcgcgctcgaggagcagctcatctccgaccacgctcctctgctcacaacctgaggcgggaaggggatggctccgagaacctcgccggcggtggcttgaacttggggctaccacgctcctggcaccttcgcaggaccggacttttgtcgcgtgaagaaacgtgaggatataggcggcaaagtctcccgcggaccctcggagctccagaaacaagtggcagccggcagccccctcgctccttccctccatcccagtctcccccacattctgcccctgctttaccttctttcttaagcgccacgggcggctgcgtctcctctttcttgtcaaccacgccaacgctggggggcagcgggttcttgcggtctttctgggactccttgcgcagctgtttgcctgccgcgttggagttggtctgggccgcggcctgagctgcgctcttggccccagggcccccaacgccgcccccgccggcttcttttttcttgttctctgctgccttcagcacctcgaaggggtccgattcgtcgtcaaataactggtcgaatcggttggtgaccacgcagccgaagccttcctgtaagtgcccaggcatgatggtggctcggcggcgcgttcctccacggattgcagcgggccgcgccgagccaagagcgcctgcttcagctcttcccacaagatggccgggccgagagaggggggccgtcttctcttccggcgccaggcacacatccgggagcggcctgcgccgcaaggcactgtggggtatgtaggccagagtcatttctcctgaggcgactctccgcgtcgggactacaattcccaggacgcaccgcgcgacaactcttcgcgcgcgcctgagaggcgagaccccatgaggggagtgaagcgtgcgggctgaaggaagggaagcgtggtggtgggcggagtcctgccacctgctctggccacccttaaactctctaggtcttcagctaccttgaaaccaaaaaaccgtgacggcgtaactgactcgcgaaagtgctctttggtttcactcacgccccctcgggctcagggctaactttccccaccgctccaggggggtcaaggtgactcccagaccttacatctgagacgcacaaacttccgggggagggggtgttgctgaggcgccgcgccggccgcgggtaggctggaccctgcctgtgccaagtccgagctgctcagttgctggagtggccctccgtcagcctccacggtgaatcgaggctcttctgtctaatgtgagggggaatacgtttcctctcgcggggacatgaactagggtagcagaactaaccaaaaagacaagtgaaactatcacatgggagcgtggcgcgtctttcccgggcttctcaccgtgtggcggcgggtgtcgtaggagtggttaactcctgacggtgcagcgctagacgcggggcaagcctccaggaagcactgtttatagaaaccctgttacaattattccaattaatcgtccgttcgtgtccggcaagtcagggcttaggtggctgtgttgttagtcacatgcgctcaatacatatcatttgagaacatttcgagtgcatgtgtgctaggagttgcggtgaggggagggaaatattgaagtcaacacttaataatgacaaagcattgatactagttgagaatattaaaattcattaaaagaatacaatttgaatgcgtatttaagcacatttggtagcaccgggtttaagtatatcataatttttaagtccttttccattaacacaaagtagcaaatgcatcgcttatttggtaggagctatgaataaccttgaactcaacattttgttaggcaaatagtttgcctcttttcacaaatgttgaaaccacttcagagatgaaatgatttaccaaattcacacctctgtaagtgctagtgacaggcattagcccagtattctatctccactaggagactggacatcagctctttaattcagactgccctgatagaaagcagtccaatttttaaatttccgatataatttaaacattgttgcgtgtcaggatatgtaacatggcggaatgtaatcatcaatttccgagcagattttaaatcaattccttagcagggaaaatagaagacacgagtcatattacatacatggggcagcaagcctcctggttttcttgtttctcaatcctcccctattcctcacttatttccctgctgcctcagtcctgcaccctgcccacaacgcccaacctcaaacacaccccctatctcatccccccttccacaggctctggttctgtggcacctaccaagacaaggagcttttgaccatactcttcccacctttttgaaatagctcaagtgcaatgtagaagatctccacattttgacagattttctctcttcacgggctgttgcgtctctgagactgcctgcatctttgagacatctgtgaaagctcctcttcttaactctttctggccacggccacagtaacaatattcatactaaaacgtgatgttttagtgtgtgcttggtgcactttacatacgtgatctcctttaaaccttacatcaactctataagaaagttattactccatacctcccccccgcaaaaaaaaagttattgctcctgttttaagattaggaaaatgaaaacaaagagcttaagtaagttaactactcctgccacaatctggggggtggggcaggcctgttgttattcatttt

SEQ ID NO: 1973 - DNA, 4001 bp, Homo sapiens
atcttctccgggcgggtggcagtcttctcatctgtaaacagatggtttgagcagtcctatctgctctcagcattgtagaatgctgtaactcagagaccagcacttggctttgcattgtctccaaatggaattctccacccacctttccttgatgttagcaataattcccacaaggagcactcacgatatgccaggaactgtgcctcatctcccaacagcattgtgagaaaggccctgttactgtcaactgccagatggggtgaccaaggcacacagggctggcaggctgcccctcaacatctccacccccaggccagcccagcagggcctgtgcctcaccaggtgcaaccgatggaaatcaggtccactgtggaagctctgcctccctcaccaggaagcaaacccttgttggcagagacctggcccaaaccttgaattctttgggctgggagggatttcaggcaccagcttgattcctcctcctgcacacgcacatgcacacgcacacacacacacgaaaaatggaggcctaatgaggcgagaggctctcttgcctctctgtgctgtctatgctgatctcattctcagaaaaaggctgtaaagtaaatctctagaccctcagctctcccctacaccccctcctctctctctctctctctctcacacacacacacacacacacacacacacacacaacccgtcagggacaaaggaaagcgagtcccgagattcagcagccgctgcagccccttctccctctcagggcctctttgtgtggggccagagggggagggggctgcctgaatgaacctcagatttaatgaggggaagaggaaaggagaggggggctggggaaagggaagggagaacgggcctcccagccggggtcttgctggagcccctcccctctgcggctgcagctacagaacagaggttggcctccccacaggtcccgaacccgcgaccgggcactccccgcgcacacccgaacctccctcgattcctgctctcccaacccagagttccgcccggtggtccgtgacgacccgcacccgcctcactcgagggcagctaagaaagtccggggctccctccgctcccatcccagtctccgcgctggggcccagatgatccggggcgagctggggaagtgcctgagaggcagcgcgagccagactgaggacggtaaagggaccgcagagagactgagggacggacgggcggacgggcagacggacagaagacagcagacggacaaagacagtcggacgaacgacggacacagacaggaaccagacaaatacgaacggacaggcggagcccgagcgacaggaacaggcggactggcaggcggccagaggggtagggcagggcactcgccaggagggacggggcccgggcgacctacacagagaaccagggcgtccgggacggggacagaggccaccccgaggaccgccccaagtggggcgacgagggcccacagagctgccccgaccccgggctccaggcttagtctctccaggtcccaggagggcgcccgccgagggcactcccctcctgcccgcggaaacccgagccgggaccgcagctgcccggcgcctgccggccaggactgagcagggggacgggggcagcgggatccgggtgccgagtgaaggtccaggagggcgagcaggcggggcaccggcccagaaagacaagtttgcaggaaggaaaaagaagaaactactcggagcagaacagaagaaagtgagggcccgcagcaggaacgggcggcgcgcgcgggcgggcgccggggtcgggactcacgcagctgagcagggagcaggctcccaggcaggcccccatggcggcggctcccggcttcgggcgcccggcgccgggcgcggggcgcggacctcgggatccgggtgccgggcctggcccctccccggccccggccccgccccggccccgccccacctaccgaagccgctcgacgctttccggcggcgctcggggcctccccagactcacctggggcaggtgcgccaggagggaccctagggaaggggccggtcggggattcccgcggccacgcgagcggcgcaacctgacccaatcgtggcccgggctcgcatcctgctccaaagtgagcgttcggaaatcgacctcggtttgagcccgtgtgaccccaggacactgtcacccttgggaacagaagccaagaggtggtcaccgctgactcctcagtgcttggcgcagggcctctgctcaatacgtagatgctgaggttgaatgctgaatgactggataaagaaacttcggcaagtcactgcacctctatgagcctcagtttcccggtctgtaaagtgaggatacatacctcacagggtggttacaacacatggtaggtgcttgacaaatgtaagcccccatcgtcactgttttcttcttcctttttaagagacagggtcttgctctgtcacccaggctggagtgcagtggtgcaaacatagctcactgcagcctcgacctcctgggctcaagtgatcctcctgcttcaggctcctgagtagctgggactacaggtgcatgccaccatgcccacctactgcttcttctaagaccccagcctctcactctaaacccatcctcccttctctccatctgttcttcaaactccactgactcccaacagcctgctgggagctacacactccctacagccacccctgcttggtggcttatcactccctagggatgcccaaactggtccctagctaaggaggtcagaaggtggggaggggcggccacattcctgacagatggctttccaggggtaggtgtgagagacccagaagtagggctctgtaattagtctcccttcacccttagccctgtcctcagccacctctggacaagataatgttagggaaagaagtctctgtgcctcgaagctggccccagggccaaagagctggttgactgcatccttggctgattcactgggcgccaggcttagccattaattgcaccaggactgttccacaaacacaccctatacttttcctcctccgcacttttgcccacacaatgccctcctctttttttttttttttttttttttttttgagacagggtctcactctgtcacccaggctggaacacagtggcccaatcatggctcactgcagcttcaacctcctggacccaagtgatcctcccacctcagcctcccaagtagctgtgaccaccagtgtgtactaccacacccagctaattttttaaaaattttgtgtagagatgaggtctccttatgttgtccaggctagtctcgaactcctgggcttaagcaatcctcctgccttggcctcccaaagtgctggtattacagatgtgaggcactgcacctggcagatgccctcctcttaaaggtccttctccttatccctctttctcccctttgaagcttgctcacatgccatacctctcagtgaagagagccaccaccctcacccccaacccactacctggttccattaggaatgaacatcctcctgattcccccaagcctccaaacaatatgggcctcccttatggcctcacaaacaacccgagcacatgcccaactttcccccgtggtaccatttgagccccacaacagccctgagaagtcgattaattccccacccactcgtttacagatgaggaaaccgagaaacaaagaagtagtgacacgcgaaatgtaaatcaagcgtcgaataaacgttgactgtgatcactgtggttgttgttactattgctgaaggccacacagctcagaagaaacagagctgaaaggcaacctggcctggctttcaccctgatgtcctactgcttcccttgaaaaagtagaggtgacaatatctagtcttcctatttttctgtccagcaatatttcagtccttccctaacccgaggcctttaggggactgtgagccacccaagaacggtctgctctctggccaccccctctc

SEQ ID NO: 1974 - DNA, 4001 bp, Homo sapiens
ccaagcctccaaacaatatgggcctcccttatggcctcacaaacaacccgagcacatgcccaactttcccccgtggtaccatttgagccccacaacagccctgagaagtcgattaattccccacccactcgtttacagatgaggaaaccgagaaacaaagaagtagtgacacgcgaaatgtaaatcaagcgtcgaataaacgttgactgtgatcactgtggttgttgttactattgctgaaggccacacagctcagaagaaacagagctgaaaggcaacctggcctggctttcaccctgatgtcctactgcttcccttgaaaaagtagaggtgacaatatctagtcttcctatttttctgtccagcaatatttcagtccttccctaacccgaggcctttaggggactgtgagccacccaagaacggtctgctctctggccaccccctctcctacccagagcacagtacagggcctggcacacagtcaagcagtgaatgcttactggatgaatgtctgaccttttaccataagtccactttcctccttcttctgtgactgacagtctgatccaaaaacataccctacacagtcatcttctgcacggaaatcctttagactgaaatgccaccaagcagtctcaagtgagccctcctcacatgctcccgtcccagggtcagctcccttggacacttctgctctaagagctgaatttttcacccccaacccctccctatccatgacctagaacagtagaaagcacccaagaccaagaggatcaacccctgggattcttgttctgccacagatgaccatgccccatgccatccttggggggccacttcaccccacaaggggtgtccgtccatccccttcccggaaataggtagggttattctgtttaacctcacagagcatgtgtgagcatctgcaaagacactctcagaaataagcagttatctgcaaggaacgagggattaagatgactgtatgtgtaaagggatagccactctgacttcaggctaaaattttccagagcaaggtaatatgctgccactgtcctggcctcctgcctgcccaagaccaaggccggctgggctctcacacgcccagcatggaaggcataactcactgtgtggctgggtccgggtgactcctcctctctcagcctcatgcttctcatctgtaaaataaagataagtttttttaccccagctatctgaggggactactgaggagatgaagtgaggacatggataaagagcttcatttcttggtgtcctggccagcccatcagcctttactcccagatttgaacctcctgcatggggccagagtagctctgtctcttgcacccccaaaagcacagtcacagtcagcagctatgtgatactggcaagtcacccaaccactctgagcctcactggagggttggaattcaggattcagcttctccacccaatgctatgtaaaccatgtcccttgaaataaacatgtaggggtcatttggtccattgccctgtgcccatcacccagcccagacagatgctcaactccagttcccaaaggaagcagactctgacttcttggaccacccaccccaaggttctctaatctgatctcactgggcctgagttttcaaatctgcaacataggaacgaactcctgcccccgcctcagtgcccccaatccattctctccccatcccctcttaccatcctcccgtccatgaggactcagatgtgtgccggctttgagccctcctatcccttgggcttcgctgtctgtactggcctctatttcctgcttctgacccatttacagagcagggccatcccttatgaatatgcatataagataatgagagcttgggattgggggagcatctggggagaggtattcacatacgcaccatccactctgctctccccataaacaccccccaaccaaggctgtccttcctcacaaagcgtgcatgggatttcagagcaaaggctaaagtaacaataatcatattcatagcaagcatttttaagagcttacaacatgccaggcactctgctgagattatctcctttaagatgaatttaaggtaggaactattgcccccatttagcaaataaggaaattgatgctccaagaagttaggtaacttgtacataaatcatacggggaacatgcacagtgatcatgtgcagagccagggtggaacccaggttttctcaggagaatgcaattccaaagctggtgctctaaacccctgcgcccagatgttcagggccaagccaggagccctgagcagtcatggggccacatctggatctcacatgtcagcagatgagcccacagtggtattaggtgattttgtgaaaggacccaggtcctggaagggactctatctggaaagtatggagacaggcagacacgatgcgtgttcatatgtgtgcaggcacacagtgatgcaagcttgagcatgcacacacacacagggtgttctgtgtgcatggacgtaactgtgtggggtggaggtacccctgtggctgcccagtgtatgtgcctctgtgctgctctggtgacttttttccaatcaacacttagccacagggggccaggagctgggaatgcagtgtggatagggcagacacagtcccagcctgcatggagtggatggtctgtgggatttgcttcccataacagtaacactctggaaggaatccgtttcctttgtaggaagtgactaggggttgagagagaagatgggtaagagtggaaaaggtaggacatctgaggtaggtagctcaagggagcctctggcacttgccagaaatgtatggaggagacagccaggacctggcaccggctccacgacagtcacaggtctgaggattcccaaaggtctccagatgctttccttacagatgtccagggtcttctgtgagtgtatatgtgggcagtttgtgtgtgttggggaggggggggtgtttaggtatatgtgcacagatgagcgtgtgtggttatgtgaatatgtgcatggaatgtgcatgtataaatgtggggacatgggtaagtcatatatggtgtgtacgcaggtggggtttacatgtagaggtgggggtatgcttgtgtgtgtggcagggcctgttactgcaaaggagagaagagagtgccatttggcccaggcctcacattcagaagtctcaaaaatgcatccaaaaatgagatggaatgaagggagggagggagggatggatggctaggtagatggataggcagagggctgtctgtgcagagagatggacagagggttggacagaggaatggatatgtgataaagcagatactgcaaaatgttcattgtagtccccaggtgctgagtatgtgggtgctcactgtaccattctttcaacccttctggatgcttgatacttttcataatacaacgagtacacaaagtgggctggatgtctagccccagagaattatggatgagatgggaagaacagaatgctcttcatgccatttgaaacttacatcccatcactggaccacacagcaatgtgaaatcacattttttataattcttgtgacgatcttgtgagtctctcagttgcactgcattggatgtgtgtgggtgcatgtgtgtgttaaaaaacattaatttgttaaataaaaacataccacagttgtgaacatcctatttaggactttcttcatttttaaattagcaggagccttaaaagacagaagtggtctggctcagccgggcgcggtggctcgcgcctgtaatcccaacactttgggaggccaaggcgggcggatcacctgaggtcgggagtttgagaccagcctgaccaacatggagaaaccccacctctactaaaaaatacaaaattagccgggtatggtggcgcatgcctgtaatcccagctacttgggaggccgaggcaggagaatcgcttgaacccgggaggtggaggttgcagtgagctgagatcagaccatt

SEQ ID NO: 1975 - DNA, 4001 bp, Homo sapiens
ctggccccagggccaaagagctggttgactgcatccttggctgattcactgggcgccaggcttagccattaattgcaccaggactgttccacaaacacaccctatacttttcctcctccgcacttttgcccacacaatgccctcctctttttttttttttttttttttttttttgagacagggtctcactctgtcacccaggctggaacacagtggcccaatcatggctcactgcagcttcaacctcctggacccaagtgatcctcccacctcagcctcccaagtagctgtgaccaccagtgtgtactaccacacccagctaattttttaaaaattttgtgtagagatgaggtctccttatgttgtccaggctagtctcgaactcctgggcttaagcaatcctcctgccttggcctcccaaagtgctggtattacagatgtgaggcactgcacctggcagatgccctcctcttaaaggtccttctccttatccctctttctcccctttgaagcttgctcacatgccatacctctcagtgaagagagccaccaccctcacccccaacccactacctggttccattaggaatgaacatcctcctgattcccccaagcctccaaacaatatgggcctcccttatggcctcacaaacaacccgagcacatgcccaactttcccccgtggtaccatttgagccccacaacagccctgagaagtcgattaattccccacccactcgtttacagatgaggaaaccgagaaacaaagaagtagtgacacgcgaaatgtaaatcaagcgtcgaataaacgttgactgtgatcactgtggttgttgttactattgctgaaggccacacagctcagaagaaacagagctgaaaggcaacctggcctggctttcaccctgatgtcctactgcttcccttgaaaaagtagaggtgacaatatctagtcttcctatttttctgtccagcaatatttcagtccttccctaacccgaggcctttaggggactgtgagccacccaagaacggtctgctctctggccaccccctctcctacccagagcacagtacagggcctggcacacagtcaagcagtgaatgcttactggatgaatgtctgaccttttaccataagtccactttcctccttcttctgtgactgacagtctgatccaaaaacataccctacacagtcatcttctgcacggaaatcctttagactgaaatgccaccaagcagtctcaagtgagccctcctcacatgctcccgtcccagggtcagctcccttggacacttctgctctaagagctgaatttttcacccccaacccctccctatccatgacctagaacagtagaaagcacccaagaccaagaggatcaacccctgggattcttgttctgccacagatgaccatgccccatgccatccttggggggccacttcaccccacaaggggtgtccgtccatccccttcccggaaataggtagggttattctgtttaacctcacagagcatgtgtgagcatctgcaaagacactctcagaaataagcagttatctgcaaggaacgagggattaagatgactgtatgtgtaaagggatagccactctgacttcaggctaaaattttccagagcaaggtaatatgctgccactgtcctggcctcctgcctgcccaagaccaaggccggctgggctctcacacgcccagcatggaaggcataactcactgtgtggctgggtccgggtgactcctcctctctcagcctcatgcttctcatctgtaaaataaagataagtttttttaccccagctatctgaggggactactgaggagatgaagtgaggacatggataaagagcttcatttcttggtgtcctggccagcccatcagcctttactcccagatttgaacctcctgcatggggccagagtagctctgtctcttgcacccccaaaagcacagtcacagtcagcagctatgtgatactggcaagtcacccaaccactctgagcctcactggagggttggaattcaggattcagcttctccacccaatgctatgtaaaccatgtcccttgaaataaacatgtaggggtcatttggtccattgccctgtgcccatcacccagcccagacagatgctcaactccagttcccaaaggaagcagactctgacttcttggaccacccaccccaaggttctctaatctgatctcactgggcctgagttttcaaatctgcaacataggaacgaactcctgcccccgcctcagtgcccccaatccattctctccccatcccctcttaccatcctcccgtccatgaggactcagatgtgtgccggctttgagccctcctatcccttgggcttcgctgtctgtactggcctctatttcctgcttctgacccatttacagagcagggccatcccttatgaatatgcatataagataatgagagcttgggattgggggagcatctggggagaggtattcacatacgcaccatccactctgctctccccataaacaccccccaaccaaggctgtccttcctcacaaagcgtgcatgggatttcagagcaaaggctaaagtaacaataatcatattcatagcaagcatttttaagagcttacaacatgccaggcactctgctgagattatctcctttaagatgaatttaaggtaggaactattgcccccatttagcaaataaggaaattgatgctccaagaagttaggtaacttgtacataaatcatacggggaacatgcacagtgatcatgtgcagagccagggtggaacccaggttttctcaggagaatgcaattccaaagctggtgctctaaacccctgcgcccagatgttcagggccaagccaggagccctgagcagtcatggggccacatctggatctcacatgtcagcagatgagcccacagtggtattaggtgattttgtgaaaggacccaggtcctggaagggactctatctggaaagtatggagacaggcagacacgatgcgtgttcatatgtgtgcaggcacacagtgatgcaagcttgagcatgcacacacacacagggtgttctgtgtgcatggacgtaactgtgtggggtggaggtacccctgtggctgcccagtgtatgtgcctctgtgctgctctggtgacttttttccaatcaacacttagccacagggggccaggagctgggaatgcagtgtggatagggcagacacagtcccagcctgcatggagtggatggtctgtgggatttgcttcccataacagtaacactctggaaggaatccgtttcctttgtaggaagtgactaggggttgagagagaagatgggtaagagtggaaaaggtaggacatctgaggtaggtagctcaagggagcctctggcacttgccagaaatgtatggaggagacagccaggacctggcaccggctccacgacagtcacaggtctgaggattcccaaaggtctccagatgctttccttacagatgtccagggtcttctgtgagtgtatatgtgggcagtttgtgtgtgttggggaggggggggtgtttaggtatatgtgcacagatgagcgtgtgtggttatgtgaatatgtgcatggaatgtgcatgtataaatgtggggacatgggtaagtcatatatggtgtgtacgcaggtggggtttacatgtagaggtgggggtatgcttgtgtgtgtggcagggcctgttactgcaaaggagagaagagagtgccatttggcccaggcctcacattcagaagtctcaaaaatgcatccaaaaatgagatggaatgaagggagggagggagggatggatggctaggtagatggataggcagagggctgtctgtgcagagagatggacagagggttggacagaggaatggatatgtgataaagcagatactgcaaaatgttcattgtagtccccaggtgctgagtatgtgggtgctcactgta

SEQ ID NO: 1976 - DNA, 4001 bp, Homo sapiens
gacccatgcatgcaaaaaaatccctcctgaagttgcccagaaaccccacatagaacttcactcctgtgcagcaactcttcactgcaacaggatggtactggtgtccagtagtgcccaactacaccacttaatgttgtgtggctgtggagaagtcaccttcactctctgagccagtttcctcatctgtgaaatgggaacaatattaactgccccagtggggtctttgtgaggattaaatggaaggagatatatatatacacacacatacacatactgctcactactgtatggggcctaggccactcctggacagctccacgctgcgagtgttgggatagttatctgtaaaatgggctaacgatgtcatagggtagaggaggtggggagagccaatgagatggcatggtgaggggctcggaacagtacctggctcagtaaatgtcagaggccagaacctcagtaaatgtcggaggccagaaccccaaggggatggcactgaagggagggccgggtcccttgctgatattactcactaagttatctcccaattcttccctggaccagccctgtgcctcaggcagccaggatgtggggaagggagggaaggtgtgggcagaagcctggaccaggaatcagatgttgatcctaactatgcagttcttcatcctttccctgtgcaaccttaggaaagtcagctatcttctccgggcgggtggcagtcttctcatctgtaaacagatggtttgagcagtcctatctgctctcagcattgtagaatgctgtaactcagagaccagcacttggctttgcattgtctccaaatggaattctccacccacctttccttgatgttagcaataattcccacaaggagcactcacgatatgccaggaactgtgcctcatctcccaacagcattgtgagaaaggccctgttactgtcaactgccagatggggtgaccaaggcacacagggctggcaggctgcccctcaacatctccacccccaggccagcccagcagggcctgtgcctcaccaggtgcaaccgatggaaatcaggtccactgtggaagctctgcctccctcaccaggaagcaaacccttgttggcagagacctggcccaaaccttgaattctttgggctgggagggatttcaggcaccagcttgattcctcctcctgcacacgcacatgcacacgcacacacacacacgaaaaatggaggcctaatgaggcgagaggctctcttgcctctctgtgctgtctatgctgatctcattctcagaaaaaggctgtaaagtaaatctctagaccctcagctctcccctacaccccctcctctctctctctctctctctcacacacacacacacacacacacacacacacacaacccgtcagggacaaaggaaagcgagtcccgagattcagcagccgctgcagccccttctccctctcagggcctctttgtgtggggccagagggggagggggctgcctgaatgaacctcagatttaatgaggggaagaggaaaggagaggggggctggggaaagggaagggagaacgggcctcccagccggggtcttgctggagcccctcccctctgcggctgcagctacagaacagaggttggcctccccacaggtcccgaacccgcgaccgggcactccccgcgcacacccgaacctccctcgattcctgctctcccaacccagagttccgcccggtggtccgtgacgacccgcacccgcctcactcgagggcagctaagaaagtccggggctccctccgctcccatcccagtctccgcgctggggcccagatgatccggggcgagctggggaagtgcctgagaggcagcgcgagccagactgaggacggtaaagggaccgcagagagactgagggacggacgggcggacgggcagacggacagaagacagcagacggacaaagacagtcggacgaacgacggacacagacaggaaccagacaaatacgaacggacaggcggagcccgagcgacaggaacaggcggactggcaggcggccagaggggtagggcagggcactcgccaggagggacggggcccgggcgacctacacagagaaccagggcgtccgggacggggacagaggccaccccgaggaccgccccaagtggggcgacgagggcccacagagctgccccgaccccgggctccaggcttagtctctccaggtcccaggagggcgcccgccgagggcactcccctcctgcccgcggaaacccgagccgggaccgcagctgcccggcgcctgccggccaggactgagcagggggacgggggcagcgggatccgggtgccgagtgaaggtccaggagggcgagcaggcggggcaccggcccagaaagacaagtttgcaggaaggaaaaagaagaaactactcggagcagaacagaagaaagtgagggcccgcagcaggaacgggcggcgcgcgcgggcgggcgccggggtcgggactcacgcagctgagcagggagcaggctcccaggcaggcccccatggcggcggctcccggcttcgggcgcccggcgccgggcgcggggcgcggacctcgggatccgggtgccgggcctggcccctccccggccccggccccgccccggccccgccccacctaccgaagccgctcgacgctttccggcggcgctcggggcctccccagactcacctggggcaggtgcgccaggagggaccctagggaaggggccggtcggggattcccgcggccacgcgagcggcgcaacctgacccaatcgtggcccgggctcgcatcctgctccaaagtgagcgttcggaaatcgacctcggtttgagcccgtgtgaccccaggacactgtcacccttgggaacagaagccaagaggtggtcaccgctgactcctcagtgcttggcgcagggcctctgctcaatacgtagatgctgaggttgaatgctgaatgactggataaagaaacttcggcaagtcactgcacctctatgagcctcagtttcccggtctgtaaagtgaggatacatacctcacagggtggttacaacacatggtaggtgcttgacaaatgtaagcccccatcgtcactgttttcttcttcctttttaagagacagggtcttgctctgtcacccaggctggagtgcagtggtgcaaacatagctcactgcagcctcgacctcctgggctcaagtgatcctcctgcttcaggctcctgagtagctgggactacaggtgcatgccaccatgcccacctactgcttcttctaagaccccagcctctcactctaaacccatcctcccttctctccatctgttcttcaaactccactgactcccaacagcctgctgggagctacacactccctacagccacccctgcttggtggcttatcactccctagggatgcccaaactggtccctagctaaggaggtcagaaggtggggaggggcggccacattcctgacagatggctttccaggggtaggtgtgagagacccagaagtagggctctgtaattagtctcccttcacccttagccctgtcctcagccacctctggacaagataatgttagggaaagaagtctctgtgcctcgaagctggccccagggccaaagagctggttgactgcatccttggctgattcactgggcgccaggcttagccattaattgcaccaggactgttccacaaacacaccctatacttttcctcctccgcacttttgcccacacaatgccctcctctttttttttttttttttttttttttttgagacagggtctcactctgtcacccaggctggaacacagtggcccaatcatggctcactgcagcttcaacctcctggacccaagtgatcctcccacctcagcctcccaagtagctgtgaccaccagtgtgtactaccacacccagctaattttttaaaaattttgtgtagagatgaggtctccttatg

SEQ ID NO: 1977 - DNA, 4001 bp, Homo sapiens
gcaaaggcaatatctggccgggtgcggtggctcacgcctgtaatcccagcactttgggaggctgaggcatgcagatcacttgaggttgggtgttcgagatcagcctggacaacatggtgaaaccctgtctctactaaaaatacaaaaattagctgggtgtggtggcgcacacctgtagtcccaagctactagggaggctgaggcagaagaatcacttgaacccaggaggcgaaggttgcagtgagctgagattgtgccactgcactccaacctgggtgacaaagtgagactgtgtctcaaaacagcaacaacaaacaaacaaacaaacaaaaacaatggcaatatctgtgtgctgaagattcctacatctctagctccagccctaacccttccactgagctccagactgactatttgctggacagttccaccaggaactcctacaagttcttcagggaaacaggaccaaactgaactggtaattaattctcccccacaggcctgctcctgtgagtgggctcagtgaatcccgtacagaaacctgagaatcaccctggattcctccctctctcctcctcatttagtcaaaccccagagtcaatcagttcaccccagagtcaatcagttctgtttttttactctttcaccagttattgccactgctttagttcaggctctcatccctttttattgcctggaatttttaatagtcgccaacatggattcaatgaaggtaaatgaagctaatttcacattttaaaaaaatgaggtagttgggacactcgatgaagcaaatcaagagataaagtctcttgtaatattttttgtagataagacagggtggggcaggggctgcctccagctggtttatggttcctgcgtgtacacaagggggtctgtgtgtgggtactggatcttcccatcttctcctgggagagaaagacaggcacccagtgcagattcacggacgtggtccgttgggcaagcctggggctggctggaagctggggcagctgagggggacttgccttcttgcgtggtctgagtccagttctgcagccctttcaagaacagaggtgcaaagccggagagaagcagcggcaccaagggagatgtggaaggcaggctgaagaagcagagagagagaggagaggaccctgccattcatcttcccatctccactgccttcggttgcccactctgtccttcaactacatttggaaatgcaatttgaggctgagaggaccctgggagggctatgaagcacaaattaaaaccaagacagttgtgccaccaccccgtttctagcctcctgtgacaactcagatgaagaagggagtgtgtgtggcattgagggagggacaactctcattgtgagaaaaggaagcagttttggccctttagtcaaaggtcactgggatttgggtgggggtggagtggggtggatctgagtggaagaaagagcaaaaagggagtgaggaggtcctcatgggtagcatttgctctcttcccggatggatggcaggccctggggattccccttggagcgtcccctggatcccgtgagtgctgacttcctgcacagcatctttacaccagggatgacatcccccttgtttcttaggctagggacccaaggggtagcttaggaaaggccttaccccaagaggtggggtgggagggagagcacttgaaatgacgtcttccaaacaggtctttgactgtaactaccagggagagggcctggtcttctcaaaggtgttggaggtcattcctgtgagtcctttggaggtcacaaaacccagtaggggcaggcaaggggaaagctcacccctcttacctttttccagaggttacagttcctatcacattggaatacatggccgctaatcttccacagggctgggcaagtggagatagtgtgatctgaggcaatccgcctgaaaactggttctttcctctaaatctcgcagaggttccagaggacagggtggggcagagagctggtcaggagggggaactgaggtcaaaggctgatgaccagttcccagggttaagcaaagtgtagagcccagtgttgtttaattagtagagaagttttaaagttcaatcaggcccagggaaagcctgagccacctctcttgcccacactccctcactcttctcctcagctttatagaaaaggaaaaggagagtatgttcataccctcaaacttggttaggaaactaaccaaggaaacaaacttggttcatacccaccctctctcatagttttctttatggagagagggagagagagagagaaatatctaattagagaaggcaaagagggacaagctgctaccttcaggcatctgagtgccaaggtgtccctggcacagacaaggaaaacacaatggttacacctgtggcccacagagagacccattccccagcagccctgaagtggtgggacagggagagaagagcagggcctcggggtgcatgccaagcgcgtttctaaggggtgtgagcagctgggaaatacttagcaaaactctactgggggatcaggagacagaatgcggggcaggtgaaaaacccacgtacaactgctgaaataaaaacaaactaaattatatttatgtgtatcgttatttttattagttattggggagattgggtaaattcaaactagtggagataaagggcaggtttgtttacatttccctcttctgaaatagccaaaagcaccatcacaaggactgcagccaccaagttcacagggcgcatgtgcctcctgctgtgtgatcaaggactccttgtagttgttgttgcagtcataggcattttcgagagctcttcgttcatgagagaggacatctctcctgaactgaagctgtgtctaagttcttggctgattcagaccctggatcctttgaagccctccatgtgcagtgtgaacagtagccgagaactgtcccaaagggccccagaatgcccagaggctcatctgtcaccctagattaaagactattgaaaagtctcctgttcaaccacttgagttcaacaaatacacgagtgctgcttgtgccagcagacactgttcttggggctgggattccattcgggggagacatacagcaatcacataaagaatcagtattttaggccaagcgtggtggctcacacctgtaatcccagcactttggtaggctgaggcaggtggatcacctgaggtcaggagttcgagaccggcctagccaacctggtgaaaccccatctctactaaaaatacaaaaaatagctgggcatggtggtgggcacctgtaattccagctactcaggaggctgaggcaggagaatcacttgaccccaggaggcagaggttgcagtgagccgagatcgtgctattgcactccagcctgggtgacagagcaagactccatctcaaaaaaaaaaaatcagtatttaaaaaataaatatgtaacgtgccagtcagatgttaataaggtccatagagaaaactatagcagggcaaggatataggaagcagtgggaggaagtggggagggcaccatctgagaacacttggtaggaaaggcctcccttaggaatcattgttaggaaaccagaatgaaatgatggagggggccatatgaatatctttaggaagagctgtccaaagagaaatcagaaatacaaagaccttgaggtttcaggaacatgctgttgagacctattgttccagcttataggagttatgaggtttgtgtcttgccaagaaggtccttgggggagggcagatgaggggccctgcaaaaatataggtgatttggtgaacatcgctggaaaagattaggatgcagatactaccaggtcaaggaattaagaactataacatcagggtttgtgtttaatttgttcatccaggctggatgcagtggctcacatctgtaatcctagcactttggaaggccaaggcttgaggccaggagttcaagaccaactgtgagacccca

SEQ ID NO: 1978 - DNA, 4001 bp, Homo sapiens
gaagcaattatgatgctaataggagtggctggcacacaaaacagggtagctatgaattcagcggcaccttgaatctaacaaggggctccaggtcattctttgctcacttcttcttccatctgtcattgaaaattggagagcatttgattaagatcattatagcagttagcagtctgattccagcactggaaagcagggaagtaaagggctatttccacccccgatcgatgctgccagttttaaatggcatcaagcccctgacctccacattgtcccaaaatgatctcaatagcttgtccggctcctggtggtggtagtggaagggactggatgggcggaacaaaattcttcaacccttctaaacaaacagatgtcgcttttctgccgttcctgcagtacacctgtctgccctgggaagtacatttctcagctgcagccccgcgaggccaagagcttgaagctgggtcctgtggttggggctgcaggtgctgggcctaaagagcacgaaggggtgctccgatgcccgagccctggtgcccaaggtgtgtgtgtgtgtggcggttgcgggggtggggtccgaggtttggagggccgacctcttgaaggcgggcggcagccaccaaccacatcctggctcccgcacagacacacccccggggtgtcggtgccgcagccctcagcccctccccgggtagccagcagcgcccggtcggccgctggccgcaggagaaagtaaacaacaccccaagtgtccgggaacaaaggcaagttgtctttctacggtgccgcagccgtgtgcctcttctgaagaataagagctattattattctttatgtcttatccttttttttttttaaaaaaaaaaccaagtttccttctaagggaaataaacaccaaaggtaggattccaaggaaatgactcacagcggctggcagggctctggcggggctggcccgggcccccgcgctccagcccgcagcagatgtcggcccggccttccctccctcccttgccggccaaacccgctggaagcccgcggttgcgggagcgccctgcgcccgtgggacctggcggcgaggacgcctattccctgcttctgcgaccacagctgggcactcggaaagttgctagggccgaagaggcgggaggggaggaagggaagcgagaggcggaggcgtggaccaggcgggcagcagcctcagcccgccgaggaggtgagctgaggacagaggagccgccgccgcccgcagcgcagctctgctgcctgggaggagggtgcgggggcggaggtggcgggggacagaaggtgtcagctactgcatcaattcctttttcttgcaaacgcgcgctcctgacatccacaatccctctctccccacctgccaagcgccgcggcatccggacctgggggcacccctcctacttaaccccttcccctacgatgagggactaagcggccacggaggaccatgaggtctcaccagagcttctgaccccacccgcccctggagttgtctcggtgcgcgcgggtggcagcccgagcagccctagaggaggcggcggttcccgccctggtgaaggcgccgcggcgcacgctagcccagggaaaagcccgcgccgcctccgcgcccagctgtgccttggcccccacgccgccccgactccgctccggccgctgcgagtccactcggtgacctcggcacagccctggtgccaagagggcgcgcgggaggccgcgtgggtgcccgtctgcgagggcaggagccccggggggccctcgccctccaccctgcccggccctcccgcccccgcggcccgcgcccagcccggctcttaccgcggggtcagcggggaggcggcggccgcagcgcttgagctgctgctggtccgctctgggctcggcgccagcccggccgccggtgcacactcgcgggtcccggcccggccgcccgctcggcggtgactgcgggtgcgcggcgggcaagggtcccggcaggtcccgccgccgcgactggggcgctgcgccgccgtcgctgcagacggttatggtaatgagcggctctgtctagcgaggagcgtgtgaaacccgtcaatcctgtttgccatttccccgtggatttccgaggagaggttctgcaggatgcccccagggtgagagagggaacatgacaagcgcgcccgctctccctccctccctctgctcaggccgccgccgccgctcctcaggctgcacacggggcgcctttcccgcacccccaccccagcccgccccctgcctccttccctgcttcccgccctccctcctccttttcctcccctcccctcccggtgcccggggacacgcgggcccagctccagcccgcagcccagaccccacgcgctctcgggctcccgccctagccctgggggcttggctccagccgaataatgtattcactctggaaccttccgagatatcttgtctttttaaatttggtttagttttgttgttgttgtgtgtgcgtgtgattaaaaaaaaaatctgtgcctttcccaccctttgcaaaagactttcttctcctttgccacagcaaacggagatgagaaacagatgtctttgcaggaccaaacagttattctccctcgccgcccgcccccgcccgtttccctcctgagctgcgtacgtattaaaaaaaaaaaaaaaagcaaccttggtcctgctgcaacttgaattggcaaccctttctgggtggggagcctccagggaaaacctccaggaaataaaaagtaatacaagagattgtccttgctcaagagaatgtaatttaagccttggaatcagaatattttgcaaatagtaattttctcctatagtggcctcagagtttattttttaaaatcattaattcataacttctgtctagggacccctccatagtcgagatgggtcatttcaggtgtaatgaaggcagaggcttggaaggcatagacctaataaaatcgggagaaggcacctgcacaaaagtgttacaaagactataatgtttgtttactgccactataccagatgtgctaaatataacacttctttaaaacagtgatcctccgactgtgaaaaaccagacctctggctgcctggctccctaggaatcaagaagacgcacagactgaaaatcaagggaggaaggaacaagatcaaggatgaggattagcatctgcaaattgaactctatctaatttgcatgtttatttcttagaattgtaattaaatttgtgtaataaatgttttccatttcatttgtacacttaaaacttgggtgactgacatgcagttaagtgaatttcctttttttaaaagcaaatgtagattattcaataaagcagcaaaccaatattaaacataattagaactaatttgttttgaaggtgtttttgttgaactttgtacattaaagactctcagaggttttaagggtattaggaagctgagagatggcaattatgcttaaaacagatgaacccaacagcctaccaagagcattatttcattttttccaaaagacattccagggttgcatgcctaaaattgggaattgggcatccatcttggctttattctgaaccatattaaattgcattggctcatgcatgatgtgggccattatgatgataatttaagaattgtaaagatgccattttgtgcagtcaatggaagttgcatgtccaggttaagagtagagtataattttcatctgggtgggagaggagggttaggaaaggcacaagggcatttaaagcagtgcaagtacgtagaaatccaaatttccaaataatctaaaactggttattgtcaaactcaaaagaactaaatgtgagggtttggaggcatggcttattatggtttttatctccctatattaaagttttatggcatttaaaggactatgggtaaatccccatgtacacttggctgtgtgaaaatacataaaatcaaaaggagcaaattaagcataaaattga

SEQ ID NO: 1979 - DNA, 4001 bp, Homo sapiens
gaagaaaccacagatcagagaagtgattactggctaagccacacactgcaagttagcaggagggctgggacatgaacccagcactcttgctctctagtgttcaggtgttctcaatagtaacattatttccatctttccaaagaagtcacacagctgagaagctgcaggagaagagccattcctccacatggcgctcctaaatcacggcagagaagggtaagcaagctaacaaaaaccagggcacaaactatacaccgacggaggtaggatccccagaaaccacgttactaagagaaaagcagggattttcctggggtcatagcactccaccaaatcccaggtccagaatacaacttccaccacactctaggcctgtaaactaaagcaactagaagctcctagtgccgtgcaatctccgaaatcataaggccaaagaacaagatattcagtggggttaatgaagaaagcctctttctgagcccatcgtgggcctcaatgttcttcctgtaaaatggggctatagcgtagcttgtattgctggtttagtcctgaggacttaggttaaaggcgaaaaaaactcagagcctggtatctagtaggtgcataataaatgataagatgtccattatcgctgctgctggtagtggtgggggagtgcgaactgtcagtctggttaggtccagcctaattcccggtctccctgcaaagcccctgcgggctatgccgggatgcgaatgcgggggggtggaggggagcggcgcgaagggagggtgggggaggaatttctggaaaacaaacttctgggccttcagaccacttacttagcagggcgcagcctaacccgcgcttggcttcggaagccgcgaccagggttgtcccctctccccccagctttggctgccgccgccgcgtaccgggcggcccgccaagcccccagagcccctgcgctctccctccaaagcaggagtgcggtggacataggatgaggtcgactttcactggccagtcccaggtgcctacgccccgcgctgggggacaggagccgggaggcaccccaggaagggtcctctgcccgccggcccccgcgaagaggaagggactccgcggaagggggcggggaggaggagtggtctggccgctccggccgggatttgcctggacttgaagacgctcaggagcccaaagctcggagagcctccagaaggcttctccctcattggccaggagtccgagggagccgaggaaggatccgcggccctggggtggggcggtgagggagagggggagagggagggaggagggggagagggagggggagaaggagggagaggggagacagagtgggggaggggtgccgagggccgcggctgccagttgatgcaacccgggtcccgggttacgcgctcggctttccctccccgagcccaggacacaccgactcagctccggacagcctgaggctcagacgcggttcggggttccagggaagaggggcgtcgcgcggccgccgcttacctctccggggcccgagtcgccgacgccgcccggggcgaaccgcaggtagtccttgagctctgcgcggcactcggagtccgccacgatcatggtgcgcgccaggacccggtcgcggctcgccgacgacccgtgcacccgagtgggtttcggagggacgcccgaatgaagccgggactgggcgccgccggggagcttctagaaccccggggcgtctctcggggctccagaacgctccggaatccgagaacggccgctttggtgctggactcttcccccagtcgggcttcgggaacggcgaacggcctcgggggcctgggaagggccgcagcgcaggggttttcacggcctcggaagtccgcaggggccagggctgctcccggacccagcgctcctcagcatccccgccgcggaactgccagcgctcgccgggctctgacaccagcagttcagcccgctgcggtccccgggggagggcggggacacaaaagcccggcggtccagccaatcagaggtctgtttccccggggaggcgggggaaactccgccccctggagtcacgggctccgccaatcagcaccggggagcgcccggaattctgggagttgtagtccgcctcgggtgaatgctgcaaacttttgcaagacggtttagtcagatccctggcaacaccagacggcagtgacagccctaagagtcattagggttgcgtgatgaaaagggacttcactgggctaggccaaacagccgagtgtgaaatctcctaaatgaattcttcatcttttcagttcctggagggactggctagggttaagagaggtttggctcgcgtcctatccggtgctgctaattatagaactgaaccccagatatttagaggtcagagggcacaaccctgctccccctggcctcggggaagctccaaagatgcgagacacagggaattcaccttatttgtggagcctcaggaaaagccttcattccttgaaatgtcattggtaacttcgtgtggaacctcaatccctattgctggaagttttcttccttctgctacccgtcctggcttccacccctcccaccctcctcgaaactttgtaacaaggtgttctgctggatctttgctcacctctccctctggccttctctgactcctctttcaccacccacttcctaaaacgtgggtgcttccccagtttgtttttgcccctcttccctccagacactctccctgatctcattcacttcctggccttcaactcgcctcttgccagaaagttgcctctaccaacacctcagcacctccaagctaaattcattttctattcatttcaaacggagcctcttccttcacagttttccttcagagctcctttttttgtttccattttaaagttattgtttattctagacagggaatcctgccaggggtgagggtggataagacccccaagtccccctctgagacttctaagtctaagcttacaattccaaagatgaaaccgacttggtttcctgcctccagattcttgggaaaaagagattaatctcaccctcccctgagctcccaaggcacttgagctggatctcttttcacatgtatcacattctacctagttttttttgttttttgtttttttgttttctgtttttttgtttttgttttttgttttttagtaaatagagacagggtctcaatatgttgcccaggctggtctcaaactcctgagctcaagcgattctctcacctcagcctcccaaagtgctaggattataggcatgagccaccatgtccagccacattctgccttgtattgtaattttctatgtacatgttttatctgacccttttttctttttattagtattgttttttagagatggggtctagctctgtcacccagactggagtacagtggcatgatcatagcacgctgcagcttcaaattcctgggctcaagcgatattccctcctcagccccccaaatcaatcactggggttacaggtgtgcaccactgagtctggcttatctgatctttttaattgtaaactccttgagggcagggtcaacatcttttttttttttttttttttttttttaaacagagtcgcactctgtctcccaggctggagtgcagtggcccgatcttggctcactgcaacctctgcctcccaggttcaagcaattctcctgcctcagcctcctgagtagctgggattacaggcaagtgccaccacacccggctaatttttgtatttttagtggagacagggtttcaccatgttgatcaggctggtctcgaactcctgaccttgtgctctgcccgcctcagcctcccaaagtgctggcattataggcatgagccaccgcgcctggctggcagggtctacatcttgacatccatctcctgctctatgtcacctagcaaaatgtcctgacaatcatatgcccttggtcacggaatcttcctttgcatcaacttcctctcta

SEQ ID NO: 1980 - DNA, 4001 bp, Homo sapiens
ataaactttgaggaagagtaaggttctaaacatctgtacttcataaagtataaaatgtttggtacacagcctggccaacatggtgaaaccctgtctctactaaaaatataaaaaattagctgggtgtggtggcggatgcctataattccagctactcgggagggggaggtgggagaatcacttgaacccgagaggtggaggttgcagtgagccaggatcactccactgcactctagcttgggtgacagagcgagactccgtctcaaaacataaaataaaatgcttggttcaatgtcatgaacaattattctctaaaaacatctcccaatggagagatttccttctattttccatggagttctcacctggatgcatcatcaaagagttggtcaacgtgagccacctcagattctttctgtattacccatgtctctaactctgctagctgcttcttgcgttgctgtacacaatccatcttctccagttcctcatcgatgaaatgccgaagttcctccatagagatacccagttcctcaaccactgcctgttgcagctctgcaatctcttcagactccactgtagctgttgctgcatccaaaccaatgcacccaggaagggaagacatgcttttgtcctctgcatggaacagaaaacaaattaaattggagtccttataactacaatcaatcaatagagaatttcagttccctaataaaactaattcctactctgctgcctgttattctattcaaatattccatgttctccctccctattctccagaatctgatgctgagatttttaagagttcttatcttctgctgtacgctaacactcctgaaaaagatttaagagtttgagacggcatggagaacattcattaagcagtagagagctactgaaaataatgttttgggctggcacagtggcttacacctgtaatctcagcacttttagaggccgaggcaggagggtcgcttgagggcaggagttcaagaccagcctgggcaacatggcaagactcgtctttacaaaaaaatacaaaaattagccacgtgtggtggtgcacgcctttagttccagctactcaggaggctgaagtgggaggatcgcttgagcccaggagtagctgctgtagtgagctatgttcgcgccatgcattccagcttgggtgacaaagtgagaccctgtctcaaaacaaaccgaactttaaaaataatcttttgggatactgaagagaaccaatctataagatatttttgtggtctatatgtgttccttaactaatgtgataaatctttgtatgctatgcctaatttaaacaaaaccccacctggggatggagttgatttggaactcactaactcagtgttttctctttcattacttgttccccttatattactttgcttccatgtggaattttactttttaaaaagtctatgatattcaaacacacgaaagcttgcagcaaaaaggtttcccccaaagtacagagaagtaaagcaacctgggaataaaacgtgggtacctaatatccacaatccaaatacttcacacattcgtgtgaactgcttttttaatcaaacggttaaagaaaatctgattttcagcgcctccattttcctctgcccacacaccagcccacccccgtgctacccattctaggggtgcgtcctacccattcgcaaacccagttcagccccgcccccgttcgcctctggggaagacttccttcccaccctcgcccgaccccctcccacaaacaaaacgtcccagataagcctttggtcaccaaataactcaacagtattccccgcacctcccgtcttccagcttcaagggctctttttcaccaaccagaccccagactcacaactcaggggtcggcctcgacggaaaagagcgaaagcgaagggataagggaggagggggaggggaggaagcgtgaaagagggaaggggaagcaaaagaaacgcccggaagcaaacctttagtgccgttccggtcaccgcgacggtagcctgacggggtcaaatccaaagccgcggggcgcccctcagaggcgacgaaaactaaggtaactacgcatgcgttaaggcagagccttccaggggcacacgtgagaagagactggcagggcagagtaggcgtggccagtatattaccgagtctccgccgctcctaccaccctcgactagtggccccattactatattcattgtgtaaagacttagggaaacgctcataggttcagagctttattctctcagttttacttgagtttgttttgttacataagtgatacaaattgtaaaggctatcaagatgtaataagaaaaacgtgataatattctctcttgccccatcaccactccgctcctttcaggtaatacagcttcattttccagtcttgtatgtacgagtttctgtatttggatttttgttgttttcatttaacatgtggacattacctgaagccaataaaaaaggtaaaacttgtatttttggccgggcgcggtagctcacgcctgtaatcccagcactttgggagtcagaggcgggcggatcacgaggtcaggagatggagatcatcctggctaacacggtgaaaccccgtctgtactaaaaatgttagccgggcgtggtggcgggcgcctgtagtcccagctactcgggaggctgaggcaggagaatggcgtgaacccgggaggcggtgcttgcggtgagcggagatcgcgccactgcactccagcctgggcgacagagcgagactccgtctcaaaaaaaccaaaaaaaacaaaaaaacaaaaaaccaataacttgtatttttgacacctgaatagtttagattgtttagattgttttccgttctcagccccgacaaatagcgcaacaataaaaataaacatccttttgaagtagtacttttatttctgtagaaaagattccccaggccgggcgctttgtgtccgaggcgggaggattgctagagcccaggagttccagaccagcctgggcaacacggcgaaacgccatctcgactaaaaatacaaggtaaaaaaaaaaaaaaaaaagccaggcgtggtagttcgcgtctgtggtcccagcaactccgcagctgaggcggggggaggatcgcttgagccccggtggcagaggcttcagtgagaggagatcgcgccactgcactccagcctaagtgaccgagcgagactccgtctcaaaaacaaaacaaaacaaaaaacaaaaagaaaagatttcccaaaatggaatttgagtaaaataatatgtgcttttttccttttttttttttttttttttttttttgagaaggcgtttcgttctatcgcccaggctggagtgcaatggcgcgatcttggctcactgcaacctccacctcccgggttcaagcgattctcctggctcgtccttccgagtagctgggactacaggcgcgtgccaccacgcccgcctaattttttgtatttttagtagagacggggtttcaccgtgttagccaggctggcctcgtcacacctcggcctcccaaagtgctgggattacatacaggtgtgagccactgcgccgagccttcctttttttgtttgtttgtttgtttttgagactgagtttcgctcttgtcacccaagctggagtgcaatggtgcgatctcggctcactgcaacctccacctcccgggttcaagcagttctcctgcctcagcctcccgagtagctgggattacaagcccctgccaccacacccggctagtttttgtatttttggtggagacgaggtttcgccatgttggccaggctggtctcaaactcctgacctcaagtgatccacccgcctcgcctcccaaagtgctaggattacttacaggcgtgagccactgctcccggccctttctttctttttcttttcttttctttttttttttctgagacagagtctcgctctgtcgcccaggctggactgcagtggcacgatttcgg

SEQ ID NO: 1981 - DNA, 4001 bp, Homo sapiens
tatctccaacatctaaaaatagagaaaagaccaaaagcaaaatggacaaaggatatgaataatcattcaaagaagaaattaaaatggcagctgagtgaaatgtagtggaattgccgtcataataaaaagaaataacaaagacctgcattcgtatggcataacctctaggatatactgtttttttgtgtgtgtgtgtgtatgtgtatacatttacttttattgtaacaaagcaacttgtacacttttaatgtttaaaactgagcatcatcttccctttccagcgaaacaaaaagaaaatttaaaaataaacaggaacaaaattacaatagagaatgtcaattccaaataagatcctacaggttctgctgattctcccattgagtggcagggctcaagtcatcattaggagggaatttattttaaaagtgtcatcttaaactgcaaggatgtctgtcaaatatcacaattaaacatgccaaaggagaagccatgttgtcaaaatgcccacttaacccacccaaacatctcaaatccacactttgctgaccttctataaccccatttttttaagttttttttctttttttaaacacgagaaagtagacagatatgtgttggtaaatgctaactgtccatattgtccctttgacctacatagagacacagtgtactctctgaacccaatatacagagaaaggaggaaaaaagctagaattctatgcactactatacaggggcctagcatcctccagcttccagcagagcgaagggagcaggtttttctttttccccacagagctcggtggtgttgattccatacagtttttgttcagacaggaagggataaaaatgaacttcgaacagaaaagggtagagactcttttcccattgtattctgctcaaggtatttccccccaaataagttgagaaccatggagtagagaaaagagagctgaagaacagggtgactgagcacaagagaaaaaaaaaaagactgcaacttgctcccagggctggagaaaattttaaaaaaggaaggttggagtccatcagtgttctattagtcatcttctccttcatcctcctctccttcctccccttcatcatcatcttcatcttcttcaccttcatcctcatccccttcatcaatatcttctaattcttcctccccttcatcaccatcatcatcatcatcatcatcatcttctcctccttcttcatcatccatatcaggaaccaagtaatactgtaatgggtttggccaaatatcatctttgatgacctcttctaactcatcagcacctgcatcagaatgatcagtaaaccaggtaaagaagctctctggttcctcatgctgcctcttcctgctggctttattctgcgtttgacttgaacgtttcgtcacatcctttccagatttccatttgattttggtggactttgaagatggatcaccactctcattcagatgaaattctttggagaaaactttattttcaaagtaaggattttcatcaaaataaaaatctattctgtaacctgatttaatatcttcaaattctgtcacttcaactttagtcaaataatgcagtgcctcttcgtcctcctccccaagcagtgaagacacttgtggatggttgacaaatgttgttaccccaaaatttgggattttggcgatcaattctgacctcttctgaaaaaatggttggcggagtttgttatatttctgttctactttcaaaatctcctcactgtcttgttcattaagtctgtctatttcattttgtacttcatcaatgtgttcaattgcttcttgctgttctttttctcccttcttcggcaagcctgcagaggccgatgtctcctccagtcccagagcaggaggtggtcttggtttcttcttttgaagtgggagtggagactggcgtttaggggccatgctgttagggaagtccaagaaccagaccatgagtctccttgctcgtctggaagcaggcagaacactgtaggatgtactgttaaatgaggaaaaataagatgcagaatactaaatatagtatgcatgttaccttatgtttaagaaggggtcatctgagtacatggaatatatggaatacacacatacatatacacatgcattcttttttccaaggtaataaaggaatttacccactttatttctagtagtatgtagtttcactttttatatttagctgtcttatccattaaatttttatatatagttcttttttctttttttttgagatgcagtttcactcttgtcacccaggctagagtgcagtaggttgataatcggctcactgcgacctccacctcccaggttcaagcaattctcctgcctcagcctcccgagtagctaggattacaggcctgcaccaccacgcccagctaattttgtattttcagaagagacagagtttcaccatgttggccaggcaggtctcgaactccggacctcaggtgatctgcccaccttggccttccaaagtgctgggattacaggtgtgaaccaccatggtcagcgaatttttatatatagttcttaaaaacaaaaaacaaaaacaaacacaaaaaaacaccactcagctgggcatggtggcacatgcctatagttccaactactcaggaggttgagacaggaagatcacttgagcccaggagttcaaggtcagcctggaaaacataacaagctctcttgctctctctgaaaagctttttgcttttttaaaaaaatttattgagatggagtctccctctgtcgcccagactcaagtgcagtggcgccatctcggctcactgcaaactctgcctgccaggttcaagcaattctcctgcctcaacctcgagtagctgggatttgaaatttttcatattaaaactttcattttttgttttgaaacagggtctcactctgtcactcaggctgaagtgcagtggcacgatcacggctcactgcagcctctaacccctggtttaggcgatccttccacctcagcctcctgagtagcgaggactacaggcatgtgccaccacacctggctttaattttatttatttatttatttatttatttatttatttatttatttatttagtaagtaagtaagtagagacgaggccttgctatgctgcctaggctgttcttgaactcctgggctcaagcaatcctcccacctcagactcccaaaatgttgggattactggtgtgagccaccaagctcagcctaaacatttttaaagagggagaaataatgcatcaaaaatgggtttgctttcatgagattagagttcttgaaagaagtttttccttccaaggcaattttacctaaatttacttttctcacattaagatcacagttaaagatgaccctaaaccaaattaggagtttagccacgtttaccttcacagctcccaccgctagttccttaaactctcttttcctcctgatcaaaaattatttcaggaagaacatctgaaaacctcactcacattaagggataaatgactatagagatgaattaaaataaaaataatgctttaagttaaattatctaatggtagaatgtgaagcatcaatgacaagtttttttgtttttttttttttagagacagtcttgttctattgcccaggctaagtagtgcagtgctgcgatgtgatcataacttactgcagcctcgaactcctggcttcaagcaatcctcccacctcaacctcccagtgttggaattacaggcatgagctaccatgcccagccatgttttgttttttaagggagtatttactcattctttaatcatttcacatagccgcctaagctaccttaagtttttttatttttatatatatatttcttgagacggagtcttgctctgtcacccaggctgaaatgcagtagcacgatctcggctcattgcaacctctgcagtgaaatgatatagttaagtgattctctgccccagcctcccaagtagctgggac

SEQ ID NO: 1982 - DNA, 4001 bp, Homo sapiens
atttaaggggtggctcctatctttacataccaccgatgcctaacttcccctgtaacagactcaccctctttggccaaacactagttcccacctaacatcctcaaagataaagatgatattcactatttcaaaacgcttgactgaggagtaggcaggctaaataaacattacataggcttcctttgtagtcaaagtatactaattcaggatggtacaggtacatagtccctcctccaaaacttttgggaccagatttgtttcagaatttggaatgtttaagttcaaaagaggtatcatatattatgtaacatccctagtggaatctggagcacacagttctgcagtaaacctcataccttatttaccaagtgggataaattaaagaccataaaaagcctatcacaggttcgggccaggttttactgtcaagtgagatcaggtcagattttgacaccaaataatcacccaaggggaaaaaaagaaaatccttggttttcagagtattttggggctgagggcttgtaatctgataatctcctgcaaatcagaaggtccaagtaggtcttttattcctttttaaacaggtttcaaacatacacaagagtaaggaacgtagtaaaatgaacctccatttattcatcacccagtttaaatagcatcttgtttttcttttaataaactgaactattaccagacaaatgcagtttagtagtccaaaacgctttaaagtagtatcctgggagaaaaacactaacatacggggtgtgttgtgtgtgtgtgtgtgtgtgtgtatatatatatatatattttttttttcatttaagggaaggattgtagctatgcacctgagtcatggactcttcataactattgtttgcacatccaagggatacaggatgctgtaagaatgggcacgtgtaagccggccgcggtggctcaagcctgtaatctcagcactttgggaggccgaggtaggtggatcacgaggtcaggagttcgagaccagcctgaccaacatgtttagtagaaactccgtctctactaaaaatacaaaaattagctgagcgtggtggcgagcgcctgtagtcccaactactccggaggctgaggcaggagaatcgcttgaacccaggaggcggaggttgcagtgagccgagaccgcgccactgcactccagcctaggcaacagagcgagactccgtccaaaagaagaagaagaagaaaaaaaaaaagggcacctttctgattaatgaagaatgcccaagagttccccattcagagaactgaggaagcaccctcacgttcggcagcctgtggacatctgtccaggcagagagcccgcgactggccaatccggttacctttggccagggactcatgctgagacaccgcacttcacttcccctctcttttcccgccctcgccaacccaaagagaggcagacagctgggcactcacatcttgcatggcccgagtgcggtgatcagaattgatctggtcccggagctgaaaaaacaaacggtgacacaaacgccgttagtttgcgttctggagtagaaaaggccgcccgagggcggagcttacccgctcagcttttaccagctgaggcagaaaggcctctggggctccggaccccgggaggaggttaccaagaccggagctcggagagggagcccggaggaaggcagggaggttctgagggccaaagcaagctctcagaggtcaaacacgggatagaggctcgtgctcctgccgcagcctctgctcaggccccactcaccgtggacttcttggtgagcatctctttagccatgacgtccatgagccgttccttctcctcatgatagcgccgctgctgctccagtattgtctccatcttcccttagtcgcggcttctcaattcagaccaccaacacggccggaagcaactcctgccgcccagcgcgcctgagtccccacgttgcgcatcaggctgcaccaaagttccgcgagtgccggaagtgccccgggacttaagaaaacaggagcaccacaaggaaggccagtccatgttatggagatggcaacagtgccacctgctggtgggaggtgtggtggagcgatgccgagaggttcgcagatgcctccagggggcataggaaaacccaagaacctgaggttcagcggacggcttcctgcggcttgctggggccggcttggcgggcaggtatcctgtgtggactgcgcgagcagttggagtgcggatgggagttgggaaaccggaacttgaggacgcagctttcagcataaattatgagaacgttttctctttctctggacctcagcgtctttctcaggaaaatgggaatagtggggttttgctggtggtgtttttaaaaaaattcacatgtgaggccgggcgcggtagctcacgcctgtaatcccaacactttgggaggccgaggcgggcggatcacttgaggtcagaggttcgagacgaccaggctggctaacatggtgaaaccccgtctctactaaaaacaaacaaacaaaaattagccgggcgtgatggcaggcgcctgtagtcccagctactccggaggctgaggcaggagaatcgcttgaacccgggaagcagaggttgccgtcagctgagatcgtgccactgcactccagcctgggcgacagaatgagactcagtctcaaaaaaaaaaaaaaaaaagaaattcacgtgtagaaacgacttgtctatcggcagcgaatatgttaaataaaatactgtgcatccaacgagatcaggagattgagaccatcctgtctaacacggtgaaaccccgtctctactaaaactgcaaaaaattagccgggcatggtggcgcgcgcctgtagtcacagctactcgggaggctgaggcaggagaatcacttgaacccaggaggcagaggttgcagtgagctgagatcatgccactgcattccagcttgggcgacagagagagactccgtctcaaaaaaaagtaaaataaaataaaataaaatactgtgcatccaagcagtggaagaccagctgtgaaatgacatacagccttaaaaaaaattctgtctatatatctccacttgtaggtagagaaatgcaaacatgtccatgtgttcatatgttcacagcggcattattcataatagacaaaaactggatgcagcccaagagtccattaactggcaaatggataaagtgtggtatatctatacagtacaatggaacattattctgcaataaatgaatactacaatgatgaaccatgaaagcatcatgctaagtgaaagaagctagacagaaaaacaacagtgtatgtccagataaaacgtccagaacggtgttaaaagaaaaacactggtgcttgctatggcagcacatatactaaaattggaaccatacagagaagattagcatggcccctgcaaaaagaaaaaaaaaaaaaaacaccggttattacagcttggtctttgccttatttgaacacggtttgcatagtttgccatgtttgattggccaaaactcggtgattggcaaagagtaggctatggtctgtttacaactccatttaggttatagttcacaatgtacagagaaacctttaggctaaatttaaaatatgtaaggaggcagctttaggctacaattgagttaacaaaggcaaatctatggaggcagaaatatgagtggttgcttgtgaccgcaggtgagattggaagtgattacaaatgcgcacaaggaatccattttggatgggtagaaatgttctaaaattggattgtggtgatagttgcataactctattcattttattaaaattaattgctttgtactgttaaaaatgggtgaattttatggtatataaattacacttcaataaaactgttaaaaactctgtatgaactcatatggagagatggccacacaaactgaaaaaagctagatgcacaagtgtgtataaaaatagatgtgcaaagagattatttctg

SEQ ID NO: 1983 - DNA, 4001 bp, Homo sapiens
cagtcctcttcccatcaactcactgactcaatgtcccctgtccccctttcagacttgttttcttcttcctcctgaccctctcccccaaccttaagacaaacatattttaaccaaaagctttacctggtggaggaagcccagaccccaatgatgataccacaggattgggagcagagggtggaggaggtgcatctgcaaacagctgatgagggcgatcagcctgggagagcgggttctgagctgccagaagtcgttcggctgctgagccatggcgctcacccttggagtccttcttgaaggcataagatacggtgataggacggttacagaggtactgcccattcatggcttcaattgctgcatccgaagcatcaaatgaagcaaaattaataaaggcataacctttggagttgcctgtgtcagggtcccgcataattttgggggtttgtaagatgaccccaaaggcgctgaaagtatcataaagcaacttctcatcaatctcagggtccaggttcccaatgaaaatgttggcccctacatccaggtttttgttgtgagctgatgctttgttcacccgtattggcttcccatagagtttgatcatgttcatgatcttaatggcatagtcagcatcttcctcactcaagaattccacaaagccatagcctggaaaagtggagaagaggaggttaacaacgtaagtaaagagactgaaaatggggtaaaattcatctaccctctaatcacaaagaacaagaaagaaacaacatcactttacttaagaatggttccagaaataaactgaagagaggcttaaaagaaaaaaatctttaggttgctcatgttattccaaaacagttgtgaatactgctgggaccctccgggagcaattcgccccttgtcatgtactcaccttggtgctggccagtgactctatcctttggcatgtgggtgttgactactggtccagcctggagaaacagttcccacagcagcggttcactaaccttctcatccaggccccccacgtacacagtggcatcttgaagggagggagcaaaaagagcaagcgtgagagtgtaacgggaaggaaggaagtgatggaaacatgaagatggaacccaaccaggggaactggggaccgcggtaggggacaggagcaaaaaaaaaagtttaaacccttaaacttctctcttcccaggacttcgggaatcctctgaagtctaatttagtattgtgagtgggtttttttgattttttgagtgagaagtcagcaggggaccggacttaagtatcacacccagaggcctcagccagcacccggccaccccgcccccaacaggcagagggccggtctcgcgccctctggggaagggaggagtccagtctcccacccctgcagagacactgctggctgtagtcggggcctcctagccacgctgagcccattccagactttccccctccagttaccctgattccgctcggagatcggcccggcagccatggcgaaagagatcccgccgtctcccagcagcggttccgccttctgacctcagcacgacttccacttccggggcgaagacggacgtagcggtgggcggggccgcggaagaggaggtgcctggaagcggctgcagccatcttaggagcctccgaaacttaacctgggtcgggcggtagagtcctcggctcgcgtcctgaggtgccgctgctagttgtcttagcgaggagggcggaacggaaacgctcaggccctcttaatgcactgctagacttgaaagaatcacactgctctcaaaagtgtaaattcgaaagctaaaagaacaaaaatttcagttttaatatattttgtggacagtgattcttcttctgttgtccagagaaggatgtgctgaagagttccccccaacccgaggacttgggggctttcaggcgcagagggagccttccctctcgcctgcagccttcttgcagatttggcctcacaaccctgatttgggctggaggtatttggttttccctcaggggaggagactgcgaaatgtctgagcttagagtgacgtctgcgctcacctcgtcctaattgcatggggagggtgagggctgctccgcgttggtgtgtgaccacagctgaggggtggatgggatcggagctctagagtctggatctctagaacactctggccccatctgcctctaaatgggagacacacacaagagaaccctttccccaaattgcacttgaattttgcagagcctcaccaaacccagttcccctatttccttagcaataatatggtggatgccttcctctcttgggtcatacaccccttttacccaccactttcctacctaggagaatcctttattcaaacacaagaaacaatgccagcaatgtgtataaatactatgctttaatgagccccttaaatagaaattccactacaaaaatacagaggagatagggtgtttcctgtatccgcctcattcccatagaaaactataagggaagaaatagaacttggaattaaagcagcagcaaggcgaggtgagaatgcgatttctaggccatcttgttgggactgatgaacagcatctctgatctcatgatttaacatctggttatccagaagggatgggattggcctaaaaaaaccgatcaatttctggattgtttttgtttcttaatccttcaaatgacaagaagcaaaaatatttgtagaaactaagcaagacaagagttggagcagttaacaccactatctgcagcagaaactcagaccttcttagtgaacttaagggctgaagtgtgaaagctgaggctgcaagtgcagatacaaaaaaaaaaaaaaaagattagacagaaccctcctctaccccagatccccctctgccctgcctttgagaatgccagcaatttcagtgggattgagaatggtatgtggatctcttttcttggagtgatcctcaggagatattcttggtgtccatttccgtaataactcctgaagatgggatagctcatcctggaggccagagattgtgggagctgagaggcccatctggggaggaggcaaagaggaacagagaagaatactgttgtagctctggccccctgcttctctgctacttctggtgtctttaattctgtttcccctttcagctatgccctaaattccacttaatctaagccacaagcactttcccgcacctcctacactcccaaaccttgtttgatgccaagaggagtagaacttcacttcccagactcccagaggcttcagctccttgcctttccagctcctgttcatctggttcagcagagtcaagtcccttgtcccactcccagtctattttcccttcttacctggacctcaggccttcccctcaggtagcagcgtctccagagcctgatctggggtcccagatacccaggcagcagcagccctggaggtaaagggcaagctccccaatgtgaggggagaccccattcctggtcagccaggctttcagaggagatagcaggtcgagggagccaacgagaagagactgccagcagggaaggactgtcccgccaaggacagagctgattcaggggggtcaatgctcctctagagaagagccacacagaactggggggtccaggaaccatgaagcttggctaaaaggaaaagaaaatcaactggcaacagagagaccagataaccctagtttccccaatctggatcaggacagggtgtcctgctgccacccactcactgcactggtgactagaactacaagcctccccatgagaactcttctaccctcctcattaggcttcaactaggcctcgggactgattaaggttgattttagggcaccttatgtgtgcacgagacaggaagatgagtaaacagacttgaggaaggacaaaaagggtgccctctgtgctattctaggtcttctgtcttcctagggacacccagggactataagtgacagctgcagaagagtag

SEQ ID NO: 1984 - DNA, 4001 bp, Homo sapiens
gggccccgcctccagtccagggctgcgaaggcgggacggagcaaggcggctgcaggttccggcgtgttgctggctgcagagagctcaggcagcgggctcggtaggcacagctcccagcggcccttcccacccagctcgtccttcctccccttcagcccgtttccttttgtctccatctccgaactctgtgggacgtgaccctctcctaagatctaggcttttttggcggcgctataccccttcctcagatcgtactcccctccgctgagatctgagcccttgatgaaactgtgacccgcctgcaaatcgggtgctcagtgccgctcactactgcggcgctgtccttagatctcacgccggagacttcactatttcctgccccgctccaccagagctcgtcagcctcccgcgccgtggctcccactcacctcccctcagcccggcagaggagccacggcgcctcctgtgggttcacccgaccctcccggtcccgtccagtttgactggggccgccgtgatggagagagccggaccccggcctcacctggactcaaagtcttgcgtgcgggccactgagccacctagggagttcagggccctaactcagaggtccaaagtcagggtctctaagtcagattccagtcccactcccagcccatcgccaagaactggaagagagacaggaggagtgtcacaggggaactttattgagaggaaacatggtcacacccagcagacatgctttccctcaatctcggtcttgcactggcgcgcgcgcacacacacacacacacacacacacacacacacacccatctccagcccctgccactgtccagttctcagccacaaggcgggacactcctcaattcctacgatcagaggcagcaggggcaggagggaggcaagaggaggggagaagtagcctggtcctggggtcgggaggaagcgggtgcggagagcaggggtgggggcatgaccagtggttaggtgcgctcaacagctgcaagaagagtgggatccccagccccaggtggcctcagctctgccagtccctctccacggagccctttggagcaagaacagcgcctaggggagaagggtggggcctcccaccccatactagtcctctcggcagggtgggggactggagggggcagggcggggcggtggcgggcaacactcagctctggggctcctggggagcctcgcccccctcttccccggcgttgtcggccgtccacagtgtcaggttgtctcgcagcagctgcatgatgagggtgctgtctttgtaggagtcctcgctgagggtgtgcagatcagccatggcctcgtcgaaagtggtcttggccagagagatggcctcctcggggctgttggcgatctcgtagtggaagacggaaaagttcagggccaggcccaggcggatggggttggtgggcggcatctccttcttgctgatgtccatggcctcctggtaggctgaccgggctgagtcaatgatgcgcttcttgtcgtcaccggtggccacctcggccaggtagcggtagtagtcacccttcatcttcaggtagaagacccggctctcggcgtccccggcctccttgatgaggtggctgtccagcaggcccagcacggtgtcgcacacgccctggagctcagtctccaccttctcccggtactcacgcacctcgggccccttctcctccgagccctcctcgttgcttttctgctcaatactggacagcaccctccaggcagccctctggccgcccaccacgttcttataggctactgagagcaggtttcgctcttcgcaggagagctcctcgcccttctccacggcgcctttcatgaaggctgccatgtcctcatagcgttcggcctgctctgccagcttggccttctggatcagactggctctctccatggctctggggacacacaggcgggcggcgggctaactgctgcctgggaccaatgccggactctgtgtctctcctgctcttggcctgccttttggctgggtggccaggcccagagaagggtggggaggagcagggggcgggaccagggcccaagacctgcctccctctcctctcttccccacaccctttccggctctgcagtaaaggtaaaaaggctgggatgtgggggtgaatcatcagaacagtcagcaggagaaatctgggcgtgggccccacctgcactggcacctttccaggctccaggctgccccctcttgttcggggctggcatcacatggctgcccacatcaggaaacggcttctcaaatcagatccactttcacagtgcccttccaggggctaaggacggctttagcccctggctgcttcagcctcgacagagcccataaaggttcaggaggatggggttcctaatcctgccaggtaacttccccccttggttcaggtgaggataactcatgtttaggtagggccatggagtttcccaagcactttcatattcacgatcgaatttaatccccaccatgtctctgtgacacacacaggaccatagagatgggaacactaagtctcagagaggggtgagatttgctcaaagtcacatagccaccaattccctgaaactcctttctgcaccctcttcctttagcttttctcccattgaggcctctgacctatgagctccagactgtgtttggaagtgagatccaggctccttctcagtctacctgaagatggttccatcctccaggcctcattccccctcagggtcccctctgagctcccagaatgcgcaggtggcagctttcagagtgccgcttaatgaagtgtttaacaagcagcctctgaagctccagcccagcctttgtaattagtcacccagtaggtttgttggacacatttcccatcactacacaattttccctttcaagttggtggcctgttgccacttgtttgaggatttaccctctggccctccacgccaggtcacctgccctctccaagccacatgccatcaggtaccagcggggctcacagagggtggggtccagctccccggctgtcccactttcctgcctgactcagactgctctctgtctgaggctgggaagcagtccagtttgatcccccaggggggacgctagcaacctggggagagagaggactgagaaagggaggtggcagtgacacataccattctgttttatggggcagcaattccagctacgtgatgcctcccccagcctgtttctcagaagtttacttgttctttccttttttttttttttaaatagagagcagatctcactacattgcccaggcaggtctcaaactcctgggctcaagcgatcctcctgcctcagcctcccaaagtgctgggattatgggcatgagccactgtgcctggcctgttccttccttttgaccattgccccatctctgacccctggcagagtcctcagagatggagacctctgttgccaacgttctttccctgcttgccggagccctggcctcaagtttcatcaagagtttcacctaagggtgttggcattgagcctatagggatggattcctgcttatctgccccacccatagccaaagcttagatggggctcagaggtagggctcccttcactgggattctgccgacctaatagttgagccaggataatttcacaggcctgtgtctcccccagctactctgagtgtctgaacactcatcttccctcctggagggaggcttaggccagaactctggggaccaaagacgagatccttctctttgccacaaggaggagtagggacatgtctgggctaatgctacagggtttccaaggaagtaaaggggattttaagtttgacgtcccaaagattttgctcaaatcagagaactgacacagaaaacaataggaaccacactaaaataccaacttctagagggtatcttgaggtagtgagagtgagtgattttgcttccctttgattttctttcttctcaatttccttttt

SEQ ID NO: 1985 - DNA, 4001 bp, Homo sapiens
tacccaccccacccctcttttctcttaggtagcaacaattatgcattataccgcaagcatttttcctgtaagaatggtgaaaaatctaaaagatcaatttatcctccccagtttaaaaaccaagccttcagcgtttgtagtgacaaaaaaatcccccaccctttttaattctacgtaaaatcaaacaattacactcacaagcttaataaatccgaatcctttgcctttgttgataaaaacttctcctggttctccatatttagcaaatagtcttttgaattcatcctccgtgatatcagcaggtagattcccaacaaacaaccgacatcgctgtgtgtaagttttctctccaggcctcctcaagagagacaaattggctttaaacccctaatgaaaaaggaaagaagttttcaaacaccagagacctctgcaagtgaaaatccccaagatagtatttgcttatctgaaacctatcagttgcctttctgttccgtttggtcaaaatcaaggttttactatgtgagatttctaacatgagcactatcttaacattgaaaaaggagccccatcatccagaatgttcgagaatagacacacttccccaaagagtagacgtccatcagcaactgtcacccacatatgttgagtgtccctaaaaaaatctaaatagtatgaaaattaaaataggaaaataacacaaatccaaatgccactgtaacctacacgatctgcgcctgcgcttttatggaacttcccggttctctccaaacctacgccgcatgctctgcattacgccagtcccagggacaggataccttctgcagggccgaccaccgcggccccgcgcttccttccgaaaggaaacctcccctagccttccgcccgccgggagagcaaggcccggcggcggccaatcccccgccgaccgacggccccgcaggccgccccgcccccgcagcggcgcgcgcaagcgccccttccggcagccgacaaaatggaagcccagcgcgggggcgggggcgaggagggggccgccgccatcttaggggagccgacgcgtcgctcccatagacactcacctccgagtccgagatcttctcctcgctgcggccgccgggcccgccgggcgggggcccctggtgatgctgctggtggtagggcgggtggtgctggcggcccccgcggggctccccgccgcctcgatgcggcggcttggggtggccgccaggcgtacttaggcccgggccgccacctggcttcggcccgccaggcattttgccgcctttgggaccacccggacctgggccctgcttaggccctggacccgggcccgggactgccgcgggcggaggcggcgggcctccggcctgaggaggtgtggtagggaccccgctgcttggcggggtgggtggcggcgccccgggaggggccgaggtgactgcaggcggcggggtcggagtcgggcctggcccggaccctggcggggcccccgaggttggtggagtggcgggcggggccgagctggaggctggtggtgcgctgcctactccgggagcggggccgggtccctgagcaacgacgggcttggaagagtcctgcggcggtggcggcggctgctgctgctgatgcggctgtggatgcggcggcggctgatgcggtggcggctgctgcggcggtggctgctgcggtggtggctgttgctgctgttggtgtggaggcggtggcgggatcggaggcttagggccgctctggcccgggccaggacccatggggccgcgattctgattgaggcccatgccgggcggcggagaacggaagtcgtggaggccgccgcggccgccgcctcctccacgcctgtggaagccaccaccgccaccgccacgactccggaaccgatcccgagacatgtctgtggtcaaggggcggtcgaggcaaaagcgaagaagacgctcaggaaacgtggaggccaccttgcttctcacaaaatggcggatgacacaggcggcgcgccgcctttgtcctcgtcttatataggccagctggcacggccccgcctactccacgatcgacagctccaatagccaattgcaattactatgcttgatgacactaagttgcgaacctctgatcattcctattggcccctgggtgagaggcgggaggcatggggggactgaagtttccagttggccagtgagcgaagaaggcgttggctgtaggccactatgatttgctaggagaaatttgaatgggtatgccagggcaattttcacttgcgagcaaataaccagggctctatccgctcctgcagagaagcgttggaggtctcttttctttcttgattgtccctaggagcaatctactgatatccttgcccagaaaaacagatgttttccgattcaaaatcagaaattgagtgcctgctgtctaccctacctcgtgccaactcaatgaaagtagagaagtaaaatcttaccgatttcaaacatacgcagtcttaactgatttcattatggaacctcataggaatacagatttattgtagcagcataaacttttcaataggcttctgtgggtgcgcgctttgttcaaaaagagcccttgtgtgtatgtgtgtatatatacacgtttacaaacaccaatcacaggaggaatgtaaatattccactcaacactttacgaacagactaaggtacttttaaaaaattacaatgttaggctgggcactgtggctcacgcctgtaatcctagcactttgggacaccgagtcgggcagatcacctgaggtcaggagttctagaccagcctggccaacatggcgaaaccccgtctttactaaaaaatacaaaaatttggctgggtggggtggctgacgcctgtaatcccagcacttactttgggcgccgaggtgggtggatcacgaggtcaggaattcgataccagcctggccaatatggtgaaaccccgtctctactaaaaatacaaaaattagctgggcgtggtggtgcacgtctgtagtcccagctactcgggaggctgaggcaggagaattgcttgaacccgggaggcagaggttgcagtgagccgagattgtgccactgcactccagcctgggcgacagagcaagactcagtctcaaaaaaaaaaaaaaaaaattgctgagcttgatagtgcacacctataatcccagccacctgggaggctgaggcaggagaattgcttgagcccaggaggcggaggttgcagtgagccgagatcgcgctattgcactccagcctgggcgacaagtgccagactgtctcaaaaaaaaaaaaaaaaaaaaattacaatgttacaatgtctatagggtattaaccagtcagatgcatcaattatttttctcttattttctttgacacagagtcttattttttttgacacagagtctcgctctgttgcccaggctggagagcagtggcactatctcagctcactgcaacctctgcctcccaggttcaagtgattctcctgcctcagccttccgagtagctgggaccacaggcgcgagccatcatacccagccaatttttgtatttttagtagagacagggttttgccatgttggccaggctggtttcaaactcctgacctcaagtgatccacccacctaggcctcccaaagtgctgggattatgggagtgagcaaccacgcccagcctgtatttcacaatctccagtttctttgaggtccacagaccttttgcggaataattcctccctcaacattagctcatagcttctatcttcttttctgcatctaactctcttcattcaagatccaggcgggaccgggtgcggtggctcacggctgtaatcccaacactttgggacccaaggctgaggcagtagggtcacttgaggtcaggagttcgagaccagcctgtccaacatgacaaaaccccctctctagtaaagatacaaaaattagcagggcgtggtggcatgcacctgtaatcccagct

SEQ ID NO: 1986 - DNA, 4001 bp, Homo sapiens
ccaacagatgcctcagcataacacattaaagcccttctcacagtatccaacacagacgttcaccattttaggttaaaaacaagctcagcatttatgtttgcaaactttactagtcgtccactgttgagggtcagcccactgcttcgtgatgattttcgagacaataatatctgcatcatcccactgtcaacactccacccctcaagagtctgcagggagagaaagtgtctgcctcttaagcaccaattgttcataaaggcttgttgacagtctatggaaataaagctttaaataacgagggtcagctacctatgagtcagacctttcttaggcccggtctgaggttccacttgagattcataatagaggctagaaatcaagaaaaaaaaacccgtgaaattactctgagccttgaccaattaataaaggcaacaaattaaaaagaacccaccaacttgttttgaaatatcaaaaagttaaatttcagtgactccaacattcgatcccatagaattactccctcaaggtgaagattcagagagcaatcttacattcggagatgtcatgctaagtcccagtatcacacaaaacaaaaccgaataaaatcagcaaccacaaacgtgggtgaaagcagcttgctgagaaagaagaacttgctgagaaaccagaagaaacactgattagtttccagttggccatatcatcttaacatcctcatttcacagatggggaacggaggctaaagaatacaccaaaaagcgaagagaaacgttattttgtcatccaaaaaggaaaacaaaagctaaaagcaccctaaatagaaatgcagcattctgtgtggttctacaacataggacattagtggccaggtttcagcacgatcaaaacttttctaataggccgggcgcggtggctcatgcctgtaatcccagcactttgggaggcagaggtgggcggatcacttgaggtcaggagttcgagaccagcccggccaagatggtgaaacctcgtctctagtaaaaatacaaaaattagccgggtttgatggcgggtgtctgtaatcccagctacttgggaggctgaggtgggagaatcgcttgaacccaggaggcagaggctgcagtgagccaagatcgcgccactgcactccagcctgggcgacagagtgagactctgtctcagaaaaaaagaaaaaaaagcttttctaataaaacaaaccaacacgcaggcagtctcctgaggcgctgggtgtctagagactagttgtgggcagtgtggacagagacacaagatgtggtccctgtcctcatgggatgggggcagtttctcacccccaatcacaaggcaatgtgtacaggggcgggtgggagtgtcacaccctacaacctaaaccggacagaaaaccaaggcagagctcggggcgcggccaccagccccgtcgcgaggtagggaccgccaccccaacaccccagtccgggtctggggccccgacccacccagcaaaggctccttccgcctggacctcggggcccccagccctacccggccctaaagcgcattccccggccggtggggccggggccgacagcccagtcgcccaccctcccactcgcagctcagtccggggatttcctcctgcgccgcccccttgtcagggaggatgggctgaaggggcgcggggcagaaaaggacgccgcggccactgccccgtgtagtgccagacctcttcgcggagccctgcagaagaagaggaggagaaggggcagagctaccgtccagaaactccagggagtccccgcaggcttcccaggcccgggcaggggacgcagggcgggagcgcggcgagagggggccgacggccccgggctcactcacctcggacaggccgctccggtcctccgtgtcctgcccgctcagcaccttcttcagcttgtccattgcggcccagtccccaccagctccagctcctcagcggcagcctgttgcgctcgctaagttgacggctcttccgggtgctaggcagccgcccagccgcccaggcgccaaccgcggcgcgccccgcccaggcacctgcccaccggggggctcccggcatgccccgcgcgcccgcgctcgcctccgcttgttttggtcccggggggcgcggcgggccggaggggctgggattgaagaccaccaggcgctgccaaacactaattcggcgtccagagcagtttcaaaccggaacgggccgcgctccctcgccctacttgatccagtcaacgaatgccgagcacctaccacgtgcaaggctccggagacacaaagacgggggagaagccttgtgcagacgggaacaaaggctgtggttcatccatattgcgatcgtgcctacacaggaaaagattttctttttaatcactcaaggccttagtctggtgtggtggggcgtgcctggaagcccagctactccggaggctgaggcaggaggctcacttgagccaaggagttccaggctgtaatgagctatgaccaggatactgcactccagcatgggcaacagagcgagactctgtctcaaaaaaaaaaaaaaaaaaagtgactgaaggaatgttgaaaggaataatagattgttaaattgttttgtgtttgtacaattgtttttttttctgaccttaaaaaaactaaaagtagactgggcatggtggctcatgtctgtattcccagcactttgggaagatggcttgagcccgggagttccagaccagcctgggcaacatagggagacctcatctcttcaaaacattcttaaaaattagccaggcatgctggcgggcatctgtaatccaagctacttgcgaggctgaggaggaagaatggcttggactcaggaggtcaaggctgcagtaagccatgattgtcagtacagtaagccactgcactctagcttgggcaacagagtggaaacaatacaaatggccaccaactgattaatggtaaataaaatgtgacatacccatgcaataaaaaagaatggagtactgacacatgctacaacgtggatgaacctcgaaaacattgtattaagtgaaagaagtgtggagcccgaaaatttgagacaggtctcagttaaccaggaagtttattttgccaaggttgaggaacagcacctgtgacacagactcaggaagtcctgacgacatgtgcccaaggtcgttggggcatagcttggtgttatacattttagggagacatgaggcatccgtcaatatgtgtaagaagtacattggttgtgtttggaaaggcgggacaactcgaagcaaaggcaggaagactcaaggggggagggggcttccaagtcacagataggtgagagacaaatggttgcactcctttgagtttttgattagcctttccaaaggaggcaatcagatgtgcatttatctcagtgaacacagtgataactttgaatagaatgagaggcagatttgttctaagcagttcccagcttgaattttccctttagtaatttgggggggcccaagatatttccctttcacagaagctagacacaatagaccatatattgtatgatttcatttataggaaatgtccagaataggcaaacccatagaaacagaaagtagactaatggttgcctagggatggaggaggggaaatggtagtaagagactaatggggtgatttaaatgttctggaattagattgtggtaatggttgcatgcacagctctgaacatactaaaaaccattgaattgtatgctttgaattaactgtatggcatatgaattctattgcaataaagccatttcaaaaatgcttagaacagtgctcagtatatatttcacaatccattaatattatctattgtaaaatgtaacaggcatccactcttatctttctccaatgtgtctgagtctgaacccagaatatgggctcctgatttacctacatttatatttgcacattgtgcaattggcccattacaaggtgattcattg

SEQ ID NO: 1987 - DNA, 4001 bp, Homo sapiens
ttttggtttaggcagcctggataagcttatcacagagctttgaactgacattcttggatggcacaatagaccatattaccaggagaatcattcatgagcatcaaaaaacgttacaaccttcaaagaagatactttagtgccatggtttgcaaggcaagaagtgaaaagaaagagcatccaattctctatgcaacactgaaatctaatcagaatgtgtgcagatgcatttttaagaaagctatatgaagttgagctggagaaatacagtacctctacaggcaagatattttttctgaagaagataatccacatgagcttttaattgaaaagtgcataaataacactctgtcttgccttgttattcaaagattaaatcaattttgaattaatgaaaatgatttaatctgagagtgttagcaatctcaatttatttaggcctggatttaaagggctagcttgagagccttttgcaaacaagactcagctccataacaaaatcatacccaacctctcttttaaggctatcttctaaaatctgtgggttttgactctagaattcttcactcccccaaatcacattaacaatgtttgacatgatgacagggagagcaaaaagaattcatttctgccaaataagtacaggctacactgctgtttttatgaaaccttcctcctcttattccattttggtaaatttctaaggaatagttaaaatccgtaggacaaaccttggcttaagaggtggcctctctgccattttcatggctgatttgagacccattatgcactcaattctgcattgtgaaatccaggctggggacaaatttctgcctgtcatcttaggaaaggccaggagttttgcaccatcctatagtgtgaaaacagaaaatcaaagcctgcatagagctgcttgcttctttcctgatcagcttgctgctttttggagacaatcttggctgtcacagtgtcagactgggaagggtaatttagcagaataaaatatagtttaaatagcatctctccagggaaagttcctccttacactcaatattgaatatgcgaaaagatcatcagcaaataatcatttgatacttggctaaaatccattggacagggaaagcatttagggagcacaaaattcttttttaacctgataagaccccgaatcaggaggcaagaggcccggatattttccttatatttttcattctgttgcaatgacattctcatacaactacagtttatggaccaaatttgctgccctccccatcccaataatatgatgtaaactgcagagataaaaataccttatgagaatttttacaattttaaacagttcactgaaaatgtctgtatggataactctgttaatgacctctcctgtctaatgtcaatttcagaaaacaagtttccattgtaaatgtttaatcagtgtagtcccaggaacccagaacagaaaaccttatcttctcgcccaacttatttgctctgcaagctctttcctagctccatctcagctccctgcaaacactttaggcttttctctctcaaaggagctgggagctctgtaggttctgagctaggcagcagccctgtggtttgattccattagtctgagcccagatccactgcaagcaaactgcagcatttctgcttgcaaaacattggcaaccaggttctagaaccgccacatacactggctgcacatattctttaatgctgttctgcccaaaccttgcctgaagccagtcaaccatagcagaaagcatcctaccttccatcatggtggcagaattgcattccttaatttccaaggagtctgaaaaaacacaggaggatacgattccaggtcccagctaagtcctcaccacgccgctgctgaggtctattccgtccgctgtcaaagccaaaggagataagtgttaagccaaaagacaggccatggatgctgctggtgcttcttcacctacaggcaggctaccaagaagatgctgagagaaagggagaggaacggcaagctggccgagctgcaccgcctgcgctgcctcggccaatcccttcagctttggaccgcgtcacatggtagccagcctgcatctcctgacacaatacccccggagagcacacagaacctatttcccgtccccattcccctccacccccatcgcctcccgcttgtcaccaaatacacagccccttccccacctggtgacgcacttcccccgcccctcctcgtcgtctccttaagcttacagaagcggctgggtgcccgagattagttatcaagggctgccaccttaacaggggactctggcgtgaaagcagcacctaagtggctcgctgcggagggggttcttttctttttctttctttctttctttttttgtttttttaagaaaaacttaataattccgtgcagccggaaatcttagcaacacacttctaagctcccattccggtgtccttttaccctgaaggaattccaaatgtcagtgtctgtggcctccgtgcacatctgtgcgtctctctctctctccgtctctctttctcccctcccatccttcattcaagagagaaaaatcaatccgactgacgtcacatcataaacatccccaaaaggatgatgcagaagaaatttcaccccagctgccttcgtgagagccagggaattaattgcgcatgacatgctgaagggctgggaactgtcattaaaacaaagaaacaaaagaacccacccgagtggggctctggaatcaaactggcaacgctcgagatcgtttctggggcgggaggctggaaaggggagcaggcagggagcggaagcctgagcccgaccaaagacagctgtgcacgccggctccctcccactccaacctgggctcgccgtccgggctacagacgggaccctgcggggcgcccttcgacgaccgagttcgagtcccgccgccaccgcgtcctccccgccgagcgcacacgggagcggcctcgcttccccaggtggggagcttttctcgcaaccgactggggctgcagctgccaactgcagtctctgtaggaaacaaactttctcctaaatgacacgtttctccgcgacgcgcctcctgcatctggagtcgccttcaagcctattcattcacccaagtggaaacctggagggaggcagttgtgcctggttgtggcggagcccagggttttgaagctgccaggaatgggatctgggggctgtgtagttgcctaagtgggaagttgtgtcactgggcccggttgggttcagtctgtcacctgactgctctccagagaccatggagcctttcagaagggcccagccctgggggatctacgacccttggttcccttcaagaaagctcagacagcgaaggaagaaaagggcagggcagcctatgagagagagaaggcagagaaaaaggaaaggagatgggaggaaagggaacgccttctttagaactcaggaaaaacaacatcagaagtgggcatttctccctgtataatctcacagtatgaccaggagaaaagctgttacaatagagagcaattgtgagcatccaatgaaaatgtactcaaaataactggaagaagatgcatggtatgatcagggttgagcctgtaatgtattattaatcatttctattagcaatatactcatgaactttttctattgctcagccctggacatggcctagctctttctaccaaagcaaatatgacgtactggtgactgactgaagtagcatattaatagttgaaaagcaaaacacagctccttagcaatttagaagttttgaaaaacccattgttctccctaaggacacatacttcagtggcctctaaattttaaaatgaaattcttcagggagatacaaatacttgtgacttttttcttatgtctctaagacagttaaattttaaaaggggaatgaattcctaagtaaaacctgccttgagtacaacttacactgctctgaaaactggaggggtattat

SEQ ID NO: 1988 - DNA, 4001 bp, Homo sapiens
tcagattcctcatcctccaccatcccccaggcaacatctgatcacccgggcctgtcttcagctacaattctgttaggctggtttagccagaatccactttacccctgatgtttcctccgagtaattttctgtctaccgacagccacactgctccttggccataaattcccacttgtccatgctggattcagagttgagtccagtctcttttctgtgccgcaagagctcattgcagtggtccctgtacctttgtgatgatcctgaataaagtcttcccaaccataatttaacaagtgacattgagtaatttttttctttaacaagagacatttggattttaatttctgttacaggtataataaaaggttcagtggtccctactttacaaagaggaacatacataaagataggaggtttctagtgatttctgttcaggattgctttctaaactgggcataaacaagttccttcagctaggtctctttgatactgtggcctggaatttgtttttctttttctttttttttttttttttgagatggagttttgctcttgttgcccaggctggagtgcaatggcacaatctcagctcactgcaacctccaccacccgggttcaagtgattctcctgcctcagcctcccaaatagctgggattacaagcatacgccaccacacctggctaattttgtatttttagtagagacggggtttcttcgtgttggtcaggctggtctcgaactcccgacctcaggtgattcacctgcctccgcttcccaaagtgctgggattacaggagtgagccactgtgcccagccactcttttttcttttttttggacagagtctcactctattgcccaggctggagtgcagtggtgcaatctcagctcactgcagcctctgcctcctgggttcaagtgattctcctgtctcagcctctcaagtagccagtattacaggcacacgccaccacaccaggttaatttttgtatttttggtagagatggggttttgccgtgttggccaggctggtctcaaactcctgacctcaagtgattcacctgcctcagcctcccaaagtgttgggattacaggcatgagccaccatgcccagcctggaatttcatgtttaacttagactctggaaattccaaatgagttttaacacaaacaaattatttgagaaattcaggtctctgtttctttacctatgaaatggtgactgcttatgcttgccttgatagactactaggatgaaaggaaatgacgaatattgaagtccttcacaaatctaacaaaatgtgaaatatgattgtatttatagtttacgtattgcaagcagatgctgcagaataagtgtttcagattgaaatttcttgaagaacccctagccttttccataccaaataaacagatctctggaggacaggacctctgacatttgtaccttctttccatccctctgtacccctgtacttcctgcagcccttcccttcaccaccaccatgtccctcctgctgctgcagagtctgcttgcagggcctttacaccagggagagcaggcagatggaggagcatggacagatacattcctctcctggcagtgtccattacttctcattctactcattgagactccaaagtcagagtgaaatactgagggatatgaattcctgtactgtgtggcagccattgccacattcaacatacgatgtcagatgtgtgcaagatgaggctactcacgagacacagaggcacaggactcctggtatcgactcgctgtctcttaaaagaaagttgccatccaccccttccttgagcagcaaggtctcacagtcttgcttggtcagacgtccatggtagtaaggcagatccatggagaacgctcttgtatcccaggaagccctgttggcctgaaattcacccccaagtcaagggacagctctgaggagagatgtgtaagcagctgtacctcctgtggagctacctcttcctctagcggtctgtgggactcagccagcttcacaagattcaggaaatgaggagggcggggtgataaaatgaccaacacttttcaccctctaaatggcccacatgtgactcacagaagtaggtaaagcacatttaaacacacaatggaatcagtgatgctcatggctagggaggcaatgctgaagtcaagcttcctggaactgtgttgcagccttgtatattaccatggactatcatcaacttctttggctactggtatcctttccaggaagcacaccgctgcttttgctgtaatggtacccattttctgctgaagttgcctaggattgggctatgcttagcttagactgggtgctcaaaaaccatttggatgctgagagaattgatatgctcagatacaatgggaaaattgaaagggtgggatttccgtggatcaaatgacactaaaaatggaagacattaatggcaataaaaaacagtgggacactgtggatgaggacagcccattccatggctaaggctcccagccactggtgaaaaaaggccatttgaacaccctcaagcattgttccttttggagaaagggctggtgtaggtgggagggatatctgggtatactcatatatctacagaaaatcactatatatatctcaaaaatgttatctatgaaaatagaactatgtgctaacgattcatctttacttctcttaacttcttcttttttttgttttcttcatctccgtagtacctggagatcttaacttcttcttaacctagatgtttatttcaccttgctactttgcttaccagctgtttactcacagttgggtgtatcttctatggaacttccttgtaacagatctttgttcttccttggaattcccactctgcatttggcatagtgcagtttcactgatcagggaactcgttatcagacagatatgctctcaaatagcaacttttcttctgtggttttggacaattcattattcaattctctggaaactatggcagttgaagacagagttgttaataatgaaagaagaaatttggtatttcttgtgaataaattcacaatcgtggtgtaaagatgctttttgacataagagaggaaataactgaaagcatgctcaggctcttggtcatcacaggggcttccttgccctttttgctgtttcaaaatccaaccctcacaataaaagaaatgcaaattacctgcatgctgagataacaactctcacctatcatatgggtgaaaatcaaaagtttgaaagcttattgggttggtcatggtgaaagaaaatagaatatcttgtatatcattagttggaataaaaaatagttacaactatagtaaaagatggtttggcaatatcttgcaaatttatgtatgccttcaccatctgatagaacaatctcagttctagaaatctgtcacaaaactacacaggcagaattagaaaatgacttgtgaataaggtagtattttttaatagaaaaagattacaaacaactcaaagacttgtgaatagagggacaggtgaataaactgtgattcatgtatacaatggaatattactatagaataataaaatgggattgaggaagatctctatatgctgatatgcaataatcttcaggatgtatttttaggtgaaagcagcaagatgcacaatagtatatagagtatgggggatataaataaatatatacatttataatatttgctcatatttaaaaaacaaacgaaacacccactggaagaacaaaactaaaactaattaaaactaaaaacttctgcctctaagaggagagcggaaacatgcatagaggtgagacttctctcagtaaaacttgctgtagagttgttggttttttgttttgttttgttttgagacagaatctcactctgttacccagtctggagtgcagtggtgtgatctcggcttactgcaacctctgcctccctggttcaagcaattctcccacatcagcctcccaagtagct

SEQ ID NO: 1989 - DNA, 4001 bp, Homo sapiens
atctcccctggagagatgcctcagtgaaaggctaggaaaactctgggagtgggagcctggagtgggcgcctccatctactccagactggtagaagtgggagccttcatctattcctggcaggtggcaggacccagacccaggacttgccctgcccctgtctgggccaatttcctcctccatgactcacctccgggtgatgaagccatggaaccaggcaggggctgccccgtgctgcaggagccagtgggcctgggtcttctggaaccaagcccgggtctcggcctgcaggaacaggcttccttctccaggcacctcctctgccctctcagcattccctgtgttggaggcagcctccggggcctggggagatgcctggatcagggaagagttcaaggagggggaagcagcatgatgagtgggccttctcctgactttgatccacctgccaccttcttttcctcatacccagcctctcctgtctattttagggtacaattgcccagaaagtccttcctaaagtctaacttaaatcccttcttcagctccagctgttctggcttccagagactctccttcctttgccctctgggtcctgagggcttttaatccagcagcagtgagctgtcacactgtgctctaggaggggcgggaaaggcagcacagccttccagatggacagagtcattccctggcctggaggatgaagaaacatgatgcaggaagtcaccctagaggccagaatgagggagggcttacttcataatatgagggactgacctagttcgcagggaaaattattgactgggcaggagagaaggactgagacgggaatgtggaatgcactgggcaaatggtcactgacacagagtgcagatgcctgcttctgggactcaatgcactgcaccctggtcatctgcggactcagcctgagcttccagagggcctaggagcagtaagggagtgagtgggcaactcggcgcatgaaggaggtactcctcattttcgttctctctctctgtgccccagcccgttggcagacccggatcattcctgccttctcttggagtggcctttgtccatctgcaagtccttccccatgggagggtgggagagatgagggagctgcaccacgctgccgccccaggtttccactcaccgcagtgtagcccaggttctggcagctcctgcgggtcatgtctgtgatctggaaggtgctgaaggttgggatgggggcttcgtgactccctgtgagcacaaagagggctgccggggtttctcagagaggaactatgtctgtctctgcctcccacccctcctcccaggctcaggggatctggagggctgggacagtcttaacgacaggaaaaacgcagaagggcagcaggggagtttctcaggcatgaggttaagtagccaaggcggcatggggggctaatgctgccagaggaggttgtgagggacaccaggtgcctagaaggagaggctgggagtcaggctggccttcggatggtcagggaggcagatcacttcagggcaggcccttcttctggtccaggatcttctgcctccttctcccttcatcctcctgctccctcctctctcctctctgagaagccctcaacaaaccctgtcacctttatcctcagggatgagtgggcatggagccccaggcagggttgtggtcaccctgccaatcagctttgccagctctggcttagggtggggcccctcatccctgaagtgggagctcaagcccaggagggagggcagggggatgggggtctttgtgccccctcccacccatatccttcaacttcacacttaccttggggacatatctgggccagggggaactccatgagggcagcctcacaagggatcccagagcagggtgtgtgtatgtgttccggaaaggtgtgcacactcagcaactcatcatctctcctctcaccctggccccgggggcaggaaatgtcgccttacccacagccttagttctggcgaggactcacgtcatggaaagccttaagacgattgtcccacccccggaagccacgcagctgtagatagcggtggtatagcggtggggggtatctgtgtcactctgtgtttaggtgttaggaagcccttactgctgcctgaccttcatccctccagattctttctctgccccctcaccccaaactagaacttccctttctctctctctctctctctctctctctcatctctcttggcttctatttctttctctctggaaaatctcccactctgcctcttggcctgttctgagcagtgggaatggggatgtcaacctcaaggataagccacacaaggtgcttatggatcatgctttgaggagacatgaggaagggagggggcagggctgcaacaggaaggatgtgggtcagacttctggaaggactttttgaggacatgtgaaatctatgagtctgggcatggtggctcatgcttgtaatcccagtactttgggaggctcaggcgagagaatcgcttgagcccaggagttcatgatcagccctgggtaacatagtgagagcccatcactatttttaaaataataataataatagtaataataataaagaaatctataagacaaggggttagagaggagggggcctggcttccatcattcagcagataatggagctgagttagggcaaaaccaggcaatattggaggaaggaaagagaattcctccagctaagcaggtcatcattagtatcaacactatcagcagttgtcattaataacatcagtgttgacatcttttttttttttttttttgagacagagtctagctctgtcacccaggctggactgcagtggcacaatctcagctcactgcaacttccgcctcccaggttcaagggattcttgtgcctcagcctcccgagtagctgggattacaggcttgtaccaccatgcctggctaatttttgtatttttagtagagacagggtttcaccgtgttggccaggctggtcttgaactcctggcgtcaagtgatccacccacctcggcctcccaaagtgttgggattacaggcgtgagccactgcactggccagtgttaatgtcttaaactttcaatgtgcttagacttcccaccataccaaaggaccaatcccatttctctctgaatttatcttcacaaactaagaaggggacaggaacattatccccatttaccagaagctcagaggagtgccttggccagggtctttcagtgtctgagaagttggtgtgagtgctgggactagaaggtagacttcctttcactaatttcactgtgatttaggccaaaggttcatgactatgtgctatgcactgttcttggtactgagaacccagagaggaaaaaaaaaactttgtttcaagatgtcagatgggggagatggacttgccaagacttactgttttttaaaaaattgtgtactgtttttttgcttttaaaaacatgctctaaatttttaataatttttggggtacggttgggttttggctacatggataagttacctagtggtgatttctgagattttaatgcacctggcacccaagcagtgtacactgtccccaatatgtaaccttttattcctcacccaaccttccccccaagtccccaaattcccttatatcactctcatgcctttgtgtcctcatagcttagctcccactaataagtgagaacatacgatatttgattttccattcctgagttactccacttagaataatggcctccagctccaaccaagatactgcaaaagacattatttcgttctttttttggctgagtagtattccatgatgcagatataccacattttctttatccactcattggttgatgggcacttaggttggtttcatatctttgcaattgcaaactgtgctgctataaacatgcgtgtgcatgtgtctttttaatagaatgacttcttttcctttgaatagacacccagtagtgggat

SEQ ID NO: 1990 - DNA, 4001 bp, Homo sapiens
gccccgcccctcccgagccccgccttgtgtcgcccggcgcggggcctcgcccctcacctgtaagtcagcacgaaggtcaccgcgctctcgctgaaccgcaccaagtagcacccctgaggcttgggctccagcagcctctctgcctccctgtgggtgacggagagagggggccgaaccctgctctgacacttccagcctcgcctctgtctccccggctctcacgaggaacccctacccccaagcaagcatgctggagcggctagagaaaggctagggcggagatggggagagagagcacgtgggcgctgctctcccgctgcagggattaggcgtggacaggggccaggggtcccattcaggagacccccgcatcctcccctggcctcatcctgaaagggcagcctgcaggggctgctactgcagctacagggatgggaaagtagttggacttccagatttcagaagtcaaagctgaactgaggaggtgaacaaagagttagggagaaatgaggctgagaaatggaggagggagattctgcaagggtggaagaagagagggctgggagataaagatggagtaagcctggagggagagagaggtggaaaataccagcattcgaggccttagggacaggaggataatggggcctagagaggggaagctgaggtacacagagggctggactggagcctctccaatgatctcccctggagagatgcctcagtgaaaggctaggaaaactctgggagtgggagcctggagtgggcgcctccatctactccagactggtagaagtgggagccttcatctattcctggcaggtggcaggacccagacccaggacttgccctgcccctgtctgggccaatttcctcctccatgactcacctccgggtgatgaagccatggaaccaggcaggggctgccccgtgctgcaggagccagtgggcctgggtcttctggaaccaagcccgggtctcggcctgcaggaacaggcttccttctccaggcacctcctctgccctctcagcattccctgtgttggaggcagcctccggggcctggggagatgcctggatcagggaagagttcaaggagggggaagcagcatgatgagtgggccttctcctgactttgatccacctgccaccttcttttcctcatacccagcctctcctgtctattttagggtacaattgcccagaaagtccttcctaaagtctaacttaaatcccttcttcagctccagctgttctggcttccagagactctccttcctttgccctctgggtcctgagggcttttaatccagcagcagtgagctgtcacactgtgctctaggaggggcgggaaaggcagcacagccttccagatggacagagtcattccctggcctggaggatgaagaaacatgatgcaggaagtcaccctagaggccagaatgagggagggcttacttcataatatgagggactgacctagttcgcagggaaaattattgactgggcaggagagaaggactgagacgggaatgtggaatgcactgggcaaatggtcactgacacagagtgcagatgcctgcttctgggactcaatgcactgcaccctggtcatctgcggactcagcctgagcttccagagggcctaggagcagtaagggagtgagtgggcaactcggcgcatgaaggaggtactcctcattttcgttctctctctctgtgccccagcccgttggcagacccggatcattcctgccttctcttggagtggcctttgtccatctgcaagtccttccccatgggagggtgggagagatgagggagctgcaccacgctgccgccccaggtttccactcaccgcagtgtagcccaggttctggcagctcctgcgggtcatgtctgtgatctggaaggtgctgaaggttgggatgggggcttcgtgactccctgtgagcacaaagagggctgccggggtttctcagagaggaactatgtctgtctctgcctcccacccctcctcccaggctcaggggatctggagggctgggacagtcttaacgacaggaaaaacgcagaagggcagcaggggagtttctcaggcatgaggttaagtagccaaggcggcatggggggctaatgctgccagaggaggttgtgagggacaccaggtgcctagaaggagaggctgggagtcaggctggccttcggatggtcagggaggcagatcacttcagggcaggcccttcttctggtccaggatcttctgcctccttctcccttcatcctcctgctccctcctctctcctctctgagaagccctcaacaaaccctgtcacctttatcctcagggatgagtgggcatggagccccaggcagggttgtggtcaccctgccaatcagctttgccagctctggcttagggtggggcccctcatccctgaagtgggagctcaagcccaggagggagggcagggggatgggggtctttgtgccccctcccacccatatccttcaacttcacacttaccttggggacatatctgggccagggggaactccatgagggcagcctcacaagggatcccagagcagggtgtgtgtatgtgttccggaaaggtgtgcacactcagcaactcatcatctctcctctcaccctggccccgggggcaggaaatgtcgccttacccacagccttagttctggcgaggactcacgtcatggaaagccttaagacgattgtcccacccccggaagccacgcagctgtagatagcggtggtatagcggtggggggtatctgtgtcactctgtgtttaggtgttaggaagcccttactgctgcctgaccttcatccctccagattctttctctgccccctcaccccaaactagaacttccctttctctctctctctctctctctctctctcatctctcttggcttctatttctttctctctggaaaatctcccactctgcctcttggcctgttctgagcagtgggaatggggatgtcaacctcaaggataagccacacaaggtgcttatggatcatgctttgaggagacatgaggaagggagggggcagggctgcaacaggaaggatgtgggtcagacttctggaaggactttttgaggacatgtgaaatctatgagtctgggcatggtggctcatgcttgtaatcccagtactttgggaggctcaggcgagagaatcgcttgagcccaggagttcatgatcagccctgggtaacatagtgagagcccatcactatttttaaaataataataataatagtaataataataaagaaatctataagacaaggggttagagaggagggggcctggcttccatcattcagcagataatggagctgagttagggcaaaaccaggcaatattggaggaaggaaagagaattcctccagctaagcaggtcatcattagtatcaacactatcagcagttgtcattaataacatcagtgttgacatcttttttttttttttttttgagacagagtctagctctgtcacccaggctggactgcagtggcacaatctcagctcactgcaacttccgcctcccaggttcaagggattcttgtgcctcagcctcccgagtagctgggattacaggcttgtaccaccatgcctggctaatttttgtatttttagtagagacagggtttcaccgtgttggccaggctggtcttgaactcctggcgtcaagtgatccacccacctcggcctcccaaagtgttgggattacaggcgtgagccactgcactggccagtgttaatgtcttaaactttcaatgtgcttagacttcccaccataccaaaggaccaatcccatttctctctgaatttatcttcacaaactaagaaggggacaggaacattatccccatttaccagaagctcagaggagtgccttggccagggtctttcagtgtctgagaagttggtgtgagtgctgggactagaaggtagacttcc

SEQ ID NO: 1991 - DNA, 4001 bp, Homo sapiens
ggggctcccgggggaccagggagggcatggagctcactctaatcctggaaacagacattacccaattccaggcacaaaacacccacttgtctctttggggcagacctgcttttctgaggctttacactggagtctggctgggccagcaccttccgaaggggacacacttggaatgaggctggagctgtcctctgaggttttccaggtggccctgctcagagacaggagactggatgggctgacctgcctcgtgggtcaggcgcagaagccctctggggcactgcaccatagctgagttgtgtcagggggagaccaccagcccgcagaccctgggtcagcaaagggtggctcagaggagtgaagtcacttgcccatagtcacacagcttcagtgggagagcagggaagcaaatccatgtctctggagctgtttcctcaggccatggcggtgcctttctgctcggactcccctcccacagataagtagggtgtccactcttggagtttggtgggggtccctgccagtccacgaggaggtgaggcaaggaagccgctggctggcgaactcaggtgctgcctcctggccggagggtctggggctgccagagcgcccagtctactcccactgccccaacacgcgtccacctgccctgggccacagggtcgggaaaacccaaggccacccagccaggggtcaagaacttagattgtggggtctaacatggttggctggcgtgaccttgggcaagtcacttaagctctcagcctccaggtcctcagctgtagggtggggatcccccagcactacctcctggggtgctcgtagctctggtccttcttggaatgtttccgaggctgactgtgtgtcaggccccgccgccggtggacgaaggtgcccgccctctgggggcacccagctggggtggtggaggcggcatggggggtaaagtgatgagaagagaacagcggggtgaggagaaggcgaggtgcgtgcgtgtgctgggggtgctgcttcacggcctctcgaaacaggcgacacgggagcgggaagcgctgttccaggggcgggtgggccgaggcccctgaggggcgggcgcgggggtgcgaagcgctccagagtgggctgccggtcccgctgcgctacctcgctcggggcgctgcggggaacggccaggggccccggcagagtccccggacccaggagcgtgctgggctccgctgcaggggacggaggaggctacagtggcagggagggcagatgacgacggagcgggtgacgggcgcccctcactcccgagaccctcccgcgcccgtgtcagcgtaccaagccccccgcccctgcccggctcccggcgctcgctcaccgcctctcgagtccggtcccggccgctccggcccgcgacccccgcgtctcccgccgccgcagccccgcgcctgggtgcccgcttcccgccgcccccgaccccggtccccgcgcccccacacgtggccgcgggaaccgacccccggatcacctggcggcggcgacccgcctcactcaccaatcggcgcccgcggagccgctccgctcggccgcaccacccaatcagcggccgcgaggggccctggcactgcccacgcccggcgctccgcctggaagggcgggaggggctcgcccggagctcagaaggcacctcctcccgggctgggggcgctgaatcccccgcgcctcactcacgggtccctcctcctggagggcctctgcccctcccctctctggctggctcctccgcgtcatccgagccgcggctaccgcaccgcctcctccgggaagccttccacgaccaccactcacgcttcattctctgcagagcccttgtgactccgttgctcgcctgtcatccctctcctcttactcgaggacaagtgacactggaccggagtgtctccgttcccagtgtgaaggatcgagcctggctcggaggaggcgctcagggtggttcgggcccggcccttgtgagtggagggtcgttgcgcatcctcctcctcactttcttcctgccgggacgttctcagccgggaactgacagatcctgcttagcccggggcccagcactgagaaatctgggaaggaacgttgctcaccgcacatgggccgtggccccatccttcgggccctttaggtggggaatcgggctagcagctccagccacggcactgggacggggagcgctatcgtcccaggagaccgggcgatgagccaaggctgctgtgtatccaacctgacatctgcaggaaacccccccggaacctgcccatgcaccacaccacagagaaaccaggacacaggggctcagggccagtgggggcgcaaaggctgcagaccgggagcggggcaccctgacaggtgggcacagcgcagagggcctgagggcccctggagttccaggggaggcgggtttgcgccaagaggccatgctggccactcctcctcaggggatctggaaacccagaggcagcagtgaggcgtggccccaaatctgggctcttcttcttacaaacgtggggctttgggcaaacgccttcatcactttcattctttgagcgcctcgtgtggaaaggagagttactaacgcctgactcacagccacgtgaggattccaacgagcaaagtgcgtagcgcagtacctgacccacaggaagtgaggcacccaataaatattagctgacattagaccttacttttagtcttgattttcttttgtatgtgacagtacagcaagggtttgtttaagatagggtatgactctgtcactcaggctgcagtgacagtacagcaagggtttaagatagggtctaactctgtcgcccaggctggagtgcagtacagcaagggtttaagacagcgtctgactctgtcgcccaggctggagcgacagtacagcaagggtttaagatagggtctgactctgtcgcccaggctggagtgacagtggcacaatcacaatcaatgctcactcctccatctctcaggctcaagtgatcctcctgtctcagccaccaagcagctgggactacaggtgcatgccaccacacccagctaatttttttgtttgttttttagtagaaacgaggtctcactatattgcctaggctgaagcaagggctctttgacttctagatgtaagtgctctgggcaacacttcaccacagccatctgccagccttgagtccagtgacaagagggaacaagatggtttacaagtcacccctattctctgcaaatccagtttattaaacttggagttcacaaagaataaacggttaattcctagctttcttgggtgggggcagggggagaaaagcgcgtaagttttaaatagaggactcgacaatttctagctccacagtccccgttttgagaatattcagagacagcaacacgaggcaagctccattaaatactaactctaacaagttttctgatgcatacaattcattctgatacatgcaatttttaaaatagtggcaggaatttgtttgaggtcaaaatgacaaaagcttaaattcagataatgaaatagtcaaaaccagagggagaatcctgctttctaaacctttctcagaaggaaacagagggtcaagatttgagtggcaggcactgtgctagatcccagggacacagagatttacaataaaacatacaaagcgctgcaaaaaccagatctagaggccgggtgcggtggctcacacctgtattcccatcacttgggaggccaaggcaggtagatcacctgaggtcaggagttcgagactagcttggccaacatggtgaaaccctgtctctactaaaaatacaaaaattagctgggcatggtggtgggcgcctgtaatcccagctacttgagaggctgaggcaggagaatcgcttaaacccaggaggtggagattgcagtgagctgagatcccatcactgcactccagcctgggcaacaagagcaagactccgtctcaaaaaaaaaa

SEQ ID NO: 1992 - DNA, 4001 bp, Homo sapiens
catctccagaaaccactggtccatacaggtatttgtgtgtcagacatatccaaacacatgcactaacaaacacagaggtgacagtcacaagagaacagctcagccacccttcccacagagcagtctcagcacagtcacaactaccaaccttgcccagggcagggacccaggaggcccaggccacaaccaaccagacacagtgccaatggaacaggacatcatttaattgcctctagggtcctcctgggagagggactgcggggcctttggcagagctctggctgatggaaccaacagaggtgcccatcagccagtgccaggcaggatggcggccccaatgcttggctgggggcagccagcatttggggctgttgcttaagacaatttctgagactaatgggtaaggaatgttgcctttagatggaggagaggggactacatttagagaggagggaggagaagtggcctgcattgggggagggactctaaggttaggttaggaatgacagggagttggtcaaaaggtccttcatggccaggtgaaggctggggggagtgtggtgatggagtccagcaggggaactctggacaggcttgactcaagccagcttcaggaactcctgcagcgtgttttgttccacagcctccacgaagagctcatagtcctggagaaggggaggcgaggggtggtcacctgaatgcagggggcccaagtgctttgtggcagatatgaccctggctagagtcctcttccaacactccccccacccccccgtcccccagcccataccccacagtactggtccccgttgacaatctggggtggggtggccttggggttgcctgccaaggctcgcatctcatccctcagggcgttgtcctgggagatgtccactagctggtattggatgcgcttcccatccaggattcgggtcacctcgctctgctgggacttgatctggggacagagggtgggtaggggttagtggataggctggaggatttatgggggaaatgctgggcagggtgagagaggctgtgaccaggagcttttgtccccccattcccctccacactaggggagggttctggcctctaggagttgggaggatgagtcaggcttgaggtggtgcaggatgaagagagggattatcagccacgggggagggggtcagagtgaagggaagtgggatcaggctcagggtggggaggggaggggagggcaggctgcggtcgtggtcagggtcagcccggtagtgggagtgcagagaatgggtgtggggttgatgggggatgggcacgggaagttcatgccgcggctgcaaaggacccaggatgcccgatgaagacattcaggatggggcctcgggaccgggtccgggagaccgtgcccagcacctcgccgacgcactccccccaccccgcccccgtcctgggggtgggtcccgggcgctagggtccaaagcaccgggatacagccctgcgctttcccccagcgccagtccgggcgcgcacttacttcgcgggagccggtgaccgacgtgctgtagacgcgcaggccgctcatgctgggggtagacagacgggccggcgggcagagggcggcggtagcggcagctgcactgccgggagacgacgccgccgccgtgctcgggagcggtttccttcctgctccgcccgccaagtcatcgcgctcgggaccaatgggcggcgcgggcaggcggggtgggacctgcgcgacaccgccccgcacgccagaggccccttcccttccccctcggttaccaggcgcgcaacggacccgtcccacgcagggcgccccttctgcggctgccctgatcgtccttttcggcccttccctgatctggagctcagtgtgagactggggaggggcctgggtggcaggacaggcccgggagagggtctggcagaagcctccctctccagccgcacacaggtttggtgcatccaactccccagccacgagagccgctctctccaggaggaggtgctctaatagcacagggaagcttggggctttggaaggtttgagctgctttcagacccaaagttctctaagaaccttgctccaagggatccctcgctccaccacccaacacgcaccactaaccctaggggataggaagcataggacagcaggaagagcccatgcttagagattttcccccaagttcctctccactcaggtgggaaggtttagacaaggaagggtgatagcaggacgcagaggccacaccctcaaggaaccagatggagaccaaggctgacagctggaaagcgtggcggtagaggatgatgtcaggactcgagagcctaggctcaagctgacccttaagatccaccccaggtcttggggtggtccaagctcaaccccagctccatgctgcagatggcattcccaaactgctactactcccagcaagaattcagcggttgagggggcagactccagcaacgagcccaactttggagacctagctgtctggcactcaacatcatgcttctcagatgtccccctggtccagggctcaggcaggttaacagcccagaaagacaacccttgctctggtaaagccacttcctcacagcaacccagaggctgccaacttcctgagaggactgctgaaactttccagtgacaaacttctgttatgactcagggaaggtttgcccaagagaaagtgagtgggaagagatctggttctatagaacgacagaggagcagaggtggcagagatagatagggacatgaggctggctggacctgccaaaggttcctccacgctgctgcctgggggacctggctgaacacccaggtgtttggctctaacaagccaaagtgaggggtagaatagcgtggtggtggtgatggaagggtatggaaaactgaggagtctgttaagatactttattttataatcaaaatacgcaatacaaacaaatggacataacaaagattcatataaataactggttataaactttatgaggaaaaatacccgtcagcatggtggctgggctcccaatgcacagggtggagaccaaccaggcggctctgcctttaagcagcaggagcccagaggctgaagggctggctgggtggggctgctctgaatggaagggataagtcactccataaataaaacacaaacttgtaaaaacacttaagaaagagcctcattcaggcccaggcatgaggtccaagatgctgccaacagcccaaagcttagcaaaaatcttgtagtggctgactggcccacacgtggcccctgcctggcctggctccagatctagaggaggcacggctggcccaacaaccagatactaacaagtgtgagatgctccctaaaccaggaggcaagaaaaaccagagggcaaaggtccctcactaaagccccagagaaacaacccaggaaacactaaaagctgtactttaaagctgacttgtactgggtactctgaactttcaaggaggccagagcaggaaagggaaaggaataacccccaccacccccaacacaagagaggcacaaattagagggctgggcacaggctgtagccctgggtgagggggtaagcagcttgacagttgctctgtggtctctgggatataattctgcccaaggctagaaccacagagaagagtttgcactcttaagtccaggaaggggactacctggaaggcctgagaacaaaggagaaagtttagcacactaaacacatggccaggaccctagggacacaaggcagctggagagtgggatctcttgttaaatggcatggtaggcagattagagtcctggctataatccctagggccccaatcctagtagttacgtgctaaccaacacattaccctgaggcttctgggagaacaagagccctgaggaagaagcagtaagaccaggcatgagaaaacccagaaagccagctcagttcccaagaaggctggcacatggggcctgagaattcttaaatgg

SEQ ID NO: 1993 - DNA, 4001 bp, Homo sapiens
acccagctttgattggccaggcatctcttccacatggagttggtcttcctcactgactacccccaggtctcctacacaaagatctgcctgtcctaccaactagattgtagacactccaaggcaataaactgctcttccattcctttaggagacccactatcctgagggccaggtatgtatgttactaaggattggccacaacaaaagttacaaatccttgaacatatggggtttctttatagatctaaagttgatgctacctttataacactggaaaggtctcactgtttacaagggtgaaacacattatcagagcaatgtgggccgcacatccctggaaggtaccgctgagaaggtgagaaaggggaaaagattctctcactcagcctcaaaactgtcccccagtatcaaagtcatctcctctcacacagcatccctaactaaggtggcagcccctctgcttatctggaaagaagtacaacacacctaccctccactgacctaaagtgtgcctcctccatctactgccaagtgacactttgctccttcagtgaagctttcagcaatgcctcccaagcactaaggccaggcctttctctgcactccatcagcacttcagacacacaactcttttggaacttgttacattaccctgcaatgatttgttgacaaacttgttctcctttcctgccccagcagactggggacagagtaagtctaagccctcattcatccaacactcttcagggaggctggaatctgggctctccttctctccctgctctcagtgctctcacctgtattctaggatccagttcttcctcctctcttggggacaatttggcctcactgctgctgcttccacctcctccaggctcttctgcgactgggctcctagggacttcatcctctacaacttcaggccgcagctccccctgtggggtctcccgccctcctggaacctgtctgagctcagccatgctgacagggggagggcagagccctatgcacaagagaggactgacatgctgggaccagggccccagcttggggcttcctgggctctagatggccaggagaagagtttctcttctcaaaaggcagaaaaggtgggcacaggaagaacctcacactaggttagaggttgagattcaagttgtcagtggggttcctagagctgaagccttgtctgtgcaaaagttcttcccttcccgccacagggagtccactgtgacaaacccggagcaacagctccaaggcagggggcaaagggggcttggatcctggaccgaggcctgctaggaggagcaccattcgggagggtggaggcaggcgcctccaggctgtggtggcagctggagagagaaggctgggcccgagctgaggctgtaggatgagcgtctctggggagctgcagagaaacaaaggccaagtatatggtcatgtcagcatcaaaaccgcagccaccagccccttccaactctacagcctcccaaaaactacactctcaccacgcccccacccatgtattccgaccagtccctacctcaacttctctccttagccctcaaggactttagattctactcttcccccgtcccagctcctctcgacccaggccctcctcaaccagcgccttcgagactttcctctgcacccctaggctctcctccatctcctgtggtctcccgctcgtcccactccaccccagcccggctttgcgattcaccttgtaaccccgagccccaccccaccttctctgtccaacccgagacatctaagcctcccgtctccaattccacactcttccgcaatcccaaggaccctactcccgtccattctacccagccatgcgcaaaagccccccgcacagccttacctcagtttaccttcccgtccgcggagcttctatgctgcaaacaatctccccccctccctccccgcaacaagccgatccaaccaaaaacgaccaggcagaccagaagcggaaatacatcatcggtgaacaacgctctccctcccacgctctctctcaagccgggcctcctcgggaggcctcacactcccccgccctgccttcagtttccgtacaaaatggtgccccacgttgctcaggctagccgtaggttgcctccagaccatactccaccaaggctgaatgaaagaaaaacatgagaatgtggtgctgaagaaaattagggcgcgggacggaaatcgagagtaactggtgagaagaggaatactagatataaaacggagataatagcctcagagtgagtagtgccatcttgctttacggagctgcggcggcggctgccggaaagccacttccggcctgctccacggaggcgggcgcgacgccgaaagtgagctggtaaacttccggcagtggctccgggggcaactcgagtccggacgctggcgggcttcgcgggcgaaggcaaagtcgatttccaaaagtgactttcctcactcccgtgaagtcggcggaaccctccactaacggcgtctgagcggacggctccgatgtgtaaatcccactcctcgaggcctctggaccttgcaccttgaacgacgttttggtggggtcaccaattgctccgtgaatactaaccaggaacttagtcaacattaactcagttaattcactcgtgcacccagggtcagatgccctcgatgagcaggagtttgttacatggcattgtgtatcgttacctaggtccctgagcgagcgcctgcttgtcacctctaggtgtcgcttggtgaggggagggcctaggcctaaggggaagggcttcattcagggttggatgttttgtttttacaaaaggcgtaacttcctcagagtcaactcaaaactttgccctgcagatggaaaaggcaaatgggctgaattcccctcctttttggatcctgtcaaagacaacccagctagacattgaagcagtgaaaaagacttttttcagtaactacttacagaaaggaaaagaactgacctctgttccgatttgtacagaagtgactgggcatttcaaagggagaatgaaggaaggaaggtgatcagggctcaatagtgttggagaagtgaaaaattacagatttgattggcatagatgcgattcggccagatgtgtctgctagctagcagctatagaagttagagtgcttttttatgtatttatttattttgagacggagtttaactcttgttgcccaggctggagtgcaatggcgcgatcttggctcactgcaacctccgccccacccccacccccgagtacaagagattctcctgcctcagcctcccgagtagctgggattacaggtgcatgccaacacatctggctaatttttctatttttagtagagacggggtttcgccacgttggccaggctggtctcgaactcctgacctcaggtgatccacccgcctgggcatcccaaagtgctaggattagaggcgtgagccaccacgcccagcctagcttgctattcttgcactgagattgggaggtagaggctctgcccttcttgacgatcaatttcaaaggaatggctctcaggtcctttagaaggacctcttgagttgtagcagacgcataaacaccttaaagagaagaaggaaggattcataatggtaagcccttaataaacgccctgagaaagggaggtcaggagcctatcatcaggtgttggctagaacaaatagtaaattctcctggtagcattgagctttctcaggcaggcattttcatgggggagctggggttctcctagggacatgatctgacactgctagaaggcatgctaaagtttgtctcttagtaactcagaggtttggatggagtcatgtgccaagagttctacagttctcagtccatttcttctatcccttcatcccatgaataacgatttttttaaattgagcagagcaaaatatattcctttaaaagaggtgattgaaaacagatttttccattaaattggaggttttgttttta

SEQ ID NO: 1994 - DNA, 4001 bp, Homo sapiens
aggtctcagtcaaaatttgtttcatgcacaaaattattaaaactactgcacaaaatcaccttcaggctatggcttaaggtgtatatgaaacataaatgaatttcgtgtttaggttggggtcccattcccaagctatctttttttttttttctttttgagatagagtcttgctcttgttgcctaggctggagtgcaatggcacaatctcggctcactgcaacctccgcctcctgagtagctgggattacacatgcatgccaccacgcccagctaatttttgtatttttagtaaagatggggtttcaccatgttggccaggctagtcttgaactcctgactttgtgatccacccgcctcggcctcccaaaagtgctgggattacaggcgtgagccaccgtacccggcagctatctcatgtatatgcaaaaattcccaaatccgaaacacttctggtcccaagccttttggataagcgatactcaaccggtattagaatccaaaaggagcccccacatgtctaggtccaccctcatttagtgaccctccagctaggtccggagagtgcccatgatccccacctttgtccaaaatagcctgcccctgccacctgagtgtcttggctctgtactcactgggggtggtgggagtacaaagttgtctggaaaaactcctcttcgtccttgacactctccttcccaccagcccttatcctctgtggtctggaaaagaaacacgccagtggggaggtgagccaggtcccccaaggtcctttccggggtcccactccttcttatggatataatttcaacgtttattttagattcagggggtacatgtgcaggtctaccctttctcaacaccggcttccctgggcccccccaccctgttcgtctcacaccttgctgagtacttttaccacgtcccccctccgcagcgccaactcgtctggggcctcaggctggtagtcaaacaggaccctgtagacctcagggtgggagactgggaagaggtcagtccactgtcctctgaagccaagcctcccccatccatcagcagcccccacctccatcagcctagctggcccaccaagtcacaaccttgggagtggctgagggagtgggggaccctttggatgggtgctcacctgtctgcaggtagtctggagggctgtcataggccaggctgctcagctagtgggggaaggggcagggaggaactagatgagcctccaaccaccccaagaggaactcaccacctctgtgcctactctgagccaacttaccttgggaggccgctggggaccagggctgactgaaggcatgtctgggttaccaaggcctagtgggggacagtgaggttagggagggtgctaattcacaggttaggtcatgggagagggtcagaggggtcacagggtcaggatatgtgaatcacaggctcatgccactgggagggtcattggagattgcgagtcacagggtcacagagtcgaggtctcacttgggggcccactgtccagcaattccacaaagttggatgggaaggctcccagctgcccgttcttcttccccagccaccagccgtcctcaatctggggagaggggaggacgcagaggcgtctggttctgccccaagagtccctaggataatctgccacccttggttctgcccaagcgccccttcctccctccttccctcccgcgcttccccgtatctgcaccgtcgccattcccaccgtccacaccctcacttcccaccccgctcactagggaggcgcgttccatcatcctcccccaaacggtcccatcacctcacccctcacctcctttatcatttccacgatctccccagcttgcagcttcagctcgtccgcctgctctgggctgtagctgaagttcactttgcaccatctttggggcctcgggtgtttggcaggatgacctagcaccggacaagcgcggctgagctccagtcggacgccccagtcagaggagctgggggaagcgcaaggcgcgcacgtagcctttggtccctccagccccgccccagggcggagcattgcactcgagaaccaatcacagaccgcagggcggccccgaggtcccgcccagagccgcgcccgtcactaagagccggagacgccggggtcgcactggctccgtgcacccgcccaccggcgcccgtccccgcccttgcgctcacctcggcggcgcgcacagcgcggcctccgcgcctctccggagccccgcagggtctctgggatctcctgggaatcagggcacggggaaggcgctctcagctcccggggggcgcgcgctgagaccccacagcccgcccctggctcggcctcacctgcaccaggcgctcggggaagaggccatagcggcccccaaactctccgcgaagccagccccgcgcgggcacccagcgcacctgccggaccacgtccccgggcgccagactcagctcgtcctccttctgcgcgcggtatccggccaggacgaggacttctgcgggcggaagacggggccggcgtgcggctcagaaaggcccagccgggcagcctggctagggcgggcgtgtccccaagcaccgtagagggcagcgggggtcggggggtggtgtgggctcttgctatgtccacggttgcagagagaggccacctcaaagcctccgcacttacccatggtttccggggcgccctccagagcctggcagctccctctgacggccgagtactgggcccgcgcagggtgcgacctgaggcaagacagtagggtaaaggaggcgtagccgccagccgataggtcgggccaggtgctgggagtgggtgtggagagggggcggcccggctcagcaggtccggcccccaaccccggggtgaggaggactccagggtctctggcctgtgcagcggtcacagctccgtcacaggttcttccgcccacctaaattttaggccagccgcctctccctttccctcagcttttgcccggaggctcccagctacaatttgcacagagcctttccaggcccacccttccccagctcacaagcttttggcttgaggggaaaaggtggggagaggcacataccagggtggggccccccagcaagtagcaaccgctctaaaccggccttgagtgaatgaagtggctgcccttgtaccagcaatagctttgagtggacacttccagtctgctttccttcaaggcgtactcctctctggccccgtacccactctctacccccatataggaaggacacagcaaagacccctgctttggggccagaggtctagtttggtttcagaaaacacctccaggttttccctgggagttaggccgggagaatgaattttaccagcttccaagatttctgctcacagttgagtccccagccggcaggagtctgaaggttagggcccaccctatggccagtccatgtgggataggctctttcaggtagaaggctgagcctactaaccacatcccttgatccctgccccaccaccatgatgaaggaagccaaagtccttgcctatgacaccagtggaaaaaatctgtttctcctggggtgtccaaggtacacaatgctcctcccaggaaggactgtgtctgtctgggactccagcagcctgcgcaaggccccacaggccctttgtctttcaggttttctgaaactgccgtgggaagttatctaccaccctcaacacacacacacactcaggatgacaatgaacagaacccgtttacatctgccacttcatttattttatttgcaggaggagttgaaacaaattttaagggagattttcattttccccctaaacatgaatcattcaagtaaaaccaacttaactatagaaatgtagcaaagtaaggggaaagcagcacaacaacgcaagaggcaaaggctgggggggagaggtgggtgcagtccgcatataacatatgcataaatgccttatgattcacctgctcaggaccgcctccccagaa

SEQ ID NO: 1995 - DNA, 4001 bp, Homo sapiens
gtggtctggaaaagaaacacgccagtggggaggtgagccaggtcccccaaggtcctttccggggtcccactccttcttatggatataatttcaacgtttattttagattcagggggtacatgtgcaggtctaccctttctcaacaccggcttccctgggcccccccaccctgttcgtctcacaccttgctgagtacttttaccacgtcccccctccgcagcgccaactcgtctggggcctcaggctggtagtcaaacaggaccctgtagacctcagggtgggagactgggaagaggtcagtccactgtcctctgaagccaagcctcccccatccatcagcagcccccacctccatcagcctagctggcccaccaagtcacaaccttgggagtggctgagggagtgggggaccctttggatgggtgctcacctgtctgcaggtagtctggagggctgtcataggccaggctgctcagctagtgggggaaggggcagggaggaactagatgagcctccaaccaccccaagaggaactcaccacctctgtgcctactctgagccaacttaccttgggaggccgctggggaccagggctgactgaaggcatgtctgggttaccaaggcctagtgggggacagtgaggttagggagggtgctaattcacaggttaggtcatgggagagggtcagaggggtcacagggtcaggatatgtgaatcacaggctcatgccactgggagggtcattggagattgcgagtcacagggtcacagagtcgaggtctcacttgggggcccactgtccagcaattccacaaagttggatgggaaggctcccagctgcccgttcttcttccccagccaccagccgtcctcaatctggggagaggggaggacgcagaggcgtctggttctgccccaagagtccctaggataatctgccacccttggttctgcccaagcgccccttcctccctccttccctcccgcgcttccccgtatctgcaccgtcgccattcccaccgtccacaccctcacttcccaccccgctcactagggaggcgcgttccatcatcctcccccaaacggtcccatcacctcacccctcacctcctttatcatttccacgatctccccagcttgcagcttcagctcgtccgcctgctctgggctgtagctgaagttcactttgcaccatctttggggcctcgggtgtttggcaggatgacctagcaccggacaagcgcggctgagctccagtcggacgccccagtcagaggagctgggggaagcgcaaggcgcgcacgtagcctttggtccctccagccccgccccagggcggagcattgcactcgagaaccaatcacagaccgcagggcggccccgaggtcccgcccagagccgcgcccgtcactaagagccggagacgccggggtcgcactggctccgtgcacccgcccaccggcgcccgtccccgcccttgcgctcacctcggcggcgcgcacagcgcggcctccgcgcctctccggagccccgcagggtctctgggatctcctgggaatcagggcacggggaaggcgctctcagctcccggggggcgcgcgctgagaccccacagcccgcccctggctcggcctcacctgcaccaggcgctcggggaagaggccatagcggcccccaaactctccgcgaagccagccccgcgcgggcacccagcgcacctgccggaccacgtccccgggcgccagactcagctcgtcctccttctgcgcgcggtatccggccaggacgaggacttctgcgggcggaagacggggccggcgtgcggctcagaaaggcccagccgggcagcctggctagggcgggcgtgtccccaagcaccgtagagggcagcgggggtcggggggtggtgtgggctcttgctatgtccacggttgcagagagaggccacctcaaagcctccgcacttacccatggtttccggggcgccctccagagcctggcagctccctctgacggccgagtactgggcccgcgcagggtgcgacctgaggcaagacagtagggtaaaggaggcgtagccgccagccgataggtcgggccaggtgctgggagtgggtgtggagagggggcggcccggctcagcaggtccggcccccaaccccggggtgaggaggactccagggtctctggcctgtgcagcggtcacagctccgtcacaggttcttccgcccacctaaattttaggccagccgcctctccctttccctcagcttttgcccggaggctcccagctacaatttgcacagagcctttccaggcccacccttccccagctcacaagcttttggcttgaggggaaaaggtggggagaggcacataccagggtggggccccccagcaagtagcaaccgctctaaaccggccttgagtgaatgaagtggctgcccttgtaccagcaatagctttgagtggacacttccagtctgctttccttcaaggcgtactcctctctggccccgtacccactctctacccccatataggaaggacacagcaaagacccctgctttggggccagaggtctagtttggtttcagaaaacacctccaggttttccctgggagttaggccgggagaatgaattttaccagcttccaagatttctgctcacagttgagtccccagccggcaggagtctgaaggttagggcccaccctatggccagtccatgtgggataggctctttcaggtagaaggctgagcctactaaccacatcccttgatccctgccccaccaccatgatgaaggaagccaaagtccttgcctatgacaccagtggaaaaaatctgtttctcctggggtgtccaaggtacacaatgctcctcccaggaaggactgtgtctgtctgggactccagcagcctgcgcaaggccccacaggccctttgtctttcaggttttctgaaactgccgtgggaagttatctaccaccctcaacacacacacacactcaggatgacaatgaacagaacccgtttacatctgccacttcatttattttatttgcaggaggagttgaaacaaattttaagggagattttcattttccccctaaacatgaatcattcaagtaaaaccaacttaactatagaaatgtagcaaagtaaggggaaagcagcacaacaacgcaagaggcaaaggctgggggggagaggtgggtgcagtccgcatataacatatgcataaatgccttatgattcacctgctcaggaccgcctccccagaaggcaagcacaaggacccattttaagaggatgtttccccccaaacatctgagaatgcttcaacttaaacagcttaaggttaaaaagacaaagaaaaaaaaaaagaaacccaaaaaaacccctgaaccacccagccataaccaccttccttaatcgatcataggagtttcttttcattttataaaaagattaataaaaaatattgaaaaaattttctcatatttgtaaagataatagaattcataagtttcttagaaaacagaccagacactgccctccagtttccaccccgttgctgggaggatcagcaggactagaaagtttgggatactggagctgctggtggagaacggggaagtccagcccagaagaaatcaggaaatagggctcaggggcacgtgaggtgtggtaaggagcaactccacgtgatacatggctgcgcagaaaaggggaacacaaggtggtcggaaaggccttaaactcctccttgacatacaaaaccggtttttacaaagatccaagcagtttggtcccaaactgaggtgaacacttcaaagtttattcacatgcttttgttttctctttcaagaatcaaagtttcccaaattaaatgtttctaatattactacatatgcctaaaaaaagaaaaaaaaaaaaaaaaaggagggggcttttaaaatcaggacaggggaaaagagatcgaaaatcatcaaatt

SEQ ID NO: 1996 - DNA, 4001 bp, Homo sapiens
tcattcttcttgcaccttgtctttgaactattagaagctagtgaatttaaatcaaaacattattttaactataaaggctcaacgtctacaatatatcatattttagggaaggaagggaagaaaagggttaaggcagctagcttattactcaccatgcagattttagaacttagaaatcaaaagctagaaggaatttaccatctctaaagtgttacttgcttgttgatatggaaatgctcagattgaaccagatgatttttaaggtctctctaggccacagcattctattattctagctatcttaaatctggaatgcttatcccggaagaaaaagcagctgggagtactaggtcagacagcacctggttatttactagttgtgcaagtttcttaacctcagtaaggctgcttcctcacatatataaaaggggttaataacatctatctggcaaagttatggaaaagactggagataatatgtcaaatgcattacaaagtgcttgacaggtttttcataatataggcagctattaccttgctctagctctactactcttttgccagggatagtgcaatgtaggatcaactgtgccaacaaaattggggcaaaggcaaggaaagtagtaaagccacagaacagatttacatttcagcaccaatttggtatgcatattagaaaattatttttgttttctttttacaaaagagaatgttgttgctaccgtgaccgtaaacaccagattgtttataattcatgttgtgaaatttacatctgttcacagatttactgagttggcataacatgggtgatgactgtgggaaacggcccaagttccttagtactgacacttccttgattgtagaatatcgagaggtagtcaacttttccccttaaagtatatttaaaacatactactgtgactacagccataacaatatccccgcatctctccttgatctacagctggtgcttcccattttgaaaaagagtgaaaaccccccaaccctaggtttcttgtggtcttggcaaagtctcaacgccaactggcgatctccatttcccccgcgggctgccaagcccaggacagtcctttcagggagaaagagggccggagggaactgtgttggcagctctctgggttgaaggacaggaaaaggaaactcccttcttggactccgaggggagggtgagagacgaaaggaaagggtggggggtagtgcaagaatggcctgtgtctcggttaccgcaaaggactcgcaagcctccgccagccccggggtggaggccacaggagcactgacgtcgtggtatcagaaaggcggacagtgcagccttagtgttccccaggggtgggaggaagctcccggccccgtccccaccccgcctcgcttcccagggagcggcggttgggcaggagcggggcagaaatccgccgccgggcccggggaggggaccaggccgcgcccatctcccaggcctctggctgcagcaggcccgctgggtggtcggcgaggcccgggggcgccgcgtcgagctgcggtcccctccctcaaccttcccgggcgccgccaccccttttccccccagcaccagggtacctgcacggcgcgactgaggaaggtgcctgcgtcggccgccagcttcttcacgttgaagtccatgatattcatcctaggcggcagccgggcggagccggccgacctagcggcggcgaggcggaggtgccgcggccgggctggggcgcagggctagagcggcgagggcagacgtggtaggtggagggaggcggcgccagccccgcagccgcagctgtcgtttccgtgaacggggaggatgaaggcggggcgagggaggagaacaagcgcgcggcggcagcgccaaggatgggtcagtcggctcggagaacggccgctaacgtcgacgatgggccccgcgggcgagccggagatggacgggcgaccccgccgtgtggacccgggtcccaagggaaaaacaagcgcgggccgcggggcggagcctttctcgaggttatcgcgggaacagcgaccccttgaggattgcggcggcgcagccccggggcgcgccgggagctccgcccggctcctgtggaggaagcggcgagggcgagccgcggggtctcggcgcctctgtatgcttgcacttaacgagaacccagagcgaacacgacccacatttctctttttgttttaagaggaaatataggagttacagcatagaattacaatatctggacattagaaataacaggtcccggtcacggtatggcaccgcgcgacacacttggtccctgaggcctggatgccgctcagcaaacgttcgcggaatagggttgggtttactgtcccccaccgagccggttgctcattcattcagcataattgaatacctcctgtgtgccaggcactgaatcaagtgtcggagacaatgtcctgccctcaagctcctggccggttacttgacaaccttccgggacctcaacgctatgtgcctactgtgtgaaagcaaagtgccaggtggaggacacaaagatggcgagcgacacaggatagtccttaacaattaagcgtgactaattttaataacaaatgagaatatgatgtgacatccgttccaaatcctgtcgttccaagtaacttcttaagcatctttcacgatacagcctctgcttgaaaggaattaaaacaggtacaagcatggaaggagacgttgctatcatatttcaagaataagaaaatgctgttttgtgtggttgtgcagcaggcaatgaaatgagcttacattcaagcttccgtgttttactgaaacaacagtcacagatgcagtagatgttaaaggttgaaagacgagtgcagtaaaagcattatgaggacaagaagaaaacgtaaatatttgtgttgtttcattctttgttgtggtggcagaaacagccccctctttctaaggtaactccaatataatgatctctcccagctttgaaatactccatgtctgtttcattttccagaaatatggaaaaatgaatatataataaaaaaccctatttctcatttattgtctattttagatctttatgtggaaaagcacttactctcttcccagagcactgtttttaaagtaggtatatttgccataacctatgctcgtctctacaaaaggatcacaccaccgtgtccaccattaaaggggaaattctttaatggtggacacagtggtgtccctgaatcctcatcctcaagtgtttcaatcttcccagtcttgggaaaacaacaatgttacttctttcttttgcaccctctgtagctgtaatcctgtttccccattctccataaaagacttaccttattttcatatatccttattcttagcctttgacacttttttttttgagacagagttttgctgtgtcacccaggctggagtgcaatggtgtgatctcagctcactgcaacctctgcctcctgggttcaaggattctcctgcctcagccttccaagtagctgggattacaagcatgcatcaccacgcccggctaattttttatatctttagtagagacagagtttcaccatgtgggccaggctggtctcgaactcctggcctcaagtgatccgcctgccacagcctcccaaagtgctgggatgacaggtgtgagccaccgcacccagctgattcgctttctttacagagaaaatataaatcatcactctgtttggcagaagcctcttcaaccaaatttccttatttccacctcctgttctctccacactctttcctgcatcattgccaaatgtttcaaaggaataggtgtctcaggtgttctgagtagagccactgctcccttaatcttggctgcacatcagcatcacctggagagtttaagcaaccactgatgcctggatccagtcccagagtgtggactgggcattgggatgttttaggagttcctctaggtgttcttaatgtgtgaccaaggttgaga

SEQ ID NO: 1997 - DNA, 4001 bp, Homo sapiens
ctatccccaaggaccccaagtacctttctcctccttgtcgcccccttagcacccggcacagcctcacacaccagactgatggcctccctggggaaagaggggtactcagacccagcgcctgcctgcctgcctcccactcaactggggctgccacagggctgggggaggggaaagccaggccagactcccagggcactccaggctctttgtcatggtggattgaattaagggcctttaatatttgatgacactgagaggccacttcctggctgattgggttagggcctcaatgggtatagccccacccccttccagctaccaaatgtcccattcccttcccaaaggcagcagcaaccttccatctaccccccttttctactccagctccacctgccagctgcttctgccaccttccccacaactcccaaggctggataggtaaggaggatccgggccaaaggggcctcctttcagtaagaggcggaatcactacctcagctttctctcaatcccctttactacgcaaagatcagcccccagcagcagcacccaagtgacccactcccctcctctgtttcccatggcctcactaatcccaggactcccacaatccactccctccccactaacctggtgacctgagtccgggtgttgaagtccagggcacgcattgactggaggacctccacacaacccatgtactaaggggagggagaagaggacagcaggtcagcggctcccccaccccagccccttcacaaagggccctaggactttacccatatggtccctaagggaagtaaagaggaagaagttctgcccacttcccgtggctacatcccacaaccaaggtgaaagacaacagggaatgaggagaaaaagaaaaggcaggctagaaggacctcacacactggggagagagtttggaggggaccgacaggcattggctgggatggagtgacaactccagaaagcgggaggagaatggaggaaagatcaagaagtcattcattccaacacttattaagagcttctgccatgctgggcattgtgctaagcatgccagggtgggggtgggggagtgaaaagaaggaagggggcccaggcaaagctggaagggaaggggctacagaatcggggaagggatgagaaaggtttaggaaataggacactgaaacggggttgttggggaacagcaggaaaaaagagattccggccaagctggagtgagcattagaactggagggggtctgcgggggaatggagaggaggatgttcactcacccgaaccaagtaggaaaccccgggtcccatgactttgtcgttgggatgcagccagccccgcgtgggcttattgacaaagctcccgtggcgggtccactcctcgcccccaagctggcccccttccacccgagtcctgcgcccgccgcctccactcagcttgttcatgtcctggaggaggggtagggggcctgagtctggcatggctgcccctacgatcccctccccatcatcagctgcccttcctggctcccccttagaccctgggcgccccccagccgggttggccagcctcaggttgctcatccgggggaagaaggagcacagggtagtgggactatcgtccccaggcagaggaggcaggatgggccccagggatgaagctgatggggaaggcagctcctccgggggggtggacccagaagccccttcctccagcgatgacagagactcattccggagtggattgtacttgggcttggggggcaggagatccatagttgaggtgaaagaggggctgctgcccagcctggcccccctgccagtttgggcaagggggccaggcagggggtatccccaggcccttagcctggttggacctctgtggcccaggagtcacagaagtcctggggagggagagggacaagtggcttccgctccccagctcagacccagacagtttcaggccccatccccgcccaacgtggagcctcttctctggctgagaagagaacaggctggacccagcgcttctggctcctccccaggggcggggagctaaggggagagaccaatcgtgaggacagtgctgactcacaggctcagaggggctgagcccccaccccgccccaacctcgaactggagcagggggtagggctatccaagcccctctcccctgccctatacaaacaactagtaatctggggagaagtaaagtgggggtgggagggaaggatggaagagtgggacggaaaggaaggagataggaggtctgggtcactcaaaaccggacacacgcaggccaaagggggcaggaagccaggcaggagtacaggggaatgagggaggaaacagaggcagctgggggtggaaaagggaggagatctcagagctcagcatttcccttcctgtcctggttggacactcgaattcccccaccctctctatgcccgaaagctggctggccccagcccaggccacccccaaccgctaccccatacagtaagcctgggccattagcatcctctgctacagcagctgtggactggagctagcgaagtggggatgggaagtaagtggtcccaatggatgcagagcagggccaagaggaagagcaaagctggtgaaaaaaggggaataaagttcaacctggatgatacatcaggaagctaccaggcaagaagggaacaagaggacatgctggtcacggcttgttctctacgtatgccatctaccacaccaagaccgatggctcatagccaagcactgtcctgtctcccctttccacagggcttgttaacacagcacactgtcaagggtgagaatgaggcaatcaggtccccactcccactccaaaccaccccaattcacatccctcctcttacagggccctaagccccaccaaagagcacagcatccttcacaccagggaaggagcctggctggaggaggtggaagaaacagttctccaagagaagtagaaactacaggccaggaagggacagagagatcagaagacacatctgcgtcaataaggacaggagaaaaataagtacaggagaaaggggtgtcaggagaagatgggttgaagctggacacagggaacagtcccaaacccattcctgccacccacggcttcctgccactgctcttccggagaatgccacaggcaaagctggaaagtgaccaaaaaaaaaaaaacaaagatacgtattcctaccgggcgcggtggctcacacctgtgataccagcactttgggaggctgaggcgggtggatcacctgaagtcaggagttcgagaccagcctggtcaacatggtgaaaccctgtctctactaaaaatacaaaaattagctgggcgtggtggcgggcacctgtaatcccagctcaggaggctgaggcaggagaatcgctcgaacccaggaggcggaggttgcagtgagccgagatcgagccattgcactccagcctaggtgacaagagcaaaactccgtctcaaaaaaaaaaaaatacgtattccccccagctcaccttggaattacccttagatttacttcagagaattaaaatatagatagataattatcctgattaacaacattaacacttgaagtgtgttagatgctgtgcttaactcttacatctccccttagtgctcattccagaagagctttgtcactctgccagccaatcctgagaaggaattttatcacttcatttccagccagctctcgggcatagagagaatgaggaaaggattccaccatagcctcacacccccaaaacacacaaacacacactaggatgtccctcatctgtagagatgatgttctgtgggagcctacagtatccagagccagggaaggaccaacgggtgtgggcgttcggaagaaaagaaagacgtatgactcttgaaatttacatagggagaaaggagattgcctactggaagtccaggtgattgggtgtaggggaaaagctgtgtgtggcttcgcagccc

SEQ ID NO: 1998 - DNA, 4001 bp, Homo sapiens
gcatagagagaatgaggaaaggattccaccatagcctcacacccccaaaacacacaaacacacactaggatgtccctcatctgtagagatgatgttctgtgggagcctacagtatccagagccagggaaggaccaacgggtgtgggcgttcggaagaaaagaaagacgtatgactcttgaaatttacatagggagaaaggagattgcctactggaagtccaggtgattgggtgtaggggaaaagctgtgtgtggcttcgcagcccaactgggaggaggggacaggggcgggaagtggcaggaaatggcgaaagcctcaggaatgtttccagcagggaaggctgggcaaacggggccaggaggaatgcccagacaagaactctggttagggggaggggaagagacagagaagtagcgactgaactgtcccttaaaaaaaaaaaaatcaaacaacaaaaagagcactattatctacccccactccaaactaccgttcttctggtagtagaaaacttttgctcatgtcacacccacatgccacacaccaacaaatccatggtcttatccacttatgtctaggaaggcctagagctacttctgggatgaggttggtcctgggaagggaaagccaggaagtgaggctgggagtctgagggcaagtctctctctccctctcgtgccaaaccccacgttcagccctttcaaatagttctacccttggaggaggttaagaaagaggaaaacggggacgggcgcagtggctaacgcctgtaatcctaacacttaaggaggctgataagggtggagcacctgaggtcaggagttcgaggctagcctagccaacatggggaaaccccgtctctactaaaaatacaaaaattagccgggcgtggtggtgggcgcctgtaatcccagctactcaggaggctgaggcaggagaatcacttgaactcaggaggcggaggttgcagtgagccgagatcgcaccattgcactccagcctggacgataagagcgaaactccgtcttaaaaaaaaaaaaaaaaaaaaaaaagatagaaaggaaaacggaaaacggctgcctttaatctcactccttacagccagagatgggaactttgacttcccacctgggggagcacgagagtgctcggaaaactgatcccaaggcccaaaaagagaaaggacaggaaaatataagcaggtggagtttcagggattgacgacaaggcttttcagctgatgacccaggtcccacaaagataaagctcctaagggggcgtggtcccctaaggacgcgaacttcagacttctgggcggggaggctttctggacagtcagacgtggattacggagggggcgtggcttcggaggggcggagcttcaacaaattcgaatcgttctttgaagagcagggttttgcccttttgggagataggccttttgacaggagttagccgaggatcgttgctaggaggcggagtttcggagaatggaaggagtaacgaagggtttctcgtagtagggcttggaacgtgtcggggggtggggacttccagaaaaactgggcgacagggtggggtcggagacaaaaaataaaaatcaagtcggggttcgggggagccccctgaagttgggaggtgggacttccggggagaggggtctcaggggcgggacttataaatgaagaccggaagtggggtcccgggagaggggttccggggtgaaagagtgagtcacctaaggagaaaaaagtcaagactcaccagggcctcatggagtctccgcaccgcaccgcgggccgatttggtgccggatcacgccactgccagcttaggttaccgctccaactttctccccgggccctgcctccctggagaaactttattacactcacttccggcctcactaacccctgaccctctacctcagggtccctccttcacgcttcccactttcccgagttagccaatggcagcgcgagatcgcgcacaaaggcagtggtggccaataagacgcctacttttgacccacgctcgttcttgagaagcgtgagaactgccctccaataaggatccgaagagaagtaaatctaagccaatcggaggcttgaaagtagaggtgtcccgcctcgagccaaacggaccaataggaagtgcgggcggcgtgtttgaaagcgaggccaaagtgggtgggagcgcgtgctgttgggagttgcttggaggttggcggcgcggggctgaaggctagcaaaccgagcgatcatgtcgcacaaacaaatttactattcggacaaatacgacgacgaggagtttgagtatcggttagtgctggcgcgggagcaatagcgagggtcgtgagctttggccgctgagggcacaaggaattagtaacaggaactgaggcgatagaattggcgcatgcgtacgaggtgcgaacgggcaatggtgtgatattgtggaaggcgtaaggcgcatgcgcggaggtgggaggcgctcgtaaaacaaagtggttgcgaatttggagtcgcctctcagtagagaggagagaggggtgggcgtggttagggtactgaccaccctcacccatgaggctttctggatcattctctgaactttatcgggcaaacttaacttgccttgtagagactgtttcacagtaatcttgtcgaatccagtgggagaacgtagcaaaagcggagctggaagtttcctggcgtccctaacaggagagtagcgctgagagagttgaatattgcttattaactcgtgaaaaagacaaggggcgtggttgtctggcttgtgtaaggaaggggatcgcttgggactgcaatggaataaaactggctaggagcattgagaaaatacttaatatgggtctaatagatgccctttaaatatcaaagggaacagttacggaatacttaacaggtttcaggtgttctgctaaagtgcaaggataacacatggtctctgctgttcacaaatttaaaaatctgtgggtggtaccgacagacaccagaaaggtgacacacgctatgcaaggagccattacagggtgtgatgggagcacacaagacttgctaaggagagggaactggcgacccgaaggctgcggcttcctagctgtgagcgggggttgaggtggggctagaaagtcagtcccctacttttgctaactccaggacgctcccccatcccacgcttcgagaacgccccccgccccgccaccgccttggaggctgacctcttactttcggtcggtcttcttccctgggcttggtttgggggcgggggagtgtcctaagggccaattcagcgtgatgtctctttcaccaccattgaaaacgaaaccagtagtaaactacgcgtgttttcatttatatgtcggagataaaaacacagggacagaaagaggggaacaacagacattggggcctgcttgagggaggagggtgggaggaggtagaggttcaggaaaaaaaaaaactgtcgggtactatgcttagtacctgggtgatgaaataacctgtacaccgaacccccgagtcaggattttacctatataacaaacctgcacatgtacccttgaacatgaaacttaaaatactgagaggaaaaacggaagagggaatgttggggaaagcttcctagagggcagagcctgagatgagactctaagaaaaaggtatgtgggaggaagcacctcttgactgaaattgtttagaagacactggatagccatctgccaaggatggtgatgatggaatcctggcactggatgtggcattcgggcttgataaattttaagtgcataatctagattgggaataagggaagacacaggattccacaaatgttggcattatgctaatctgtattaattgtaataattaagaccacttcctggtttgtatcttgtctcctcagttggagaacataaaatgaaaacttgcttttcttgtgtctcttcacccagcctagttcagggctttgggtcttcc

SEQ ID NO: 1999 - DNA, 4001 bp, Homo sapiens
ttaatttttctgataggtatttacccataacttcatcagcatcttctgcctaacaagagaaaaaatggatctacatataaatatatgaaattatagattttaaactaagtggttttttttttttttactgatttctattttaaaatggaaccaatatagccttaaataatgaatgacctggaaaattacagattttaactgaaaccgcatctagtggaaaacatcaccaacaaaaaattaaacttaaaagagatctattcactcgaataattcatagataagacagctagttattgtttatgtcttaattttcaactttttataaatatcactgcagtgaatatgcaggtacacaaattcttctgctacaacttaaaaaaataggttagaaacatgaaatatttgctctattccgttttatcagatatgtattttctataaaagaaagtcatgccaccaggcacggtggctcatgcctgtaatcccaacactttgggaggccgaagcgggcagattacctgaggtcgggagttcgagtccagcctgaccaactggagaaaccccatctgtactaaaaaaaaatacaaaattagccaggcgtggtggctcatgcctgtaatcccagctactcgggaggctgaggcaggagaattgcttgcaccgggaggcggaggttgtgtgagccgagattgccccactgcattccggcatgggcaacaagaatgaaactccgtctccaaaaaaaaaaaaaaaaaaaaaaaaaaaaaaaaaaaatatatatatatatatatatatatatatatatatatatatatatacacacacacacacacacacacacatttatatatatatatacacacacatatatatcatgccgcattgtggactgctgagtgggaagtacccttaaagtaatttctagcattctagtgtaaaagtcaaggctaagtgatcttactcatgtttggacataaactgttaaataaaggtaccaagattcatgcctgtgcaatgataaggccaatatatcttcattttttaggagctctcagaaaattctctctcagggctgtcccgttacctgacgaattttgtcggaaactcgaaccttaactcctctagggcaggacgcgggcacctctaacaaggtgaacgctctatacatgttgactccatttacttttttgaaacgcaagttttcgttgtgccctgtggatccccatccgcctaagagggaagccccagatgcctgtccccaggttccgacgagcttccgaccgtagtcttcctgtcccggatccgctcaccttacagtcctgcagcacttcgtcgcaatacagcgacaccttctcgtcccgccacatccccctcatacgggacacgcagactgggggcaggggctgcgcctcctcttcatcctcaggcactggcagcaggggctcctccgccgccgccgccgccgcctctcccgtgtcctcggcctgagccgcgggcaggcgctggagccgcagcctggccgtctcccggcccgctttccccttcaccgggcgaggggaggccaccaccgaccgcactgggatcgcggtgcccttcagggtggtcgcggccgccgtgtccccggagacagcggaggcggacttctcgcctcgcctgtccgggctgatggtgcggaatgagtccgcgggcaccgaggccttggagcccgacgccatctcctcagcagcccgagggccgaggcagccgttggccacttttcccgccctcggccgctctggccaataggcgctctgcgcttcaggcccgcaacgagcggctgctcgagggcgtcccgccgggtggggtgttgcggctctgggagggatgtgaggcgcggcccagagctagggggtgcggggcctgcgggtagagcgcggggtcctgcggacgcattcagggtgctggggggcgctgctcagagctaggtgggacagggcgaagcgcctgggctcaggacaggggtgggggggcccgggtcagtgttgggtgcggctccgtgccgaacccccaccaggtgccgcacacaccagaaggtgccagacgagcccaacgcaatggctctaaccccagccctctgtctcccccaggggaggtttccttagggtcctcatacgtttcagggtgattatgagtcaccttccaggtcatcaggacctaaaaaaatgctccacctaccactccacaaacaaagcctgaaagaaaatttattttcatactgggaggtgacactaactggaaccctctggctattactagaggaaaccctagtgacaaatccagcaacctagatttcccttttagcccccacctattacagggttcaccaaataggatttcctttacattttaaataggactttcactttttgccaagatgtggtcataccaaggagaagttagtctgttttcttgtctctgttgtgctattcaaaattctcacataaaagattatattatataactgttaaactggacaacaacttccagctgggagtgatgtgtgcaaactatgaacactttcacgataaaagtctgttccagatcatacattttggagaacaacagagaccactcacttctggtattttactgttgaatgtatattgagccaattggaattaacgtttgttcacagtctagctgtgaaatactgcactgaagctgacagctcccaaggagaacagcattgggaaaacacctgccttccttcacactcgtctggaagaacactatgttaaattctgagtttattttgaggaaaatattaacatcatgtggctgggcgcggtggctcacgcctgtaatcccagcgctttgggaggccgaggcgggcggatcacaaggtcaggagatcgagaccatcttggctaacacggtgaaaccccgtctctactaaaaatacaaaaaattagccgggcgcagtggcgggcgcctgtagtcccagctactcgggaggctgaggcaggagaatggcgtgaacctgggaggcggagcttgcagtgagccgagattgcgccactgcaatccggcctaggctaaagagcgggactccgtctcaaaaaaaaaaaaaaaaaaaaaattaacatcatgttactgtagtttagggaataattacaacatgcatcatgtttcaattctattcttactttattcctttcgttgagtcctggactttgtttataacaatactaactgcatatttcactcacacacacacacacaaatgttttactctagtgtttcttcaaaagtttgtttttgataaattatgggttttttaattcttaggttctgaataataaagaccacctgtcctgggccaaagtttaaaaacagcaacagctcccttttcctccaaaaggcaaatacttgttagaaatctgttacatgccacacaatgcgtagatgccacagttatagaggtaaaagaccaaatccctgccctcgtaatcctagtgaaagatacagatgggtcagtagatgattgtgtttggtaaggaccatgcttttatttatgtaaatacacataaatacatacatatatatatttatatacacacaaataatttgtatttatttatgtgtgtatatatatgcgtgtgtgtgtgtgtgtgtgtgtgtatatatatacacatatattccacattgtaggagaaaaggacctttcttctccaaagaagggatacttaagctgagtttttaaaacaacttttttctttttttttgcctcccaaagaaatttagcttgtttctcccacctcctgtctcctccaggatgctttgacaaatggaataccactgtccctttttcctacaatgactcccttctcccaacacagagctcccaatgcccaggctcaagatcggctttcagttccacccatggccactgcgtttcttggtcattcttcaaggggtctttgtgttctcaaccttctgccgcaatcccaagtggaagctct

SEQ ID NO: 2000 - DNA, 4001 bp, Homo sapiens
ttagaagtaacactggagttggtgagaattcagatacatgaggagaagcgaagaggaggaaacagcctggaaatagcctcagaaacctcagacacccagaagtgacaaccataaaaataaccagacaaccactgcaagggactgtgactgcgactgccattcacttaatccatttttcttgactacccaccatgtgtaccgcatttgcaagatacagtgagcccttggcttcaaggtgcttgtgatctagtcacacagtcaggtggaccactgaataacatatgagctgggtccccgtccatctttacacagctctccactcagtgcctggctcagggtgggcatgctgtatttacagcatgaaaaaatgaatggaagaatgaacagaagtgcccaatgcagacatacacagcatgtgttatgggctcttgacttcaaccagggaggtagcatgtttgaagcctgggcaagagaaaattaaagctcccatgcatgttaggaagtgattgcctggaccggagtctgaaatctcgatttgagctcttctctctccccctttcacatcggagagaagataaaaacaaccagatcggaccaactcatctcagcaagaatggagggagtcccttcctatgttcacactccttttcttaacttttccacattggacagcacccagaaaacctccagtgtgtccgtcgcaggaaacaccctctcttctcatctgtaatttccttgagagcatttccttgtcatattctgtatcctccacagcccttaatgccctgtgctcctttcctcatatggctgctgcgcaacaaatgcccatggaatgaatgaaagggcagcagtcttggagatttgctgaacctccgaggagccctttactcggtggaaccgcagaaaatgatggaacttccaaatcagtggagaagactgttggttaaaccatttcctgaagctttgaaatgcatatctacacacttgagaggttaccattccttatgctcaagaagcataaaagtcatacacaagcctagctttgcaattcccctgaatatcaaaattaaaatgaaccacatctataaaggggtcaaatgtaaccaaacaggaatatctcattcaacgactcttctaaactgctaacaaaattcaatggctagtacatttctgcaaaactccccacctctaaaataagagtttttcaagaattaaaaaacagtctaagaattttaaatggtcaggaattcccaaatggtggagggagaaaggaccttaggaaacctatcctcactgcctcttaggtctaaagaagcctagggcttagcaggcgcccagggctccccttcgactgagaggtggtccaagggaggctgtattcttaccgtctcttgctgcttaataatcttgcccttgtccagctcgggccccagggaggaaggggaagaggacgcggaggaagaggagctggagctggagctactgctgctggggtagttgctcttcccgttcttctcctgagtgtccaccttgatgagcctgttgatgtaggtgctgcagcccgagctcttggttgcaccccggtggggctcctcctccgtggcccgggagtttttgcggcccttgcccgcggcggcctgaatcagaccctgcaggctgtcgcgggacagccggctgtccttggggccgacgccggccctgccgctccccagctcggccgccgagttcttgcggcccttgccaggacccggcccagcgccgcccgcctccgagttcttgcgcaatttgccgccgccgcccccgggcttggcccgctccgacacggtcttcaggttcagggggaactccttgaaccacttggccgccatgagggggccccggccggctcggcccaggagcgtcggggccgtggagcaggcgagcgaggaagcccagcccagacacgcagaggcgccaggggtcggggaccactgcattccccgtgactggggcgctggaggccgcggcgaggccccgcgacggctgctccgtgcgcccccggccggccgtcgcccacgcccggcagggtggggttctcacggctcggggcgccgagcgggcgggcgctagcctctgctccggacacggcaggcgacaggcacgacgcgcggggggccccgcccgggctcgtcttcaacgcctgcccggcccgaggacaccgtggctctcggaggcggcgggcgccgggggcttccccctgctctttcctcctgcggtgggagaggccaggcccacggaagccccctgcggcccagcccacgctcccagggaccagagaggaccgagcggaggcggcgggagtatccccggcgcagcgacagacggtggacggacggcgagcggcccatcaactccgcgcgcccctcccctccgcggctggcgcctcccagccccgccacctcctgcccagagctgggggcggcggggtgagcgccatggcagaggcgggtcgggctgcgagctctggagaaaggggcggcggccgcacgtgcggatcggccgcgccccactgagcagagagcccccttctgccgccgacagcccgcgtctgcaccgagccggtctcggccgggcgctgccttcacacgcgcccaggagtgtcacgtgcgccgctcacccccgggaaggaagcccctcgcccacccactccgctctactccactctttctgcagacgttatttttggcggtagggcagaggttgcggcccgaggtccgggcgcagggacaacggtcgccagctcctgcgctagttccgttactcttcggtggcacacggtcctgggcagcgcgaggctcttcccgccgtggccgccggggattggctgccggcaagccccgccccgtgcccccgggctcagagggggcggagcgcggagggagaaggcgcgaaggctgggcgtcgcgatcgcaggtgcacgcgcgtggcccgcgagacgaggtatggcttgtcggccccaggtcccgggatgccaggcgagggttgggagggaggggcgtcggcaggcagccatgggaaacgccctcgtcccgactgatgggggaaaggggtcgctgttcccgcggggccgtcgctcgctcgcgccggttgggagcggccctcctagtctggatttgtgcgggcggggagtgccgtgtgcagaactgtggccactttaagggaaaagacgcctctgccattcctccctcccttcgaagccctttaaaagctttctgaggccgggcgcggtggctcacgactgtaatcccagcactttgggaggccgaggcgggcagatcacctgagatcaagagttcgagaccagcctggccaacatggtgaaacctggtctctactaaaaatacaaaaattagccgggcgtggtggtgcgcgcctatggttgcagctactcaggaggctgaggcaggagaatcgcttgaacccgggaggcgcaggttgcagtgagctgagatcaagtcactgcactccagcctgggcgacagagcgagactccgtctcaaaaagacaaaaaacaaacaaacaaaaaaacacctttctggtttaaaaaaagaaatttaaacttagtttactgaacggaaatcttttggtttagcaaactaaatgtgctgaaggggctgaccaacactgagtcctcatatacaatggaaacagaatgatggcgactgtggacggcctcatttgtgtgggtggtggtttgtgaggtgggaaagctaaaatgaagaaatgcgtgctcatactgacgttcttgaaaatgcgtagtgacatttttttaaagctttattgagatataattcacataccataaaattcacctgttttaagtgtgcacctcaagtgttttcagtatatttggtgtgtttacagtacaaccatcgcaacaatctaattttagaacatctccatcacccccaaaagaaatctcccgtcaattagcagtcactcctcatttccctctccgcctt

SEQ ID NO: 2001 - DNA, 4001 bp, Homo sapiens
agaatttacccaatccatgaactctctgctgcccattattggacttagcccagcccatctgaggcccttcttgcccagtactgggtgtaccttcaaatgggctctggagctgctggcgccggcggtacaggtagcaacaggaacagaggaagcagcagatggtggtggcaaccacagcaacaaagaggatcacagctgaggcgatgcctgctatggtcttggggctttagacaaagaacaggtcctctcaccttccaacactcataggacggagtcctcattatgctggctccaactcctggccagcaggggggccatggcatgctgagatttggggttccttgtggggctctgcccagtccctgtgaaggagatcttagaggacctccacttcccagaaggctatgctgcctggctggctagtgtgaagcatacggggatttgcagtgcgcccccaaccattgcttttatatctacaacttaaatgattagacatacagcataacactgaaaggagccttagaaataatctagagccattttttccaaaccccgcttcaatcagaagtctctatatctattttatatatgatatattaaaaaaaagtttgacaaccactaatttggcaagcaatgacccatagaaggcaagtgtcttctccaagatcacacagctagtaagaagtggacctgggaatcaaacccaagtctcctgcctttgtgccagagcttcttccacaaagctacactgtcgtccgggtgttaaccttgaaccctccctccccatgacctggcaggaccaaagggagggctccagaaagaacctggaaaccccgggcccagtcaaagcctatgaaggtaactaacatgccttttctggaactcccaggcaccagcacctaagcacctagctctgccgccaggcttgagtcctggtgactctattcagctaagaatgtggaggtcgacaacggaggaggcaggagtccgggagggaggaagaggaggcctctggagaaaaggatagaggaggtggtgagggtgaggaggcaggaacccacctgaaggccaggcagtgcttctgctgcctctcggtgataagcaaggtcaggtccctgcagcagtaccgatggtagcaggtcccgcagcagaaggtgaagaactcgcagttaaaccccggatgccaggagccattccggtccaggtaccacaggcagtcctcgccggccagcactgcgggcagggattgggggtgcccagtggccaccaggccagttcatccccagccgcgctcggccccactcccccggcggtccccagcctgacggctcccgaacactgagggttgccccttgtctccaccctgagggtctcagccccagagcccccgaggcctctgcctgaagctgaccctgcaccccgggatcagcctcccatggcccagcatcctggagctccctcttcccgcttcttgaggacccagcaacacccaaggctcccgtggcagccggagggtctcggagaagccccgagcccaagcccctcggatcggtccctccccttcctccgcccccatcccactcctgccgcatctctccccatccccttacccaggggagcccccagcaccaacagagcgattgcggtgagcggcgcggcccggcggagccccgcgggtggcatggtgggggctgggcgcggccggggtcgggcctcccagagaagggaccgcaggaccaagccggccagctggagctgcggcggggcccagcccgcggccaggctcgggctcctcttccgcctcctctgggggtgggactaagcgccccgcccgcgctaacccagccggcgcggctccgcgcagcgcccaggagtccacccaccagcgacgcccacctagcctctggagctgggtgcccctcacccagcagagcactgccctgctccccctgtccccggctccgcggtggttcctcccatccgagccaccatgggcactgcgggcagttgggcactgcggccagggaagcctggctgtgtcctggacccgcccccggcctgggcccaatcactatgctggactccagaagccctgatcctggtgccacctccgaatgcccagacacatgggccaaccctggaggagcagggctggaccttcacttgtgggggacctcctctgccgcgtccagcctgggacatcctgtcgggggcggagagggaaagaggctggatgtcaccccgcccccattcccagaacacaagcactcattgagaggcattcagagtggctttgtccccagcggtgcccacaggcctgaaccctgccagctgcactggctccctacgatggacccttcccccttcaagtggacagagctggcatgcaccagcccatggcctcactagcagggaaggcaggctgctggggccacctggggcccatccagttaaacactcttcacagtgaaagcccttcacagagcaagcctgtactgcaatagccaccggagcatagggagggcaacagttaatttcaggtgggcaacagttaattccaggtggagacagtgttttaggatgggagaggtcagtcttcacaggtttatactgagtgccagtgactatgccccatgctacatgaggtaccctccgaggaactgcaaattaagccagggagatcatcaaaagcctaccttaatcccctgccatgtacaccctttcacacacttctgggcttccacatctacctcactggaatctttccacaactccatgaactaagcaaggttcatcagtgttatcaatcgcatttcacagactgagaaactaggactcatggaggttaaagaacttgttcaaggtaatacagccagtaaatggtagaggcatcaggaagacccaaatctaaatcagggttgatccccagccgcaacagcagacagtgtagacagtgagtatttcttgtgttctggggtgagagaatcaggacaggtccatggaaggcccagtagaatcttagtaggttagggaaggacagccgaaagaggagctaccccatcctgggcccctgtgggtgctggcacacctacccaagagagctggaataggagaggataggctcctgccccagaaagttgctggtagcctgatgggcaagagtatgtcctcacgcaggacacagtcataaatgcagcagcagggacaaagagaaacgcctctgaatccagcaccacctactcagtgtgcccattgccatccatctcctctttcctacactaaaagctccatgactgcagggaccacgtggctgtgttcaatgtggccatccagccctagccatcagtgttgtcattgttggttgaatcatcttcagataagggactgtctttcctgcccagagctgaatctcccatgtgtacccttgacccctgctgatttgtctcttcattatcccatctctttagtgtctttagcttctcacaccttaccagcttcttttccctaggaaatctcaagtctctcctatttaaagcaaagcaaagcaaagcaaaccaaaccaaaccacatccttcctaaaactcatccctctctagctactttcctgcttttttctccaactagccttcctcaaagtgtatacccctagttgacacgccctcctcaaagtgtatacccctagttgacacttccagcttgcaatgacacctagcacgcaccaacatcatcagtgattttctaattgcaaaattctaagaatgtgtttcagttcatgggatgggaggtgactagactaggacagagagtgaagagagggggctgtgggccaaccagaggggagaactggctgcactgggagaactggcacttcttaccttgacaagggatgctggagctcggagatggagagctggggctagcttatgtcgccataatgaacctgggtcttgaaagagtctgtagattggccaggagtgaggaggggcttgggtgggaggact

SEQ ID NO: 2002 - DNA, 4001 bp, Homo sapiens
atgtgataaacatgaaaggaaaatgagcttacttttcttcaaaaacaagcacacatggccaggcgcagtggttcatgcctataatcccagcactttggaaggctaacgtgggtggatcgcttgagcccaggagtttcagaccagcctgggcaacatggcgaaatgtcatctctaccaaaaaacaaacaaacaaacaaacaaacaaacaaccccacaaaaattaacagggcgtggtggtgtgcacctgtagtcccagctgctccggaggcagaggtgagacgatggcttgagcccaggaggcagaggttgcagtgagccgagatcgtgccattacaccacggcctggtcgacaagagccagaccctatctcacaaagcaaaaaaacaagcacacaatctaaaacaatctcaagatttcaatttggttcatttcgaatttattcaaagtttcttactgcagagtgagactggtgagctttcaggactggttcagcatccaccgcttttttagcaaccattaactgtaacatctgtttccgatatttgctcatgataagttccaaagcatcctggtgttcctccaaggaaatccatagctctgtcaaaaaataaaagaacttggcagtgatgtctgagagacagttcccaaatccaaagtcttaacagttggaattttgtaacactatatagataatatgaatctaaagttgtaaatcaatgtttaagtccgcaaaactgaacagttaaagtctatgtgaaaggtaactttctaggcagagaagcaaagtcttgcagaaacaacaatggatgtatcatcagaagacatgtgtttgagttcagttctgtaacttgcttggttaatactcataagtaaatcatttagcttcttctgagcctatttcttaactgcattgtggtagataaaaatgaagatatgagaatacagtagaatgatatatgtgaaacccctctggtaaacaactattaataccacaatcattaataatgtactaatcaagcctaagaatatatacccttagaataaaattctgctgcttcaccttgcacaaacaagaacataaacaaaaccttaaatcttaccttcagtgtttatattaatacttaaacattaaattttaagtccatgaggctatgaactcttttgttacacatctgaggatgcttaaaaataaaccatgcaataataccaactctacacagcacctctttggtaagctgctgcaatattagtcagatgaccttgaaaagggtaatctaacaaactttattgttactgggccagatcaggaggactctcctactaaaagtactgacctggaaatatatgtacacttttgtaaatgtttagggcaattttgcaataactttaaactattaccagatatgaaaaggcctgactaacctctgttttcctgttgcaagtctctaatctgtgtgttctcttgggacagcagaatgtgaggtttgtatttggacatgtccttcatatcggatgcatcctcttgatactggacaaatagagacagactaagcatgccttaaagagaacagcggcagatgcaactgaagaggcagaagttagggctccagggcaggattctcagccccgacccaggaaaatggtctcaccgccgccctctgagaccgggaataaattccaggccgagttcccactttacctcgctctccacccttcagtgcccagaatccgagagcactggactcctaccctctgcctgacctggtccggaagcgctgtccccgcctcccgcatagctgctacccgccggtgcagcgccgccgactgatccaccagcgactcggcggccgcatcgtgctcccgtagcctctccagcagcgtcttggcgtctgtcaggatcttctcgatggtgcagctcatagcagcagcaccaccccagcccctgccgggctcagctacgcgactcgctcagatcttctgggagtctgtctcagcattacaggcgtcatttccgggcacgtttacaaggtgtcttggtaggcgcaatgggcgcctgcgcagtggcagcctattttgcgggttgacccgctttaacctgcggcttccttgcagtccttccttgcgcggagccccagacctacacttgccacgccgttggtttccagttaccacagcctggtggtcaggctatgattagctgggcagtgggaaggtctcctttccctactggttttcattgatgtgggttgttcttcagtcacagttagtttctttttattttcattatttttttcttttttgagacggaatcttgctcttgtccaggctggagtgcagtggcgcgatcttggctcattgcaacctctgcctccagggttcaagcgattctcctgcctcagcctctcgagtagctgggattacaggcatgcgccaccacgccggctgatttttctatttttagtagaaacggggtttcacatgttggccaggccggtttcgaactcctgacctcaagtgatccgcccgcctcggcctcccaaagtgctgggattacaggtgtgagcccccgcgcctggcctactttcatttaattttttttaaattgtggcaaaatacacataaaatttaatatctcagccatttataagtgtacagttcagttgtacattcatattgttatacagccaccatcagcatccatctctagaactctttcatcttgcagtactgaagttctgtactcattaaacaataattcctcattcttccttatccccagctcctggcagccaccattctactttgtgtctctacaaatctgactattctgggtacctgacatgagtgaaatcatacagcatttgtatttatataactgccttatttcacttagtgtaatgtccacgagtttcatccatatagtagcatatgttagaatttccttcctttttaaggctgaataatatatatataccacgttttgtttatccattcatccgtggatggacagttgggttgcttccaccttttgctattgtcaataatgctgctattgcaactggctcacgtctggctgcttgctgcctagaggccaaaaacatgagaagtgacctgtggtgaaagctttactaatcaaatgctcgcagatggggaatggctaggctcatgccttcaaaacagcattccactttttttttttttttggtcaaggtatcccagagacagtatcagtgtccaaactttaattttgtcccatatcaatgccagggtggtgtgctacctgccctgagtccatcatgtccctcctgcggccaactgacttagagtcaaaagagttacagccaattaaacgttctaggtcagatgggaaggaggtgggcaggcactcattaaccttaaaacccctcttaagcaatgttaagaggcaaaaaccaaaaggcaagggttacaaaattgacttatctataaattctatgcattgagctgctgtaatcttggcttgttgcaattagctatacaaaatgcaagcattttgtttagctgttttggcatctgtgtcatccttgatttgtagggtctgaactaattttagctctcaatactggcccttacaacattacgttatagtctctaggcatggcgggattgaagagtttcaacttttgtaggtaaaacaaaacagaaagaattaacaacatttcaaacacaaaggtcataaaccctgcctagttttgagaataacaggaaaagaagttcataggtagctaaacacttaaattatttagtatcaaggcacagaataaattatattaattcagatagaggcagaattgttaaatgaatcttaatatttttgaacacaagactgtccctgtgtctcatgaaagcagtttactttgtcgcctttgcctgagtctaacgatgaggctttggttaattgcagtttagtgtcagatactggcaggagttgatgccttctttggatgagatatgtgtaagtc

SEQ ID NO: 2003 - DNA, 4001 bp, Homo sapiens
agaggaataggaggaggacagaattaatcagggaagacttcttacaagggatgaaatctaaatcaagtctgaatttgtgatgatcacaaattggcagacaaagaatgacagaaagagaaaccaaaagggcatttacacattaaggactacccataaacaaaggcatggaattgcagttttctaaagaaaaaattagcctggaagctatggagggaccatgatggagaacaaggtcaggcccagtggactatggccttggacactctgaggaaggtgctccaacacaaagcaaaacattgtgactggttcttaaaaaactactcccgagacacatgcaaacgcccatggctcttccttacctttcccatagaagaatttgcggtaataataggccccaaggtcaatgtgttctatgatgtagcgcttcactttctccctgtgaataggctggttttctctgggcacttccaagacggagacacctgcatttgtgcagtgagagctgagtgacgattcgaaagagcagctttccccagaactgaaagaggatgagttggctcgagagagcgcaatccgcctgtcgccttcccctccagtctcatttctaaagtaaggacaactaaggacgaggtcgttacttttcccatcaccctcatcggcatccaggttctctttggagttgaggtcctccttgctccctaaaggggactcacagttgcctgtctggcccgtaggcatctgagtctgggatgctgcagatgccccagtggttatgtttttccttttccccacattagccctcgtagccatggcttcgttgatattaaacaaaatgctctggacatcataatgtgcaaaacatcgctgacaattccaagggcgaatgcccctctccagtcggctctcctccagctcagacgtgaacttgaaagtttcgtgctcacttttaacagttcgaagctttcggaagagagatgtttccaccgactctgatttcaacctccgtttgaaaggcttgtccctgtctctccccatcaggagggcactgtccacataatctaatcctgagatgcggacaaattctcccctagaaatctgtgctgctgcatgaaggctcggagagattgcagggtcacagcggaaaaattcagggaacccaaaagggaccattgctttgtggtcataattttctactcggtaccctctgagcatagcaaaaaagttttcaccagataagccttgcctgtcgatggatgaagtacttccatactccctgtgcagggcagccccggtgttggggttgactgcattttggtctaagacatcttcggcatcaatgtcactgatagtgacatcactattgctcctctgtcttatggggtgaagtcctctttggggggaatggacaaagatgtctccgattgtgtacttggcctccacgaagtccagatcgagctgttcatcttgctgaccttcactctggtcactctgcccattctgcaggacagaagtgatgctttcataactggtctgagaccggctttcccacagtgccttgcatgttagctccttggaacagtcctttttaggaggccattcagacacccttgctctcacacccatcttgggcacagctggggtaccattagccggaccaccaccgccagtctcattggaattcgaggcatttaaagaagtagtgggtcccatgttgccattaatggctttaaatttccgagcaaaataatcatctgactgcatgattctagggggatccttgaactttgaagaggctctgcctagcttgtgcttctcttcttgtgactgccttgggtcactcatgtctaccgaggaagagcctccaagtctcaccaggaagactgatgtaaatctaattacattgctaccgaccacgccataatacttgcagatataaaggctttgtctgtagttgtattttttcttttcttagcccaaagcaaacaacatcctcagaatacagtttcttcaaagccaacttgcttctctgttgtcgtaataatgttgtacgcctctgttcttttcaaaagcattccttaagacatctggctggtcatgagtatttccttcacctgaattaagagataggaagtagccattagcaattaatatgcttcaagttgaacacattctatgataaatttcgtatctgtctttcccctctgcttctgcccacaaagtttcatgatccacagcactgttcgtaacactcctccctggaacaccatcttccttctctacatagctagataaaattcacaccatacaatcaggtattaactcatctaagaaactttcctaggatgtctcccaccctaattgcatctaagcaaagaatgttgtgatcccacagcactccatctatatccaacagagtaattttccttatctctaattgctgtttaccaactcactgacttcaagttcctctaagccaagaaccatgcctttcagctgtgtaccagcattaactattaaggtagcctggcttaaactagggattcatgaagtatttcaatgcatgaattggctacaagagcagcacaagtcatgtatataatgggtttcagtattattagtttagtttctttcaaaacagttaaactcaaaatgtcccacagcaaaatggtcaatacaagacattaacaagagagttttcatagtgatcacttgtagtcaaattagaactcacacagatcctcctttaagtgggaagagatcttcaaggatctggtatctgatacatcaaatacattgcagtagtgagatactgggtaagaagctgttttcttgtacctcagttgtcagtttttcagtctccaggaatggatttgataatagcctaaactgtgtaggaaataactataatccagtcatccttgatccttttaaacacaataattctaagagaattaggtaagatgcagtcatttatcttatctttctgaaaaccatgggatagtgtgtctgttctgtcctgtgcatgtcagtatctgactactcattttccctgtttgccatatcctaaaatatcattttatttcctccattatggaacagctctgagagtagacgatacgttgtcatccctaaattttttttttttttatggtagggagaaagcaactgccaccataagaaaaatatctgctattctaagacattcccacatgctcatctcaaagccattaggagtccactggaaagagtttttatgctgtttagctagttgggattttaacattttcaaaccgaattacagttattaatattccttatgctttggtgaaggatgaagaaaactagctatattatagcttttgttcagaagaggtaaagtgattctttcattcttctgccaatgagtaatatagcctgtcatgagtttggaaaatatgtaacacctgaaaatgtctgtgtctaaataaagaaagaataaattcaaagaaaaatatttgtaattaaagagaagagtaattagatcaagtgtctacaaacatacgggtaaattgcagtgttttctatttccaggggtctttattttacaggtcacttgtggcataatgcactagaaagttgtattcttgtacataaccagtccccaactagaaatgacattaacaaatgcatccacgaaatgcaaagaaccactttaattgttgctttgaaactcctttatccttttatttataaaataaatgccatccaaataatgaggacaaaccctaccttcctttcttttccgtgtcatggcatatattgaaataccagtatctgtacagcacaagggagtcaaaaaggaacatgctcagactagaggcacagttaacagactgaccaccttgggctcaacccaccacccagagggaagagcaaaccggcatctcctcacacttgtaacctattcaccacgctccacagggaagctctgagtttaagccaccaactaatagatgtgcaaa

SEQ ID NO: 2004 - DNA, 4001 bp, Homo sapiens
acgcaacggaaagttcctgaggaccccactgagtaatttcggcacctcgtggcctgggagctgcccatgccggatcccatagatcctccaactggcaaacaacaaagccaggccagcagcctccctctccggcgcacccctctgcgtttcagagggagagaaggaaatgggtgagtccaaagcaaatcgcaggccgccagtaactccagcacgcgggcccaggagcctgctgaccaggcccctcagccgggtgccaaatggccctcaccccacacggcggactctgggatttggtccctggcaggcccagggagaccaaccagcacagtgctggagccgccaagtctcgggcccctgccactgaagcctggacacctggcttcattttgtgtctgtgtcccaaaacttcaaggcaccaaacagggagcgggagccagtaacaaaaccaggcctcgcctcacccaagctctgtctcctggggcccaaaggcaggcagccctccgtcttcgaggctgggtgccttcggggcgaggacagccaccttcaccccaaccccaagaaagacctgggcctgaggcatccgggccgtggcccagctggacctaacttccctgacctggggcaggccgctttctcgggagcatgaggcctgtgccttcctatctgggcaatgcctgtgggcctgcgggccttccccacacaccaggcctggccccccaccccaccgccacagcccgcactccaggctcgtcctggggaacgggcaggagggccttcctaccaaactctctggccctgccagtcggaacactctgaatttccctaaaacaaagcgaagactggagacatggggcacggcagaagcacaggtcccagccttcggagaccagagcctgtagtccagaaggggcccccaccccaagcgcatcctccccagctcccaggcctggggccactcacccggggcacccgccgcttgtacttgttgccatagtcgaatttctccttcacgtcgtccaggcagcggccgaggcgcgcctgctcctccttgcccgtgtaatcctggctcagcaggatgtaggcccgccagttggccgagtcgaagccccagtggcaggtccggttctccagggccttgtgcgagtgcaccacgaacttgtgcggcgggtacatgaggcggcagtccaggcactggatgcaggcggcgctcgggctgctgtagagctcgggcaccagcagccccttacacttgccgaagcactcgtggtacacgcggacgctgcgctcgctgagctccaggcccagcgccaggctggcggccagctccttcttgcagggcggcgggtaggcgccgccgtagagcagcgcgttgcacaggcgctcggcgtccgtcttggtgatgagcccgcacgagggcgccgagaagggcaggatgcccatgactttgaggatctccagctggtcggccgtgcagcgcgagcagtagatgtggagctcgtcgcacaccgcgttgatctgctgcagcgagaagtcgcgcagcaccgagttgagaatctgcggcagacacaggcgcttctcgcctcccaccacgaagcacgagatggtctcgccttccagtacggtctcgcagcgctcggtggagcggtcggacggcatgaagaagggcccgggcagcacgggcggcggcggctggatggcgggcaggtgcagcacgggcggcggctcggtggctgcgggcaccggcgccggcaccgcggccgcgcccgcctccttggcgctctccttcttgtaggcctcctgcgcccagcgcgccgagaaagcggccgggccgcccagcgagctcatggagctcaggtggaactgctccagcgtcttctgcagccccgggtgcggctggaaacagccgcggccgcctgccgccgcctccatggtgcgctccggctcccccggccgctcccgctcccgcgcgcccgggcccccccggcccccgccgccgccccgcgcgccccggcggcgcccgcggccccgaccccggccgccccccgccgccggctcacggccgatcacggccgcggcctcgcccgggggcgcgaaggggaaggcgggcggggcgaaggggtcccgccgctggagcccgccgccgcccgggcccggcgccacatccacgcgccccgcgccgcgcccgccgccgcccgggccccccgcgcgtcccccgcgcgccccccgggctctaggcgcggggcatgccccggcgcgcgccgccaacgccaacgccaacgctcgcgggcccggggctcgcggggggcgcgcgggcaggtgccggcgccgcgaggcgcgaatcgccgcggcggccgaggccgaggggcccgggaggagcgggggcgcgggcgcggggcccgccgggccgtcctcgcgcggcgcgccgccgccgccccgctcctcccaccgcgaggcgcccgcccggctcgtcccggcggcgctggccggccgcgtcgcgcccgccgccggcccccggcccgcccgcccgccggctccgcggcccgcccgcccggcttccggggcggcggaggcgcctctcgcccgcggccctcagagcgcggcggcggcgcggggctcggggcgctcggcgcacatcctcccggcggctcgctccggctcggactgagcgcccggcgctgagctcacgccgccgccgcgccgccccgccccgcgccgcccgctccgccccgcgccggccccgccccccgcgctgtttgttgccgtgcgtccgcctcagccctagcgctggccaagaatgtgacccgctccccagccgggctcttccaggaacgcgcgctccccgcccggactcggccgcgctcggctccgctcgcccgggactcggccacgctcggacccgccctgccatgactcggctccgctcggccgggactcggctacgctcggccatgctcgactccgctcggccccgctcggccccgcccgccgagggccgctgggcgcgggcggaggcggaggcggcggtggcgcccggggccccccttccggccgaggccgcttcctgcgccgctgggaaggcgcccgtctcgccgccgtcggggcccagaaacccacaggcccccgccacgaccgcaaaccagctgggggcggccggggggccacgccacgcacccggggttctcccagggtgggacaccacacagcggggaggccccggacgcctctggggtcccacacactaccgggacgccacacggtgacctggggtcccacacacgagggggacagcggccacgcccagggaccctgcgccgagacgggcaccgcgtcgcgtgaccctggcggcgcagcccggcggcccccgctgcgccgtggccggtggctcggtggccgagtgtccgcggctcccggccgcgccggccccgccccgcccgccggcccctggcggagtgtccctgctgcgcgggccgggggcttcgggcctgggaggggcggcgcccggtgccccagacgcagccggtctgccagccactcctgccaggtggcttatcaggacttcggccccgcggggcccggcgttcgggccggcgagacccctgacctccgccccggggccgtggagcgctgagacgtctttcggggtcggatcggccggccctccacgcctggccacgcagtgggagagactcaagccttggcagggcggggagcgggaagcccggggccccgaagttggacagtcggccgggtggtctccaggggaggcagcttccagcgaggcctgcgggcgcagggacgcaatggtgtgtttggggaggggcagggctcggtctgtgctcgcctgaggcggagggacatgccccacgggccgggggtgcccaagctggcctgggtgctgggcggaggcgagagggccacgccgctgcaacctgagtgaccttcagctgggacctcctgcccctcacttccccagtggaggctggaacctgcctcaaaccagc

SEQ ID NO: 2005 - DNA, 4001 bp, Homo sapiens
cacaaaagggtgtgtatttaaaaataaaaacactgaaaaacttttgtgaagattcaaagaagaaaacatgcaatgaagtgagcagcctccgattggatagacttgccttgtggggctgggttgcttctccctgaccggcgacttccaaagcctcaataagacgagctattggtcagcagtgcctaagatgctatgggccaggctggccaagaggctagcaagcacagagatggaaaagtccagttcacagttcagcaccatcactccatcacaccttacagtcaccaagaggtgctccagaaatggtgcagtcacaaattggttgcaacaacggaggcttggctttccctgtgaccacttaaagtggctcgatttggttttctgagccccgagctcagttcttcctcccctagaccttgggaagtacgagccatggatctgcagattccaaaagaaagtgggctgagcaagccctgttcgtctggctgtctggtaaaagacacatccattgtgcagcacccccacatccctggcatatcacggtgcttttcctggaaaagtccatattggatttgcggtcttgaaaaccccaagcttaaaacaccctgggcctcaggatttccccccgtgtccgtaatgccacctcttctactccaggctacctcccacagtctaaacaaataagcagaaggagattctcaccccactcacacaggcagtccaaagtccacttcttgcttggctttttctttctcaaataccttttctcatagccctgatacttctaaacagaaagcaatagcctgccttgggaagaagatagacagaaagacaggaacagagtccagatccaaaggtagctcttgtctggccttcctgctggagctactctctgagggttcccaatttgcatttcccacatactgtaaccagccctagccttcagaaatcccaacttcttccctcttgctttcttggaccttctcttccaagaaaatacacaccagtatgaccgcactgtggccactgctggttctcagccaaaagcctggagttttcacttctactctctcttcccactctagccaatgctttctgttgacccatgctcctggtttgtcagcctgcatgtgcacagattccctcccagggcagggatgtagggcaaatcttctcccagagctcagtccatccagctcagtctctctaggctgggtctttgccagaagatgcccatgtaaaaccaaccactcaagcaagacttctaccagggcctgtcaccctaagactggtcagaaaagtgactggagcctttggcttagagcccctcatttccttggaaactggggttggtggggctgagtcttggaaacccaagggcccaggaacttataatgttccttcctctttgaaagaggcagttgaaactgacagccagtccctaaggaagagtgaccaaacacaatacccagccctgcaccttctctccatccacgaagatacgctgattcctggcagctaacatgggactcaaaccatcaggcagatgaacactcacctgttccgtagcttgccccaaaagccagggagagaaacagcacgaaggtcaaggagaggagccccttgggatccatcagccaatgaggagaaggaagggatcctggccggagcctggcagctgctcacagatgccaggcagaagcaagcttcgtgtcatgcagcagaggctgtctgatttatgtatcaggaaccagcaggttcctgaacccgcttcctgtatcactgggactttttctgcttgtgtcttgaggattgctcatctcccatgaggctttaaatcacttttttgttctcaagaagcaggcttctcaagaagccaggcacttagcctatgggagccaggaaagggggtgtgtagtcacctcggccaaaacccggctttgggcagaaacatgcgccccagcttctttccttagctgtctccaggaaccggatgttgcagattctctgagcagttctctccggtaagtcttcttggattgcaaagaaaagatgtttcattggatcactcctcaaatttggcagttcacagctgaacttagataactgcattttgatgagctaatagacctcttacttctgttttatttcataatttcagatgacacctcaacatgcagtctggtgcaggtgccactgtcacacagagatgggaagggcatgtgcgggtcacttggaagaaaccctgtgaccccgatgagtgcaatgtggtataatttagtagcccatgctcctagtttgtcttcttgcatgtgtgtggattccctcccaggcagggatgtaggacaaatctatcccagagctccatccttccagctcagtctccttgttgtgtgtgtgttttctcctctaatttttaacgtctgtgggtacatagtagatatacatatatgtgtgtgtgtgtgtgtgtgtgtgtgtgtgtgtgtgtgtgtgtgtatgtatatatatatgtatggggtatgcatatatttgtatggggtatatgagatatgttgatagaggcatgcaatatgtaataatcacacagggtaaatgggatatccatcacctcaaatatttatcctttgtgttacaaacagtgcaattatatttttatttttaaatgtgcaattaaattattattgactatagtcacactgttgtattatcaaatactagttcttattcattctttctatttttttgtacccattaaccatccccacttcttccccaacccccactacccttcagcctctggtaaccatccttctactctctatgcccacaagttcaattgttttaatttttacctctcacaagcaagtgagaacgtgcaaagtttgtctgtctgtgcctggcttatttcacgtaacataatgatcttcaattccatccatgtcattgtgaatgacaggatctaattcttttttagctgaatagtacttcattgtgtatatgtaccacattttctttatccactcatcggtgatagacgcttaggtcgcttccaaccttggctattgtgaatagtgctgtaataaacatgggagtacagatatctcttcaatatactgatttcttttcttttaggtgtatacctaccagtgagattgtggatcatatggtagctctatttttagttttttgaggaaccttcaaaccattctccacagtggttgtactaacttatattcccaacaacagtgtacaagggtactttttctccacatccttgtcagcatttgttattacctgtcttttggataaaagccattttaatttaattggggctgtgttgtattctgggagttgcctttattttggagtttgtgtctaacttttcattgaggagaaggaactagtattggcagaaggaggatcccgccctttttcatgagttaaactataagaatgggatactggaagtgtaaccaatgctcacagggagacttgaaagagtagggaagtgtttttagagtccattgtaacaggtcataggcactctctgatgggcctccccatggggatcaggtaataaaagctggtgagatatgtgaactttatcctcactgttttcttccttcctttccccagcactcaactgtcctcctcacaactattcccagtggtgtgtgctcgagtcagcatgtaccaactcataaaattgttaaattttcaggaatctggatgggcacagtggcacgcctgtaaccccaccatttgtggaggcctaggtgggagaatttttgaggccaagagtttgaaaatagtctgggcgatagagtgagacctcatgtctacaaacaattttttttaataaaaataaaaaatagattttcaggaatcttgtgaggtgcttgatgaacatggccattattaaacatataaaattaaattaaattatataaacttacagttaagctgggcatggtggtacatgcctgtagtcccaggtactt

SEQ ID NO: 2006 - DNA, 4001 bp, Homo sapiens
tgtttctctttctatacccatttcccccataaatgtggggcagtgagcaagttactttagtgttctgtgccttctttccccatctgtgaagtggagattggagcactgtatatttcatagggtcattataagaagtattcatggaaatagggagaagaagaggagttttaacacaaggacattcagaatattttattctagaggtggaaataattttgcagggtggtaaaaatgaagcaaaaactcaagattctgctcctagatcaggaagtggctcttgaatgaaggaaagaattctctctctttctgcattttatatatatttcccaaagttctgttctcattccagttttctcctcagcttaacatatctctatgccattgatttttaagtctctagcctcagctctacccctagtcctaagttcccaggatcctccacgtaacttcctcatgtatagcacactgacatcctaaaatcagtaggtccaaaattgaactcaccttcctcctgtggctgctctccaccttccaattttgtcactttctttggctatcctgtctgaaatttcactgccgtctttaccatatttcatctctccctttccttcttgatttatttcttcctacccaatacactattttacttgtttatctttttttacagtttgtctcctgctaaaatgttaactccatgagggcaggaatttttgcttgctttgttcatgatgtattcatgcaaactagaagagtgccaagcattcagtaggtgctcaatgaatatttattcctttctcattccaattaccaattactctacttaactccatattgatgggatctcttgcttcagtctcttctttctcttatgctgctgccacacttgttgaactgttattttttctcataactattacaagagcttgtcgcatgctggctaatgaaatttgggcaaattatttaaattaagttcacctcagttcttcattttaaaatggagatattaatagtataaattcatagaattctcatgagactcataacgtgtgtacagcacctggcacaatacttgaaatacaataagtgctcagtgaatgcttcctacttttatctgctaccctgggctagctctggactagatttccattggtctcctggactatctctgcctgaatgctacactttgtctcccgtggaccacttgtagttccccaaatgtgatatgaatcttcatcttctccatataatggacagcaggaaacaagaagccagctggatcagttcattcttttctcactgccatatataatgcattgctggactagctagccctaatttgcactaaaggaggggagagatggaaacctttttttttgcaatgagcaaaaggtgagagggttatttttggtgtgtttggttgggcccagaaaatttggctcaactgaataataggtttttaataatttagatgaggatagtgaggttcaggaaggataagtaacctccctgaggttcacagtacgatagtagatacattggtatgagggcccattttcttggtcttggtactctttataacacaagatgctggtcataaaccacaaacagtcttgtcttcaaaagcttatttcctctgccccagcaaataactttcttacatgcagacacaattgaaattgttcaccgacaaccatctcaggcttatcgcatccaaagttgagaggaggtagtagtatatcaggtaacactgccagcgtcccctttcccgccccaatcccttggcagagagccagacaactgtatacagacgatttaggttgagcaagctgcacaaaaccagggagtcactcagtgactacaccgatctggattgacatttacctgggccaaagcagaagacaaacaggagcgattggaacagccacaacatgctttccgcggtgaagactggtgcttgagaccttgaggcagtcaatgtttttgcccttctgtcataaactgaaaatacttctgagacttccccttcctcttagaggcgtggtgacaacttcttcccctgcactaaaaatcctaatttgtaactgtgttaattttttgtttacttttttctgagctaagtgcacaaattttttttttttttggaaaagaagataaagtcctttattgcatctttcataaacttatatgtaaaagtctgtaaggaatttcctaaaatctactagaacaaataaatgagttcagcaaggtgaaaagatacaaaatcaaaatataaaattcaattgcaattgtatatactagctatgagtaatccaaaaataaaattcaaaaaacaattccactctaattacattagaaaaaaatatttaagtataaagctaagaaaaagccaaaagaaaactgattttttaaaattatactttaagttctagggtacatgtgcacaatgtgcaggtttgttacatatgtatacatatgccatgttggtgtgctgcacctattaacttgtcatctacattagatatttctcctaatgctatccctccccttgccccccaccccgtgacataccccagtgtatgatgttcccctacctgtgtccatgtgttctcattgttcagttcccacctatgagtgagaacatgcgttgtttggctttctgttcttgtgttagtttgctgagaatgatggtttccagcttcatccatgtccctgcaaaggacatgaactcatccttttttatggctgcatggtattccatggtatatatatgccacattttctttatccagtgtatcattgatgggcatttgggttggttccaagtctttgctattgtgaacagtgctgcaataaacataagtgtgcatgtgtctttatagcagcatgatttataatcctttgggtatataaccagtaatgggattgctgggtcaaatggtatttctagttctagatccttgaggaatcgccacactgtattccacaatggttgaactagtttacactcccaccaacagtgtgaaaacattcccatttctctacatcctctccagcatctgttgtttcctgattttttaatgattgccattctaactggcatgagatggtatctcattgtagttttgatttgcatttctctaatgaccagtgatgatgagcttttttcatatgtttcttggccgcataaatgtcttcttttgagaagtgtcttcatatcctttgcccactttttgttggggtttttttttttttcttgtaaatttgtttgagttctttgtagattctggatattagccttttgtcaaatggatagactgcaaaaattttctcccattctgtaggttccctgttcactctgatgatagtttcttttgctgtgcagaagctctttagtttaattaggtcccatttgtcaattttggcttttgttgccattgattttgatgttttagtattgaagtctttgcccatgcctttgtcctgaatggtattgcctaggttttcttctggggtttttgtggttttaggtctaacatttaagtctttaatccatcttgagttaatttttgtgtaaggtataaggaagggaaccagtttcagttttctgcataattgctagccagttttcccaacaccatttattaaatagggaatcctttccccattgcttgtttttgttaggtttgtcaaagatcagatggttgtagatgtgtgatgttatttctgaggcctctgttctgctccattggtctatatatctgttttggtaccagtaccatgctgttttggttactgcagccttgtagtatagtttgaagtcagttagcgtgctgcctccagctttgttcttttggcttacaattgtcttggctatatgggctcgtttttggttctgtatgaaatttaaagtagttttttctaattctgtgaagaaagtcaatagtagtttgatggaaatagcattgaacctataaattactttgggcaatatggccattttc

SEQ ID NO: 2007 - DNA, 4001 bp, Homo sapiens
tacctggagagggaagaaaccccaactggtactccctgaggaagattcagctcaaatgcacatgtagtgagcatctctttggtgccaggtccagtgatagacggcttgttatgattaaaagagcactagctttctagctttctaaactcaatctctggctaccttataaatgctgtgttatcttgcccaagaagcgtgatctctctgctgagcctaagtttcctcaactgtaaaacagggataatgatatctgtcttacagactcatgaggaggtggtatgaaaaacacctgcgatgtagtaacttaataaatggtgattattttaataattattttgcatttgatatgtcatttaaaatgtcacaataattctgcaacttagatttcattctctgttacacacctgagaagagcaaggctcagaagggaagagtaatttgcctacaataatacagctactaagtcaaaccaaggatgcgcttgtccagtgccaggatttgttccactgccctgcccactggaagttccaggacaatctctgtctcctttcagcctcaggaggtacactacacaggctgcctctggaggagggcagagggggacctgcatggcagtttttcatacttgtgctctttcgctgactgatttcagatggacacctgtagctttcaaagtctctataattttccccaacccctccaccttatctccctcaagttctatttctgctcatcatttccgttcagggagttttttttttgttttttttttttaaagtgagggcctattccagaaccacctggttagacccaggtacctctcaaaaatacaaacttctgatgaattcaaagtgggtaagagtctgctgatgctgaccacttagcgatgcaggggaaaatattgggggcaccagctgcctgcgtggtcttgggcagatcactccaggcaggctcagatacacataatgaagcagttatgtgaagtccttatagggggacctcatggtagtactccatgagattgatgacagaagagatatttctcacttatagggctcctgatcctttctgagagcccttaggatagaaaaatcttcaaagactagaataccagtgacaggtggagaactgtcctctgtcctccatgggattaaacataaagtgcctatggtatgagttggttctctaagtagagactgattacattgcttgagtaaggaaagaaaattcaagtgattctttccatttatattactgttatgcataaccaattttataaatacatttataagtaaataaatacatacctgtatagtatcatcttgttcttaaagttgccctcaaaaggagagaaggctagaagataaagtttctgaggcccaggaaaactttaacattccttatctaactcatggcagaacctggattagaaaaatggtctctgatacccagcaccacttctttcagctccttcatccctgggacagtcaacaggggagtcagttcccagagccatttttccccctctctctagtctcttcctgacctgagaatcagagatcagagattgataaaaagcaaatgttagatgagaacacagagcctcccgagttgagccagaggcccagagtggaacaagaaacctggaactattcaggatggggtagacaggagagtggaagagaatccggccggactcacctgtgagctgccaaaggatatagatgagggtgaggcatgttggggaaccagccatattgctctctggaagtcagccactgaaatgaagccacttccctcttaggtattactcagacctcttccccagctgatatttaaagaagcaggaggggtcacgccgcagacatgtgagattgagtaattgctaaattattttcagagtgaatagagcattttaccttgccaccagcaatctatgagagatctatttgctccccatcttcatcagcatttggtatattcccattttatattttagctgttttaataggtgctgtagtgatacctcattgtggctttaatttgcatttccctaaagcctaataatgttgaacatcttttcatgtgcttatttgccatctatatatccatatcctccttggtgaaatgtctatttatgtcttttgtccattttataatcagattctttattttttttactgttgagctttgacaattccttatatgttccaagtataagagtcatttgtcagatatgtggtttacaaatattttctcttggtctgtagcctgtcttttcatcttcttaacggggtctttggcagagcaaaaattttaattttgatgaaattcaacttatcagttttttttctacccacactagggtccaaaggttttctcctgaaagttttatagttttatgttttacatttaaatgtatgatcctgttttaatgtaaggtgtgaagtttaggttgagattcacctaaatatattgtctatattcattgagaaccatatcaggtaatatggttgacagtttttttttgctttcgacacttgaaaagtgtcatgacactcctcccctccatggtttccagtgagaaatcagccatcatttaaattgttttccctataggtaatgtgtcatttttctctagctgttttaaaagttttttgtttgcctttggttttcagaagtatgattacaatgtgcgtgtttttttttcttctgcctgtgggtgttcaattgttctactaccatgtgatggaaaagatgatctttcctacattgaattacttttgtatctttatcaaaaatcagcacttatacttgtgtgggtatattctggagctatctattctatttaactgacttacataatgtaattatttatatatcagagcttaagtttgccatgttattattttctctttgttcttctgggcttttgtttgtttattttgttcctctgtttcactttcctggccatcctgtgtgttactggaatattttttataattccattttgatttatctataatgtatctttttgaagagtttttttactggttgctgtacatattgcattttacatacataacttttgatctacctatcagtgttgacattttaccagttgaactaggtatagaaaacttacctatattaggtttctttattagtctatctttatacttgtcttaaatatattgtctatattcattgagaaccatatcggtaagattataagttttgcttcaattgttgaacataattcagaacactcaagaggagaaggacaatccattacatttacccatattttaactcttttcattgttatttctttatttctaatgtttcaagtttccttctttttatttttttttggacgaagtcttgctctgtcatacaggctggagtgtagtggcatgatcttggctcactgcaatctccgcctcctgggttcaagcgattctcctgcctcagcctcctgagtagctgggactacaggctcatgccaccatgcccacctactttttgtacttttagtagagatcaggtttcgccatgttggccaggctagtctcaaactcctgacctcaggtgatccaccaactttggcctcccaaagtgctgggattacaggtatgagccaccacacccagccttcaagttttcttctttaatcatttctttctgtttcaagatattctttaggaattcttttatgataagcctgctgataacaaattatcttagttttccttcacctgagaatgtcttgatttaaccctcattcctgggtataaaattctaggttgacagttttttttctttcaacacttgaaaagtgtcatgacactcctcccctccatggtttccagtgagaaatcagccgtcatttaagttgttttccctgtaggtaatgtgtcatttttctctagctgttttaaaagttttttgtttgtctttagttttcagaagtgtgattataatgtgtcttggtgtgaatt

SEQ ID NO: 2008 - DNA, 4001 bp, Homo sapiens
ctctattcttattgcctgtttatgagtcagcatctcccactagaccgtgagctctttctccccatcgtttgcttccagtgcccaccactgtttaagaacagactgtgggagaagcctagtaaatggtattgaataaatgacctaccctgctgaggactgaccctatgcctgtcgctggcacagggtgtagggaagaataagaggtgatgaagttttggtcaatgagacatgatctggatggttgctcagtcggccatgataattccggtccccctctgcctcactgtcctccaggcccaacaacctcctctcacactggagatgacttcagtgttaatgcagagcaggaatgtaacacacaaagagaattgcactggatgtcagccaagacctagctgctcctacctgctcctcctggtgctgccacagatcagctgtgtgcccttccacacatcaccctgccccaggcttcagtaccactgaaaaataaggggtctgtaccaggtcagtcacacagatctttgatcattaagggccatttgaaaaattatttttgggctgggtgtggtggctcatgcctgtaattccagcactttgggaggctgaggagggcggatcacttgaggtcaggagtttgagaccagcctggtcaacatgatgaaaccctgtctctactaaaaatacaaacattagccgggtttagtggcagtgacctgtaatcccagctactcaggaggctgagacaggagaatcgcttgaacccaggaggcagaggttacagtgagctgagatgcaccattgcattccagcctgggtgacagagcaagactccgtctcaaagaaaaaaaaaaaaggcaaattatttttgtctcaccaaacagaccaaggccttttttgaggttaaggtgtgatttcctgcacatgtttagaaatattgaagaaatctgcaggctttggagctctcagggccaggaactcaggcaaggagatgaaacaaagcaacccaaagtccctatgagcctctgatgtaaacaatatcatcttaatctttgctgcaccccataaaccctcatccatggcccggcagtgttgacccatgtcatgttggctgcttgttgaccaaggaagggaactcaggcatcagatggatagagggatcgcccggtgtggaggagaccccgtgtatcagccatcccaacatcacaccaccgtcggccacccctaagtccacgtgggccacatttagcctctctcatccctacttagtacttgcctccccttataaaggcctgtagggagggacctcagctcccccacaggctgttgaaaacacactctgctgattgtggggaaccctgctctgccctgccctctgctactctcctcaaactctgcagagtttctgcatgctaacactgccgggtcctcaccattctcacagccgactttctctccaaaccagcagtatcacccactggctccgtttttactgctctgggccacaaaacagctcatgtctcacagataagaatacccctcaagctgccacctcctccctcccaggaccctgcatctctttgtatctgcctagcttaaaatgttgcccaagagcttgttctagtctttcctacccaccctcagcttctgggttctcacccaggtcgagggatccctgcccagacgtctggcataggcagctggggaggggccttcagctctccgaggacaggctatctgcctgccccacttaccttcccagagaagcagactccacaggggcctcatgaccatctttctctggagaggcaggcaaactccctcgacagccaaaatccagaacctcccaggccgagtggatgcacgggaggagctgtggtccttctggaaagtcccatgttcagaaggaggaatcttgactcagaacaggatgtcccaaaagtgaaaacatccagaataaagtggaagttgtccctgggcctctctgggcttacaggagcagattcttgtaagtcagcctctttcacatgcacatggttggctaacacgtggcgacaacagcccccacacaagccacatcctccttgctggatctcgctggccttcctgcatctcagcctgcctcactactatctgtcatcctcattctagcttaaaatgcttctgtggcctcccgtggacctgaggatgaggactaactctgctctgcatgcaggccctcctgagtcaggccttcttctccaggctggtcgcccacagtcattctgccctccagccatcccaagccagaaggcctccttctcagaactactgatttcacacttccctgtgttgtactttccccaccaccccgactaggcatgctgctccctctatccttgcaaacagaacatggctgtgcagtcggcgaggacatccttccaggcttcctgaccacaggcaggtgagaggccctctccttgtgtcctgtgcatgcccacacctccctctttactcttgctgtgttgttgatgacagttttctggttttcacagactgtttagccagtcttttgttcccttctgtgttgccctcagtgcttggcacattacagatgtttcatgagtatttgttaagtgagtgagtacattctagacatggctacacatctggctttatgtaagccttgcaactctcctctgagaggatcatcttgttacctggttagaaatgggaaaatgtgaaaaccagagtgaggttaggccccttgcagagctcacagagaggcagagctggaacttgaacctcagcctttgaagtgtggtctattttgccacagttatcccctcctcatcctgtttctcttctcacttcaagtttcttggtttcttgccagtgaaggtttttagaggacgtgttgcccctgaggaaaattcctgctagtctggagtgtggctcatcgtatctggtcctgcacagcctctcgcctgtcaatcaaactggacactgagctttggactcagccaggaactaggcatataggatggggtgggggtgggtggtgagcaggaggattttgggataaggtttttgccctccaggtactcacaaccaaaatgtagagataggtacaccaaggaaagtgaagggttatctgcagacagacaccactttgtgcaaacaggtagtcagtcctcagaagtgggtgggaaagagggcttcgcggatctgggcaggggacgcttcttgagaaggtggaatttgagctgtgccttgaagatgggcatggtttagataatatgaggaaaggagagagccagaggttgggggtgggctctgggcaggaggggagagcagagcgtgcagggatgtggctgtgggaaaataccaagtaggctccacagaggacaagggacagcagacaggaatcctttagggctgggtgggaagaatggaaaaggaggttgggggcagattgtggaggccttgaaaactgggttaagttcttctggagactagtggctctcaactgtgttcagcacttggattctcagagatgccatcagggtgagctagggcccaggaatctgtggttgtaacaagcaccccactcagcgtgagtctgtggctggtggactgggggaccgctccggaagcactgcttgaagagaggggctgttgcatgttttaagtaggagtgggaggacagcaggcagggcaggttggagagaacaaaggggccagggaacctgaacaacagctgttgtctgttgtgatggtcctgtgagaaggagaagggactgcatatgaaggaaatgtctagagtactgaggaaagggcagaactgggaagctgcctgtcatgggggtggagagggcaagggagggaactcatttacgactccattgccaattccgtcattcattcctcaggcatttattgagcatctacttaggtgccaggacctagggacacagagatgaaaggctcagcccctgaccttaaggagttcacagaagatggta

SEQ ID NO: 2009 - DNA, 4001 bp, Homo sapiens
ctggtacctgcatagaagggcccatcagggatggggcaagaactgacgttgctgatggggttgttggctctgcaggtgtaggagagggcactgtcccccggcctccaggatgtgctgaggacagggccttcatggaatgtataagtgctatccccccgggagagccagctgtaggtcatatccatgcctgccttctccacagagcacaccagggacatactgcaggcaccttccccagaactctcaaagttcacagtgatctggggctctgacagccatcctggatgaaggggaaacacaaagaccctctaaacaatcagggatcgggtctgttttcctaagctcctcaaacctggggtactaatgctaccccttgacagcccctgcacctaaacaacaaataggcaaaagcaaacaaacccaaccaccataaaacctgtggtttcaaggtccccaaggcaactgtcaaggaagacagagctgcctttggcatcttccacctcccctttacgtattctctctcttacttttgtactctaccttcctccaaaccccattctgtctccttgatcccatgaaatattatcgcccctctcaggggcatttacattttaatcagtgtcccttcaagcttcaaggtagatgcagtgtgacagacactaagaagaaatttgggttcaagtaaagagaagatactcattagtagccctcatcacacagggaaataaaaggctcaagaatgtaggtggtgttcatccccagaacacaatttcactggaagagaaaagccccctacaggatctgtacatgaagcccctgatccctgccactgcatcggacagcctccttgctccaggtcactccgcctgttgctgcggttcagatacaacaggtggattgggcacactcaatcacagtatctagattggagacagtctgcctccagttctagcccctcaaaccataaccccaagtcctgagacgcccactccatggtgtgagaagctcagaagagcccccaaaaccagctttatggttcccagcctaaactcacggtagacacatatattgtactgctgcatggtagagatctgggatgttctcaggttgacttgagcttggtaaagccctgaatcctcccagctcagattgctgatatgcagggaatagctggggtccaggaagctcacttggccctggtagtgtggattggtcaccatgatggtagctggatgtccctctttccctggcaccacagtggcaagacttttgtgagaggaccagatgatgttctcaacctcttcatctggtggtatttccagggggaggctgatggactcctgaaggaccgcaaccacttcctcggatccacaccatctccagagtctcctttggctgcctatgcaggaagaaaagagaagcaaacaacccagctgctgtctctgggctgctgaacctggcagtggagctgccagagtagcgtaatctcagctgggcagcttctatgactctcacactaaatcctgttctccagctgctgcttctgactctagatttcccctttccctgagttaagcacctaaaaggagtttgcttccatctgtcccttcaccctccaagttttaccttctcctttgccatcttgggattgctctttcttccatatccccaggtgtctctcggtcctgccctgaagccacacaccctactccttgtaactccagaagagctgacacattcaacccctaagaaagggtcttactggcccagacccagtggggcaggggaacagaggtgtaggggacattcctgtgcacgagctggcagcttcactcaccctcctggagcagcaggagaagaagcagccaaggaaaggcacacatgtcagcagcccccagccccagaggtgtgattcagtcagtcagtccccaggactgtgcagaagactgcattaggaggctcctagacacaaagagcctgactgatggtcctgagaaaagggaaataattttcccctgactacagccctctgacgtcctctgtcctcactaagcccctccctatgtatcatggctctcttagttctctttcagatcctgattgtcatgacagtttactcactgactcatgatgccatccaccaaactcagcccaaatcccacttcctaaatgaagtctttcaagacttcctacccgccccaggtccccgcacgtactgcatgccccgaactcgtagaacattccctatcctgttatttggctcccaggatattcttccctagctctctctgggtaattcctatgttgctgtgatcatttgatcttataaacatctatatctccccagacagacttcatctttcatttcctgtgtatgtcccattattgctggccccatactagacatgtgtctgcactcaattgatagctttataatggatgaatgattaagcctttttatttaaagctagttatgttcccacctgagaggctattcgcaggggaaaaacatttgattcaatcctctttaagaaagcagtttggccgggtgcaatggctcacatctggaatcccagcactttgggaggccgaggcaggcagatcacctgaggtcaggagtttgagaccagcctggccaacatggtgaaaccccgtctctactaaaaatacaaaaattagctgggcatggtggcgtgcccctgtatgccagctactcaggaggctgaggcaagagaatcacttgaacccaggaggtggaggttgcagagagccaagattgtgccactgcactccagcctgggtgacagagcaagactctgtctcaaagcaaaaaaaaaaaaaagagagaagaaaaaaaaaagtagtttgatcagagagttgatctatgttgttcatattatgaaaagactttaaatcgttttgtgagaatacaatgttgatcaacttatatgaattcagattcaagaagagactgcagaggatcagggttattaaatagcttcctggcagtcaaagctgttctggatgcaatgggctgccttagaaagtagcttctgtccctagtattcaagctaagaggacaatcacttgcttggattatctgcaacatctctgccatcagatggattctcagactggataatctttaagtttcttctaataatcaattttatgagtctgtgctgtgaagagtggtgtctcaagaccaagggaacaatagaggaagacgtattcagctttggtcttgtgccaacatttcctagttttaggttagcaaattcagaaatctgttaaatgtttattgagtagcttctatggtccatacactgtcttaagtgctggggaattaacagtgaccaagaattttagatcgtgacttcatggagctcataatgctaacaattgacattggacaagtaactacaagtttgatgaatcttaccaaaggaataattgaaggagcctataataaggcgatttggcaaagttggagtcaggagggttggggaaaagctatcaaggagagatatttaagatgagaccttagttcttcaaagattggtagaatctgcttagtgaagaagataatgaagtgagtagttcttaaatttcaatttatgagtataaaacctgagggattagaattttttcttaaaggtgaaccagatttcagtctgagtataaaacgtttttatgtaataaatctgtttaacaaataaaattagatccagcaatcccactgttgggtatacatccaaaggaaatgaaatcagtatgttaatgaggtatctgcactccacgcttattgcagcactattcactagagccaacatatggaatcaacctaagtgtctatcaatggatgaatgtgtaaagaaattgtagatatatacacaatggaatactatccatccttaaacaaagaaggaggctgggcaagggagctcatgcctatgatcctagcgctttgggaggccaaggcaggaagatcccttgaggcc

SEQ ID NO: 2010 - DNA, 4001 bp, Homo sapiens
aaattgccgaacatataaaattcacaacaatctggactgttttcctcatacccaagttccatcttcctagtcctcaactgcaacaaaaacaagacagctatgtaggcatttacgcagagatcttaatcttgcataggagtgagcattataaagtgaattgaaaacacgatgggaatgcagaacataaggagctgagaaatctattttcaggctgagataatttgtatccaaatttacaatctaaagaaaaatcaggagtgccaatctaacaaaaatgagtccaaagacacacatagttcccaccaaaccataacaagttttcagacctaagatgttagatcacttaatccctccagccccagtttccttatgtgtaaaacaagggatcctgatcagctggtcattaggatcctttccagggctaatatatgccctaatatttaaaggctaaaacatgtaaactagtgaaatactaatcatttgctttcatcctatagtgatatgacttttttcctttttaatctgtttaaggacattacagtctatcccgttaagcttacaactaaaccttcaaatctattcagctataaaaatcttacaaaatgctcctcagatcattaacttgcatatttaacaatggtaactgcaatctgatgaaacaacagcatctacctaagaccaaaatgaattactgaaatatattcaacttctgtgtaaataataaatcttaccacgtgttttaagtgctaaatatcttgaattgttggtcatttctatggcaatctgaaggcaaagtcgtgccccagggtgtaagacttgaatttatgggtactatttaacacctaactaaaaaactgaagatacatagtctttgcatcacctcactgggctggtggttgggataaaaaaattgttgaaaccagagtaatttttgaaaaaaaaattcaaaacaagttatagtaagttacagtaaataaagtagcttagtaagttacagtaaataaagtagcgtgtaaacattttactgttatcagtagcagcccagtttctaatcagccactggaaacccaaagaaagactaaagtagtaacaagtttgtctcctggtttagattaattacaaactagttttggcaactgcttgttccatcaaatatgtcatgacaaagtaataaaatgttaaaacgcatgctggaaaaaaaaaaagacgtacttggaacaaaaaacttgcatcggaccaagtgtaacgctatcctccagatttctctcaacagggccgccttaagtccatgagtagaagggcgctgcggcggacgctggcagccacaggttgaatgacaaagagcccccgtcagcaccactcccaggagtctgcgggctgccccgtcccctccgcaaagtctactcgaaccctgcagtcacgccttggctgtggggaatgcggctctccgcaccactctcgcaagtcaccaggtggggcaaggatcggcgggccaagaaggttggggcggacaatgtcacgaatcataaataacttctgccccgagtcccttcccttggggcagaagcggccaggagagtctggaggtaccacatgcagcagcctcatgttatcccttttccagatcaaagcatctctcgaggagcctattgaagacttaggggggaagggacttccccaccgtcaccgggcaccacgacccaactcctcggccaggcctgggaccggcatcttagcacggggcccgcggctcggctaagagaggcgctgaccccagcgcctcaaggtctccttcaccagcactgcagtccgaggccacgcggctgcctgtgaccacgatgccctctgctgggccgcctccctccgccggagacaaagtctcccaaccccggaggtcccctccgaccccaccagggcagcgagggcaccgtggggtccgcgccgcgtgccgccggctgttacccaactaaccgttatatgcgcggatcgcagcgccgagcgtgtgcgtgacgtggtggcgcaggctggagttccacggggcccagggtccggctcccgtccttcgctcgctgcctcgtttgcttgttccagtacccacgcagctagccagtcacgtcgcagctcaccactttgtctggccgggccagcgaggctgccttataacccgccggggccggagcatgcgcgcagggggcggagtcgtctctcccggccgccgccccctccccgccacacagacatccgaactgcagcccgcgcctccacacgctttcagccgcgcgcgccctctagctcgcccgcgcgcgccggcgccccctccccgccacgtgaccggcgtcccagtccgacccgcgcgctgcgcccctgctgagcggcgcggagctaccacgccctgccagactcgcccttgggtccctgtctgacgagctctaggcaatctgccctcgttcgggacacaaccatcggtctcacccctcagtttctgccagagaaaaaggaaaagtcaccgagaggcctgaccctgacgggtgggggagatgcgcgtgcggagtagcgggaagcgactgaggagcggggaatgggcagcatttgaatggatgcgggtgccgctggcacccgggaagacgctgggggccggcgctgtagagccgggcatgggctgggatgtgtttggattccaatccgggcctgacaccagttcagtgacctcgggaagttccccaaccctccgggcctgtttcctccctctgaagtggcgacagtagtagaaccgacctcgtaggctcatcgggaggtcctgatgggagaacccatgcaacttgccaccatagagccaggcccgcggcggttggcgcctggtgggtattaaagacgagtcgggaaagaagagcaggtaagagggtggggagactggcccagtgggttggggtgtgcacctcggccacgtggaaaagcgagaatgcagaggccggacgcttatggacgatgcatatgtggggccggatagaattgtggcaggcggcgctggggctgatgctcctcacccggattatcctctctaatcctcagccctgtgaagtgggcactgccctgaacattttgtaaataagggacccgaggctcagagaggtgaagtaactttccagacagcccagctcgtcagcggccagcatttgaagtcacactccagagcctgtttttaacataatagccgctgtgaccgcataaccaacgtgtgtgttgaagtgatcaaataaccatggagtgtctttgatgtccaggacttttgagaaataccgaaaaatatgaggcaaggcccctgccttcaaagagcttgcaagtttttgggggagacttaggcacaaattaaccaacatctgttgagcacttgctgcttgccaggaccctgcccttcccctcgtgtcttcctcccttccaggactcaccccctcacttaccctccccctcacttaccctccccctcaattctcacagcaaccctgggaggtaggccttatggtttctgttttgcaaatgaagaacctgagattgaagaagagtagagattggaggatcagatcctgagaggtcccatgtgctttccaataacagttcagtatattagaagacagtgtggcatccacggccaagtactactagtgagtaatacagtaattgctttttacatttgataaacacggagaaagggaaggcatttcgggtcattggggcagctaggacttataagagcagtgctagggtggcagcagcattcaggtagatggtaaggagaattaagttagagagacaggatcctcagtctggttcagaagtaaatatataagggcctgttctatggaatgtagtgagaagtggttaaataagatgaatcccaggaaacctcaaaagaaggcttatagagccccatagggtggtagattcacactatagacctgagagccagatctgttcagttccaaatttgattcttgcacttacca

SEQ ID NO: 2011 - DNA, 4001 bp, Homo sapiens
acatagttcccaccaaaccataacaagttttcagacctaagatgttagatcacttaatccctccagccccagtttccttatgtgtaaaacaagggatcctgatcagctggtcattaggatcctttccagggctaatatatgccctaatatttaaaggctaaaacatgtaaactagtgaaatactaatcatttgctttcatcctatagtgatatgacttttttcctttttaatctgtttaaggacattacagtctatcccgttaagcttacaactaaaccttcaaatctattcagctataaaaatcttacaaaatgctcctcagatcattaacttgcatatttaacaatggtaactgcaatctgatgaaacaacagcatctacctaagaccaaaatgaattactgaaatatattcaacttctgtgtaaataataaatcttaccacgtgttttaagtgctaaatatcttgaattgttggtcatttctatggcaatctgaaggcaaagtcgtgccccagggtgtaagacttgaatttatgggtactatttaacacctaactaaaaaactgaagatacatagtctttgcatcacctcactgggctggtggttgggataaaaaaattgttgaaaccagagtaatttttgaaaaaaaaattcaaaacaagttatagtaagttacagtaaataaagtagcttagtaagttacagtaaataaagtagcgtgtaaacattttactgttatcagtagcagcccagtttctaatcagccactggaaacccaaagaaagactaaagtagtaacaagtttgtctcctggtttagattaattacaaactagttttggcaactgcttgttccatcaaatatgtcatgacaaagtaataaaatgttaaaacgcatgctggaaaaaaaaaaagacgtacttggaacaaaaaacttgcatcggaccaagtgtaacgctatcctccagatttctctcaacagggccgccttaagtccatgagtagaagggcgctgcggcggacgctggcagccacaggttgaatgacaaagagcccccgtcagcaccactcccaggagtctgcgggctgccccgtcccctccgcaaagtctactcgaaccctgcagtcacgccttggctgtggggaatgcggctctccgcaccactctcgcaagtcaccaggtggggcaaggatcggcgggccaagaaggttggggcggacaatgtcacgaatcataaataacttctgccccgagtcccttcccttggggcagaagcggccaggagagtctggaggtaccacatgcagcagcctcatgttatcccttttccagatcaaagcatctctcgaggagcctattgaagacttaggggggaagggacttccccaccgtcaccgggcaccacgacccaactcctcggccaggcctgggaccggcatcttagcacggggcccgcggctcggctaagagaggcgctgaccccagcgcctcaaggtctccttcaccagcactgcagtccgaggccacgcggctgcctgtgaccacgatgccctctgctgggccgcctccctccgccggagacaaagtctcccaaccccggaggtcccctccgaccccaccagggcagcgagggcaccgtggggtccgcgccgcgtgccgccggctgttacccaactaaccgttatatgcgcggatcgcagcgccgagcgtgtgcgtgacgtggtggcgcaggctggagttccacggggcccagggtccggctcccgtccttcgctcgctgcctcgtttgcttgttccagtacccacgcagctagccagtcacgtcgcagctcaccactttgtctggccgggccagcgaggctgccttataacccgccggggccggagcatgcgcgcagggggcggagtcgtctctcccggccgccgccccctccccgccacacagacatccgaactgcagcccgcgcctccacacgctttcagccgcgcgcgccctctagctcgcccgcgcgcgccggcgccccctccccgccacgtgaccggcgtcccagtccgacccgcgcgctgcgcccctgctgagcggcgcggagctaccacgccctgccagactcgcccttgggtccctgtctgacgagctctaggcaatctgccctcgttcgggacacaaccatcggtctcacccctcagtttctgccagagaaaaaggaaaagtcaccgagaggcctgaccctgacgggtgggggagatgcgcgtgcggagtagcgggaagcgactgaggagcggggaatgggcagcatttgaatggatgcgggtgccgctggcacccgggaagacgctgggggccggcgctgtagagccgggcatgggctgggatgtgtttggattccaatccgggcctgacaccagttcagtgacctcgggaagttccccaaccctccgggcctgtttcctccctctgaagtggcgacagtagtagaaccgacctcgtaggctcatcgggaggtcctgatgggagaacccatgcaacttgccaccatagagccaggcccgcggcggttggcgcctggtgggtattaaagacgagtcgggaaagaagagcaggtaagagggtggggagactggcccagtgggttggggtgtgcacctcggccacgtggaaaagcgagaatgcagaggccggacgcttatggacgatgcatatgtggggccggatagaattgtggcaggcggcgctggggctgatgctcctcacccggattatcctctctaatcctcagccctgtgaagtgggcactgccctgaacattttgtaaataagggacccgaggctcagagaggtgaagtaactttccagacagcccagctcgtcagcggccagcatttgaagtcacactccagagcctgtttttaacataatagccgctgtgaccgcataaccaacgtgtgtgttgaagtgatcaaataaccatggagtgtctttgatgtccaggacttttgagaaataccgaaaaatatgaggcaaggcccctgccttcaaagagcttgcaagtttttgggggagacttaggcacaaattaaccaacatctgttgagcacttgctgcttgccaggaccctgcccttcccctcgtgtcttcctcccttccaggactcaccccctcacttaccctccccctcacttaccctccccctcaattctcacagcaaccctgggaggtaggccttatggtttctgttttgcaaatgaagaacctgagattgaagaagagtagagattggaggatcagatcctgagaggtcccatgtgctttccaataacagttcagtatattagaagacagtgtggcatccacggccaagtactactagtgagtaatacagtaattgctttttacatttgataaacacggagaaagggaaggcatttcgggtcattggggcagctaggacttataagagcagtgctagggtggcagcagcattcaggtagatggtaaggagaattaagttagagagacaggatcctcagtctggttcagaagtaaatatataagggcctgttctatggaatgtagtgagaagtggttaaataagatgaatcccaggaaacctcaaaagaaggcttatagagccccatagggtggtagattcacactatagacctgagagccagatctgttcagttccaaatttgattcttgcacttaccagctctgtgtcctcaggcaagtcattttacctttccaagcctcactcccaactctgtaaaacaaggataatacctacctcagggttattatgataataaaactagtatttatttcaggccggcgtggtggctcaaccctgtaatcccagcactttgggaggccgaggtgggtggatcacttgaggccaggattttgagactagcctggccaacatggtgaaaccctgccgatactaaaaatacaaaaattagccatgcgtaatgcatagtaccagctactcaggaagttga

SEQ ID NO: 2012 - DNA, 4001 bp, Homo sapiens
gcagtttttggcagctcctggccttgttcctgcccacccctccactcagatgccaaagatttcctaagtgatcctattcgtaggcagctctgagcctttctccagaaagcctgcttttaggcaataggaaagggggaaaaaagtgaattcttaccaggaaaaaatgaatcacaatcatccatccccatcctccatccagggttttagtgtaaggttggaccttcccctccctcttcagcatgatgcctcttctattttaaatgcagaagatccctgtgataaatccaagacagttgattcagtggaccagaaactaatctaaacttttaaactttttatctgaaagggaacgttcatacattgttggtgggaatgcaaattagttcagccactgtgcaacgcagtttggagatttctgaaagaaccaaaaattgaactaccatttgacccagtaatcccattcctgggtatatacccaaaggaagataaattgttctaccaaaaagccacatgcacttttatgttcactgcagcattattcacaatagcaaagacatggaatcaacctacgtgctcatcaacagtgggttggataaagaaaatgtgatacatagacaccatggaatactacacagccaccataaaaaagaacaaaatcatatcctttccagcaatatggatgcagctggaccattatcttgagcaaattgatgcagaaacaaccaaatactgcatgttctcacttataagtgggagctaaaaattgggtacatatggacataaagaggggaaccacagacactggggactacaagatagggagggaggagggttgaaaaactccctattggatgctgtgctcactatctgggtgaggggttcaattatactccaaatctcagcatcagacaatatgcctttgtaacaaacctacacatgtaccccctgaatctaaaataaaagttgaaatgtaatacaaaacagaaaaaaaacctctttccctatgatataaaaccacttgtaatttttttttaacccctcagttacagatgaagtctgcctgatgcaactaaggacttagttacctggaaagcctgatctcagtgactgtggggtggccactcctagaactgtactcagtgtccctccccccaggtctgcaagccagtttcttggagaagctgtgcgtcaccctgctggtcctccgggtgaactcttaagagaaatagaaagggaaggcgagccttgagtttaggaattctccttagaaaacacttgctaaatgtaaatatttttggagctaaacagacatgacaacgaaatgcgatacccgcttattgaatatatcctagatcagaaaaaaaagttgtaaaagacagtttgtggggacagttggggaaatttgaatatggactgtataatacagaatactgtaccaaggttaacctcttggaacctcttccacaagagaatattcttaggagatacatgctaaagtattcaggagtaacatgacactatgctaccttctcccaatcggttccgtaaaataaacaagtgtatataaagaatgatagcaaaaagaaaatgtaaatgttctgaggaagggggaacagtactcattatttcccctgtcgggtcgaaggctgactgtttctaactggaaaggaaagtcagctggcagggtatgcggaatggccatctggtgagcaggctgggtggggagagatgccagtcgttgttagaaaaccaacccagcacacagtcccattcccatcttacctttgatgtggtgttcagcaaagaaatcctccacagatggggcaattaaggaagaaaaataaattacaccgttttctggaatgttactctttttctaaggcatttcattttgctgcattgtgaaaacaagtgagcattgtaagagccaaggagggctcagacgatttaggccctcctgctagtggactttacttcctgaggggaggaggaaagactgtgatttgatgtcatctcaggccctccctccacccacagtcactcagaaggtagaattttttgccgcaggctcaaaagcaagcatgaagtaaactaagtggaaagtccttttggcgactatgctcagggcagggggatggggctccagagctctcatacacttgtcttcaaatttcctcagggaacttctcacaacatgcttattttacaggagaatataaaactcctggatgggtggtgagagaggcatttcctgggccacaaacagaaatcttcagtaagctcaacccattcgtgtggccttttgtatattgactaaagattctggttactaatttggggtttcagaccccattttaattgcatttttgagatctgattacctcaaccacctcctgcaaaagacgtatgctcgtagtaattttaatgagattttttttattatattttggaaatggttaaggctgagacccctagaaaattactgggataattcaactttctcttcccatttcctccctctaccctccacataaaacaaaacaaaacaaacaagtcaaatgggaaattgtctttcgtctcccacaccaatattccagattttaaaccagagtatattttagacgaaaggatgtgtttttagttttatctggaaaatctgcacatatttatgcatgttcctttttaagaagcaagaggcttctcagattcttaaaatcaaactctataatactttttgattaaagtgcttgcagaaggacagcttagtggtttgggagggtgccctgtaagtgtaagcatggaaggattatgcagttacatgatgctggtggcaaggatcaaataaacattcaacagaaggagaaaacccaaagagagaaggcaaataaatgcttttcagagagctgtttgtaattatgaatacactctagacaacttttttttttttgagacagagtctcactctgtcgcccaggctggagtgcagtggtgcaatttcggttcactgcaacctctgcctcccgtgttcaagtgattctcctgcctcagtctcccaagtacctggtactacaggcgcataccaccacgcccagctaattttttgtattttagtagaaacggggtttcaccgtgttgcccgggctggtctcaaactcctgagctcaggcaatccgcctgccttagcctgccaaagtgctgggattacagacgtaagccaccgtggccagcctgaaaacattttttagtaaacaagactgatttatttatttttttggtggcacgcttgttgctcttttaaagcagggctatctatgatttctttttttcttgagacagggcctgctctattgcccaggctggagtcagtggcataatcatggtttactgcagccttgacctccccagctcaagcaatcctcctacctcagcctcctgagtagctgggactacaggcatgcaccaccatgctcagctaattaattttttttttttttaagagatgggggtttcactctgttgcccaggctgtttgcaatgtcctgggctcaagcgatcctcccatcctgacctcccaaagtattaggattacaggcataaaccactgtaaggagccagctatccataattctaatcacaggatgaaatgatgctaggctatatatatatttttcttacacacacacacacagaggaatatatatatacacacatatacatataggaacatatacaactgggaagttagatttcaggagggttcctaccattccttaaatgataatagtgaatcattgtgcctaacctatgtaaacaatacattatatatgtgtgtatatattcctattcatctttgtcttataataggctttatattgatagagaactctgatgctaatgcctggggtcagatttgaaatgcggcagaacagcaagtcattcatagaggccaagaggacagcaaagtaatcagagatgaacttcaaacatatgtttcatagagg

SEQ ID NO: 2013 - DNA, 4001 bp, Homo sapiens
gctgttttgacattattgctttaaatcagtattaaaactcaaataggttatgaataactgttacggtcgcttatgtaatgatccacaagactgagaaacggcccagccactccatcccacaactggcaggtcaatagggtaatttaaggccaggcaaaaagtcagtgatacttgctagaagtgaacaaatgtcagactctcaagtgaaaccctcaatacgtaagtcaatactgattcttaattctctctcaagtgcccttgaaaatgacggagcattgcaacaaacaaactgcaaacaacaaactatgagtaactatatctcgccagtgtgcaaatgattccggtagtgccatctcttgttctgacctgttatgcagggttactgagtggctactcaaaagaagtgactgactactacccacatagagaagagtaaggtttaaatgggaggagtattttacagcacctggggcaaggaggcagggtggaaggaacaggtgtaggaaaaaagaaaaagctctcaagtggccccttgactgatagtaggaaaaagaacatgagacctcagctttcaccctttgttgtattcaaggaagagggtgttgaatcggctttatttcggttttgtggaagtactttgggtttaatttctttctcagtttatatattgtctttcttctgcaaaaatcaagtgctggttttgaccatgcacttaaataggtcagcacatttctaaagtacactatgcgcttctgaagtactttatttgtaagccctcatctagggaaaaaatcaatcagcaagaaactcttgatgatggactacgtgctctcaattaccctgaacatcacagaaggccttcaaagacatcaccttgtatctgagaagcaaaactaacatctgtgaagcaacaattcgcaatacaagaaacactataattaaaagtcaattatgtttcaccatctgcctttatccctggaggttggtcttaaggtagagaggggcaggatatccttggacacaacctcacccaattaaaaatcaagacaaattaagatgttctgtacttctgtcctgtccttacttgattaagcccacccattctgccaaatgcaaacaaagtaaggtatggacaggaagcaggtgaaggaggtagagggaagatcctttcagaaaagcagtggttgcctactttcagtcaatgaatatttactaagccgtgtccaaagtacactttgctgttttcacttctttgtcaaaatattgccccctcgcccccagcaggaactgctggaccagtctgggcagtcacgctaagccacattacaacacgatcagcatactgcctgacgcacaaggcacggggcctctggacgcgtgttctgagcccttcgcaggagactcgtcctacagagccgaagaaaacagaaaatcatgaacacaaagaagagcacgaagccgacctccaactggcaaaatcagaaatctctgccgagaatggctcgagcgcttttctcggtcctctcttcctccgctgcccacccgcaggccggtcgcccgcccttcccgcgccccgcgtccgccgcgcgtacctccctctcggtcaggttcttgtccggccccagcaggtacggggtcaggaagggctcggacggcctgaggctggcgaagaagccgtaggcgcagagcagcgcggtcggcaagaaccagcattcgcgacggacccgagcggtccgcaggagcacagtggccgccgccgccgccgcccgccgagacaccgggccgggcacatccatccggggcgcgaggggaggggacccggcccggccccttccttctcctcctccgccaactggagtgagggtcaggcacttgtaaccgcgagtgacgccttctccctgtaaggccaggacgttctggactcgccgccgcctccggctacagaacccccagctttaccctacagacgcctctagggtcgctgcctgatcgcccagtttaagggagacccgtcctaaggcccaccctctgccaccgcctccactccgggaaccaatcacagcggacgccgggaatacttgcctgctcttccattggtcgtgggtcacacgacgtgaactggggcggtggcagcacgccaggcctctgacgtcccagggctcaagcgcggaggacatgtggaactccactccaaaagcggcggcttgcggcggagctctctctagtgaggcggccagctggcgttcgtggcacacttgctgtcggctccgctcatctgttgggaatgcgtcctgtgggcctagtcctccgctggaagaaacgcgctgttctccccaaccaccgtttatcattcttattcaccgtctccggaatgtccattcagtttccgctcctgagagacttagtgactgaggccaggcaaagatttcaccttggggagggggaacgttaaacctttcctccagcagctttcgtgttttaaattgtattcatccgccatggaaagacatcagaagcccaggatctaagagacagactgaaatgaagaaagtagataatattgtgagaataatgaacaagctggtcactgaacagcagaaccgtaatggagtcccagttaaagggttttaactttatttcgtcactttttgcaagcatgatacaaagaaaacaaacacctaactacgctacggtttatagttaaaaggaaggtggaagatcctgagtcattacagcaatcacaaaacatgatggatttcttcatttaaaaacacaaaagaggtcttggcatagttttcaagggcaaagcatgacaagactctccagtgctttctttcatccccctctgtgtgcctttttctgcctgactcacagcctggctcaatcctaatctttctactgcaaagatgcagcatttaaagcaatttttcctgtgcagtatttgtagaatgacagatcctgccagaagctcttggaaacattttggaactatcttgcttttctgtatgttatgatccatctagcaccgttttcctcctgtggtagcaaatgacacttttttcaagcatcagcagcagaaatgagtctaccagatggaataagatactggtaaagggaaagatttgtttctaagactgcacaaatgaatgcacccaaatctgtgagttgattaatctgtgaagaaatacaactggcagtatttacatatctcaatgagtctcaaagtgtggtcgaggaagccctgggggtccttgggaccctttcagaggttccacgagctcaaatctattttcataaccatgctaagtctttatttccttttccactccagaggctatataatgtctgatgacatcatcgctttataggatgagagaatacgtgcttgtatattcttgtgtttgtaagactttccaggtttaatttattaccatatggcaattttcaataagtataacccacaaaacccaacagatttttggggcacctctaacaagggtcctaagaccaaaatgtttgaggactgctaatcgatattattcaattgtctagtcccctaaactccaacccttcttatcaggactacagagagaaaacaggtggtcttcttgacaatcgctttgtatttacattcagtgctttagtagaagagaagaaagaaagagaaagcaagccagagaggcctcggaaagagaagcctacttattaaaaatagctttctggctggtcacggtggctcactcctgtaatcccagcactttgggaggccgagacgggcggatcacttgaggtcaggagtctcagaccagccaggccaacatggcgaaaacacgtctctactaaaaatgcaaaaattagccgggcatagtggcatgcacgcctgtagtcccagctacttgggaggcagaggcaggagagccacttgaacccaggaggcggaggttgcagtgagcggagagcgagactcgcgagtactcgtctcaaaaaacaaaacaacaata

SEQ ID NO: 2014 - DNA, 4001 bp, Homo sapiens
gtacataagggagggagggggaagtaacacgtagtaagcacctactgtatgctgggcattgatgaatccttggtttattcctcataataattctagtagacatatactgccccacatcccattttacagacaaggaaactgaggcccagggaggagagaggatattgcctagccatttgctagcagagtcaaagttcagggtttctctgcctccagagtccatgcttcttcctaaataactgctcgaggcttaacagggtcactatagtcgtggctcagttctccaggagtgggtgttttccttttaatggaagacaaagtctaatgcctgaccccagttgtagagatggcattagacattagtgagctgcgggaagaggactttctgggaatagggactcttccaggagcccattgacaaagcctctctccttgaccacactttagacaggctcctctgagccctcttttccactgggctttgtccttgggccttgtcttcagcctgcatagtccagctgtagcaaaagtcctgccaagtcagtttagtgaggatccctcaccctccagcatcctgatactggatcaaattcctcatcccagatcaatgtctgatcaccctggcctgccttcaacaagaatccccctaccctgatgtctcctgtagtcattttctgtccccgaccccctccctctgctcgctggctataaatctccagccatctttgttgtatttgtggttgggtcccatctctctccccaggaggtcttgataactacccccctaccacaatagtcctgaatagagccttccttaccagtttaactagtggcagaatgattttgtccttaacaccatgggaatgtccctccctctcctgtaggagatgggggctgacagggaaaggggctctttcccaggaaacgcagcttcttcatggcagttacacaggctggaaacccggggcctggctccccttcctgtcccccagcccacatccaatcggcccccacatcctgaagctcccccttttgaaaacagttctcacgtctgtcccttttgtctgcactgccgcatctcccccaggctgccccttctcggccccctgcctgccccagaatcaccccctctccactcagcacctgaggggtctcccaagctccaaactggcctgtcgctcttctgcccaaaagcatctcatggttgccgcaagcccacgtgtggcgatgggacctatgggcctgctggcctctgcgctccggccgctgcacctggcatctgctgtcacctctgcctagagcacgcttcctggatctcttgtcatttgagcagcctttaggaggtgttctctggtgcctgtttgaactcacacaagacccccctctttccccgccacagctcttggccctgtgtttgtcatcatgaggcaccctcgcctctcctcacctgatggtgctgggtttgtaatcactccccagccacatcactggttcttccctctagtcctgcaaagtgtttatcacacccatgttacagatgagaaaaccaggacccagagaggcagagggattcacacactgtcatggcaccagggagctgtgatgctagaacgggaccccagatccctcaggcccacacgcccctcctggacaggggtcccgagatgctctgggtggctgacctgtggtgagaggcgccgggtcctcaagaagaagccgaggaggcagcccacgatgacagacagcacagacaggatgaggagtccattccgcctgcacacgtccctcccccgtgccaagatggcatgcggcaccatggtgagcctggcctgctggcaaggggcacagcaccattccacgcatgagagcccggccgggggcacagggtctgggctgagggctctagcccctcagcaggcaggtggtcggagttgctaaacaccagtcgccagccccacggccatgcccgtgtggccgccttagagggaagccacaatcctattaccagctgcatcattaggagctgggagcagattagggcctgggaaattagagcagaccacgtggtctaggagttcaggcctcaaagccaagcgttcctcttaaacagttgagtggaccaggtactggaaggaacaagaggaacatttgcttggttggtttgatctttacccctgcttccttccagaaagaatcaaaaacaagacagtaagatatcagtttccctcaacattaattaagcatttactatgcaccaggtgccattctagaagagtgttacatgtactggcatatttaatcctaacaccaatcccaagaaataagtactattaatatcaccattttacagataaagaaactgaggtgggtgggtgcatgtgctgcgggccaggcctgtgctggctgccttagctatgccaatcatagggaattgtcccaaagatcccagggttcccaccttcatttttcagaaagggaggctgagaccccagaagccagtcccttggccatggtcacagaggtcagaagtcagggctaggccagtctgtttccaccacatgaacaggcagataggttcaagggtgcttggcagtattgtggggaatgtagattcgagtccaggggacctgagttcaaaggtgggctgtgccactcaccgggaaatgggacgtagatgcttcagggctgtttcaagcctggtgctgggcaccctgcaggctctctgggcctattattttttaaagatgacagagcccaagagacccacattcgggtcccagctctgccacttactagctgtgtgacctcagacaagcatttcatctcactgtgcctcagtttctccatctgtaaaatagagatgataacagcatctactttgttagggctggtacaaaattccacccagagggtatttggaaacgcagtgtgaaccctggtgtgctgaacaggggaacggactcttagggtcattatcacacttagtgctttggagaataggtgtctttttgctatttcttgtggcctggcctgccctgccctgtaaagcctgggggaattaaccctcgtctatttcaccagagatctgtaatctcattaggagcagtcaggcagcaggcagcagggaatgggaagtgcagtctgcagtgagggtgggaggtaaagggtggggtgcacacaggggcttcctcctcctgacataggagacaggggcagaggatgaagaggacgggccaagtggggcataggggagaggtggggagaggggactggggcacaggctctgaagccatggacagagctcctgactgagaagattctgatcccaatttaatcagctctgtgaccttgccgtctctgggtatcagtcttgtcctttttagaatgagagaaatgggcccaggtacctttgtcaaaggaacttcatttcaacaaaccaatcttccaaagcccctgctctttgcagtagcttggggtggggggtgggggtgaatacaagtctgagagttttttttcctctgactttgactcttaaaaccaaaagtttcttgctacaccttcaactccaacaaatgcctcattttccaaataatcaggtggttagttacttcccagaagagaaaatatgctaagtaggtatttggatttgggttttgatcaactcctgggctcaaacaatcctcccatcttggcctcctaacgtgttgggactgcaggcatgagccaccacacccagcccagacctggcctttagctgtgccatgatataggtgagtcttgctttctaccacagctccatgactcccattcccaggacgtgccctatagccaccactgactcctctctcccacaggctgagcctaccactacctgcctaccagactacagccattctttccactgttcctacggtcttcaacaggagaatttcaactcactctagcaaatgttcttatagcaccatttagtgtgccacaccccctgggtactagaaacacaa

SEQ ID NO: 2015 - DNA, 4001 bp, Homo sapiens
agtcactcatccccaacactctaagacctggtccttgtaccgcaaatactgaccataaatcatccaaggtttagtgaacggtcataggcatgggcttggaactttttgatagcaaactctaactaactgggtcaaccataaataaaagtaagttagagaaacttaacaggtcctaaaccgagaacactggcctttttagaacctcactctactgaagacaaacttactccaagttagtggatacttggctaggcaaataagaaaatgataacaggaagtgaagggtagggatagagggatggggagctgggattgttcaagaaaggatgtatgttcctggaattcatggctggaacagaaaaaaagggttttctcaaagaaactgttataaataaagatcaggcatcatggttgcaattcttctttctcggtattaaatactcttatcatttagcttgaacgttttttctccctggggaaagcttgtttaaagctaaaacaacgagcttaaaagaacttcagaataccacatattcgtgagctgagaactgttcggctagaaaaagaactgactccatcatttgaaccgtttctggctgatgatgaaatcaactgaacttccaaacattttaatcaataagtcaacccctaccttcccccatcttcctgttgagccactgtcttatgcaagctttaagcaacttgtggactggtggctatatccatgaccactctgtacttcctgcagaataactatcatcacatgctaactaaattacttaactgtctgcctgccccacccgcagccactggaatgcaagctcctgagggcagtcaatgatttgtccaccatggcatccctatgttcagcacatcctagcccgtattaaacctgatgactgaaggaaagagtaaaatggctggctcacagcaaatactaagaaaggatttgtgaatgaaatgcctctggcatattgagagaagcgactaatgtcaaatgagccatttaagttggtgaaggactaatccttgcctggcgcagttaatctgtagtgacctttcgcatatggaatcgatattttgaggctggggtgtacaagtaggttctgagaattctttataatgaagaagtgattccatttgataaccacacatggtagatggcactattcggctcacgggagtctcagcccaaggctggcgcagggccgaatgagccagcagaacttaaaccagagggaaataaatcctatgctttgaaagcccctagaagagtaagccccctcaagcccaggaaaagaggcagaggacacccggcgcagagggaggcgatcctagacacaaccttttgtctgcagattatcaagactgtgtcctagattccaaggtgacagtgccacaggtagggtaacaattcccttcatatttgcagcgtgttataggcaacagcgtagggcaggtaacacaattttgcatccctccttaaccagcatagcggctgagaaacctcccccaacacgctccttccaccactcaaggtggcggggtggagggcccagcagaacccaagaggctctgaggccggccggcgaccttgacgctgccggccgggcccaggccaccgcgcggcgcctcgcccctgccccaccccgacgctcgccacacctcggtgtttgcagagcctcggcctcggccccggccccggcggtctgggagcggacgcctagccctgcgccgggcggccctgaagagggaaatgcggctgcggggccgcggggacttacctgcagcagcacggccagcaggaagcacaagtacatctggtagatgcccatctcccccaccgcctggaacgcctcctccacctccatggcgggccgcgcgcaggaaccccgccaccccaccgccctctcaggcgctgccctcccgcccagcgcggcaacccctgggcgcccggcaccggcttggacccgccggggcggggatggaagcgctggcggcggggccggggcgggccgggccggggcggggcgcctgcgcgggcggcggggctgtcaggctcgagaggtggacgccgggcggggagcggggagcgcagccgggctacgcggggcgaggggcgaggagggcgttcgagatccggggctggatgccctggacccgggcctctggacttcctgtttaaaaaaaaaatggtgttttggtgtacgttttgttttgagagggaccgctgtctgcgccttaaagtgaggaaagaggaagtgggccgggctgagggcctgagaagaaacatcgggaccgcgtccgcgtgtgacccagggctctgcctacaggggacccgcagctggcgggcggcctggcggctctcagcaatgcctgtcgttttgcccaaaccagtttaatgcgggggcttggggagccctagagccttcagagaaaagtgctgtctgtgcagcatttctttccagtcctattctgtgctagccatgggttaagtacactggtaggcaagcaaattcttgtaaaaccgtcggatacatttgcttatagaagtatgcacgaggtacaaaggaagtgcaaaagacgaaggggcaggatgtgatggctgccaaggtatttaaaggataaacggcagtttgtcaggtggaaattaaaaaaaaaaagcgtggcagggccaagggacgctggacacctgcgttagtcccctcatgcctccacctcctaacctcatttgcctttttgtttattatgtgttgtctttttaacagctgcatagtattccattgtctagaccatgacttctagtttaacattgaatagaaatggcgaccagctagtgtccttgacctgccagtatccttcttatgcttccaaaattttccgttaattgtgatgtctgttgcagcgtattggtagctaggctttactggtcagctgctttctttttttagcaattaaatgaatgctcactgtaattgaatttatcagtgggttggaaactgtaaactctataaactcttaagatttttttctctctcttacttaaggaaacgttttctgtataagtactattaatagtttaaaaagtttccttctttggctgtttcctacgaatcctcattattaataaatgctgaagtttaataagtgctttttgcatttattgacatgatcctattgtttttcttcttgaatctgataatcgggtacattatggtaatagtttttttgatattgaactttactggaataaatcctattaatacttgctcacgatattgctatttattgccaaatttaatttgctagtgttttgtctagggactttacatctgtgactagcgaactaggcctataattttcttttcttcctgatgcttatgtctagatttggcagtaagattttatagtgctttcataacatgagtgtgagtgtttggtaaaactctcctgcaaccatctagacttagcttgttttgcagggggagcctctttattacagatttatagataatgggtaaagataaataggtgtgtataactagatatattcgtatgtctttgcatttcttcttgaaccactttttttctagaaatgtttctattttatctagtttagaaattgtttttggaataaactagttcatattgttttcttgggatttttaaaaataagggtctaactgtttatgtcccatttttcattctgaatagtgttcatctttattgttccaatcttatcagtcttgccagaggtttgtctactttattattttttaaaaagttttgtgaatttttttatttcattgattatatgaattctttcctttttttttttttacttttgttactttgtaattcttttactagccacatgacttgaagtttagcttctttgcttttaatatttctttttgaagaataattatgtgtggctgggctcagtggctcacgcctgtaatcccagcactttgggaggccaaagctggtggatcacctga

SEQ ID NO: 2016 - DNA, 4001 bp, Homo sapiens
aaggtttccgaaaggcaatacgtatcccagtttaaaatgtgtgttaccttcagactcagcaatgtccactcctcaaaatttatcttacgaaagtaactggaccagaatgagaaaatgaatacaaaggacatccattgcaatttcacttacaatcgtttttaaactatcaataaagtaaaaggtgatttaaaaagaattggtaacatatactatgacacaaacatataacagaatatgatgcagttacgtaaaaatggtgatacagcagcaattctcaagctttttgatctcaggatccctttacaatcttaaaaatcattgagcactccaaagagcttttgtatattgtagggaccatggagttgtaccactgagatctcccttcaaaggcacctactgtgaggaacacagttgacttccactctctagcctctaaccctggcatctgctgatgcactgcagcaaggtcgtccctttcctgggctgcttccagccaatgattggacatggtggggaactccaactgggccatttctgggacaatcagcacaaagtaccaaaagttggttccttcaaagtatgaataaaatacacaaaactttggcaagattgaaggggagaaaaggatagatatgaggaatgaaatagagaacctacctacagattcagtcagaagtgttataaaatcatcggtgagtattatgaaccttggacagaacaggcagtttcaaaaaaaattgtaacttactaaatctgactctagaagaaacagtaaactgaagaggcctataactaccaaagacattaaaagagaagtgaaatataactatataacagttgttggccctcatagtaacctaatcactttccctctttggataagagaatgccagtgtcagggaacgcttcaacagggttggagaagttccacatatctccaccctactaaaggggcagaagttcaggggcacagttaagatgactcagagaaaatgaaattgctcagtcgcaggtcaagtcaacccttcagatcaatttatgtacctagggcattaacctaggaatgtcttaaacaatggaatgccgccattccttctcaacaggaagtgggggaaacacgcgattggttttcaaacagttttcaaacagtagacaatacacatagctgctgtaacaaagcagcttcgaaagagatcgaatgtgtgcgcctttatacaaaacttgggacccactgaagtctgacagctaaaacggattacatgtctgcaaggtattaaaacagaaaacaaagaacctgggatggattcaggacaaaagtgtcttaaaaatttaacagtgcccgtgggccagagtgtccacaacactcattttatctggacaaataccagtagactttcgtattatgacccacttctgttaccggggtcgccggtcgcggccccacgcccgagtttctgaagccaccggagcgctgggcgccacagttcctccttcctctcctggcaacgcctcaagccgccgccctcctcggtcctcgcagtgtccccagcgcccgcagccctccctacgctcaggcggcgccccggcggcgacccacctcctcggcgtcctggcccagagggatgcccaggttcctgagcccctcctgcagctcgccgatgtccaccactccgtccccattgcggtccagtgcctggaagagggtctcgtagcgcgtcggctgctccgcgtcctggcaggccgcggtgggcagcacgaagtcccgcagccagcgcaacatggtcccagaggcgcaggcggcctggccgaggaagtcacgggagatcgagggctgcggggcgagaccgggaccagcgcgaggccgggctgggcggggcgcgcggcgcaacagcgtttggggcgccgtcggggttgcggctgcggcgcgcagggcgcagggcgcaggagcggagaccccacccgagcccgcgcggagcgcagggtgtggccgtcccgccgctgctggggaggagctcgccgcgctggcctcggcggcactggccgggcccgcctccagagagccggaagtgagggagctgggagctgggtctcgggaggtgctgtgcggacccggggtcgacctctgcccagttgccagtcccgctgtcagcatgcgggtccgaggaagaggcccccagcaggtccagggctgcagcgtcagcgcgtcggtggcttgggagcggggtcttgaagactggttactccacttaaagaccctctcgggccggagccttggcggtcagcccagagctgcttctctctgcctggaaactgggccatggagggcattgtctctcacggatgtctaattttttcgtggttgcacacctgggatggcgattctgctttaaaaagcagagagttaaatcctaaagcatctattggagcaattataaaacaaaaaggagaaactcctggatttgttgcagaaaagatcaacagccatctgcgtgggcaacggggaaaagaaggactagtttggtaggcagcttagctaggatttgcccgtgattaagcgtatagagtgtctgccagctgcacttatcagaaaaaaccacagcgccctcctccttctcaagatgggtgcagttccgaggtttggagcttattactcaggcaagacagaacttattactgcctagcatggaataacggaaggaacattggacttaacagagaaagtacctaatccttcaggtgtgacatagcgtctccgggtagtctctcatcagtaaaatgagaatataaatatctgccttcacaacaaagttgtatattaggtgtgaaaggtcttaattctctaaggcgccaatcaaatgagatatcattaattgtaataatcctgttcattcacagctgcgtaagaggaactattgttgtactgctgtttgcagaaaagaagatacctctgtacttgtaaattagggtgtctcacatcttctgaatcactacacagaaatcagttccaacaacagccaggaactcagaccctgaacttacctctcctcatatcattttgtatgtttaagatatgtatgaatctagaatttgtaaattaagggctgcctgcttagtaaaatcatcttgaaactgatttatctttttatattacttccaacttccagtcttattaagaatcattgccttcctttggaactgccttcaaacttcaaattttctctgtccttgaaaacctcttttaatctctactctgaatactctgtacttgaagagaggttgcttgaactagtcatcttacacttacatgctttcattttactttttatttatttcttttttttttttttttttctttgagacagtctagctctgtcgcccaggctggaatgcagtggcacaatctcaactcactgcaacctccgcctcctgggttcaagctattctcctgcctcagcctcctgagtagctggggctacaggctattttacttttttaaaaaagtaatacttagaaaaattacctgtcagcgtttttgctgagaaaattatcttcacaccaaaacttttacttgagggtttatagcagttctattcataactgtcaagcgcagaaacaaaatgttctttaacgggtgaactggtaaacaacctgtgttgcattcatacagtgagatagtaattagcaataaaaaggaatgaattactgatacctgtcaacaatgacattctggaaaaggcaaaactatagggacagaaaacaaatcagtagttaccagttgtgactagcgggaagggaattgatgacaaaagagcatcagaaggcttgtgggggtgatggagctattttacatcttgcttttggtggtagtggttacacaactgcatgtgtgtgccagcagaactgcacactaacatgggttaatttactctgggatatcaataaatctgacttaagcatgagtaaaatggaataaaaattctcaaaagatcagtgtgaacatc

SEQ ID NO: 2017 - DNA, 4001 bp, Homo sapiens
cttgaggaaaagtcacaatggtgctcctctgaaacagaatgttctgtgtggttggtgcagaattctctggggacacccctcccttgggttttgacatgtgaaccctcctcagtcaccactaggtacacaaagcgtccttgccaaaaatgcaagacagctctacaaaccttttgtttcaataaggaagaaatgtgtttcaaaagattcgacttgatagctaacccagaatttcttatgaaaggctagtttgtatcaaataaacaaatacaacttacacttgcaaatctaaatataagagtgtctttaaacaaatatgaagaacacttaactttttttttttctttttgagatggagtctcactctgtcacccaggttggagtgcagtgatgcaatctcagcttgctgcaacctctgcctcccaggctcaagtgattctcctgcctcagcctcctgggactacacacacccaccaccacacccggttaatttttgcatttttagtagagatggggttttaccatattggccaggctggtcttgaactcctgaccccaagtgatccacctgccttggcctcccaaagtgctggaattacaggcatgagccactgcacctgaacaagaacacttaactttaaaaggagaaacactgcttttttctaggaattaaaaatccagataagctttgcagaaataacattttggactgaattggtccacagaaagtacacagtccaggcctctgatataacagatgaggataccagggtatggggcttggaatatagaatgtgctcaaactagaactgacccatgactgaatggatgcttcaatattcccaaagttcacatggctaatagaaagagttttactaaatttcaacatgacagaactcaactgacagttttttgggcacgaagtaccaattatccaaaataaactcaatagtccacatgctcatgatctcccagtctaccgggtcaaacatccaaagagcaaatatacttataaagtaattattatatacaataataaattccaaatgaaaaatgacttggaaatactgcaataggagtatgtacgaagcacaacatgctgagaaggagcctgtaggttagccttctggggaagagaagggttagcctaagctcggtactgataactagggtctatcaattaaggcatattatgaggaaacctcagcactagtgaaacccgagagtaaaagccacttccactgcccccttccaggaacagaaaccgaaacataacatcagaaaatttccaatcaccaccccactcccaaatacacgtagagtgattattccagttctctgaactggggagggcgcatctttagcctagacgcccctctgggtgactaatgacaggtgagcacattgaacaaggtgactcctaagacaaggctgtatgtagccaacatcttgagagcaatctgaagttggagattttactacagccaaggagaaaacggagaaaaatacttgagaaatgtgttagctgtgttgttattcttaataaacggtaacgctggtcaacgacctgaacactgcagtgggcccaggtcaagcttgacaacatgtaaattttgccctctctgcccaatgcctctccagggctcccagccccaacgtctctctgattacagccccagtgagacccaccttcgcttcctctagagattgaatggcccctacatcctccaggccttcctgaagctcaaaaatgtccaaggtcccatccttgttatagtccaggtaccaaaagagatctccgtagagggagtccatcgaggatgtctccctcgcagctccgcggcctgagtgagccccagcggggtggaagtgcgaccgacgaacgggatctctgcccaccacacacgtccagtgggaagaggcctaagacagcatcctcctcaggggcgccaaacacaatgcaccttcatcggttaaagctctggaaggagagggctcatcctaacggcttcagcgcaaaggcgcgagcgcgcaggacccgggacctgcgtgggaccgcactctgggctgcgctgggagaccgcggagttcctgcctcactcacgtctgatcagaagccccggctcccactccaggaagagtccagtcggggcaactcaagcccctttccccagaaacttccagggagaacccagcacagggccatctgaaagtatagcttctcttttggagagaagtaggttgggaatgttgggacatgggctattgcagcataagtgactggcggtggcggcctgccaacatttaaaaaaaattgtttggctgcacctgtctaggaatccttctttttaaaaatccttataatgattttttaaaataaaataattttattgtagattcaggggttacaccatcagcttgttacaagggtatactgtgtgatactggggtttgagctcctaatcgtgccatcacccaggttgtgaacaaagtacccagtaggaagctttccagcccttgccctcctccctccctccccccttttggagtccctagtgtctattgttcccatctttatgccccatttacccaaggtttagctccccctgtaaatgagaacacagtatttgtttttctgtttctacaataattcgtttaagttattggcttccagctgcattcatattgctgcaaaggacatgattttgctccttttttatggctgcatagtattccatggtgtgtatgtaccacattttctttatccaatctgctgctgatgggtacctacattgtgttgtaggaatccttttctaaggttgcagcactggagaattgctgtaataaagactaggaattgaatgaaaatctgcccacatgggccctttcttctgtgacacctcccctcacagttttttatcttttatcttcatccaaccactacaatggctccagggcaagcctatccttcagctgttagtggctggattggaaagatgatctcaaaataggcaaaagttcagtgatcttgggtcccagagagaagtcagcagatactcataaatactatctaaggcttcctcttaatcctcaccctccagaaccacagagggccctggcttccccagaccaacacctgtgctccctcatcctgcaccactgggaatatggaggtgcagtttcacaataaaaactctccactttttatgtaatttattttcctaaatatggagattgggtaccctaaaaagttgaatattaaaattcaaaaagaaaatttaatttagccattatctgtaagctcttgctctacactacccatcatgtcagatactggggacaaaaacagaccatcacatgtccttgaaatactcataggtttccctctgggaggaggttgcaccatggttagtcaaaaaaactactgtacgcttctcagtaaacattttcccccagagctgctgagcagtggcaaatgtctaatgctgtttcacaagatgtgctgtggcccaatcaagaatgaattctttcaaaaagagaattttatggtccacagggaatggtccttccctgtgcaacacagaaaatgtaggtagtggcaaagagccacagaaggcagatagccaggcagagaatgagccttgggttagagtctacaggaccaagcagaaaagacagaagtcgtggccagggtgataaggaaaacaggctgacagcatttaacagaattgacaggagagaacaaaccatagagttgagagtttcatctaataaaaggcaggtagttttgttgaatagctctttctgctttttgaaattaccctgttcattatttgcttattattttttattccccatgcacctacacacacacacagacctacttactatagggagggttttgagaatacaatgaagaacgctgtcagtgttgttcaccactatatccccagttcattaaacaatgtctggcactgtttgaaaacattaaatgaatgaattta

SEQ ID NO: 2018 - DNA, 4001 bp, Homo sapiens
acaaaaaaattagctgggcgtggccgggcgcagtggctcacacttgtaatcccagcactttgggaggccgaggcgggcggatcacgaggtcaggagatcgagaccatcctggctaacacggtgaaaccccgtctctactaaaaatacaaaaagctgggcgtagtggcgggtgcctgtagtcccagctactcgggaggctgagacaggagaatggcgtgaacccgggaggcggagcttgcagtgagctgagatggcgccagtgcactccagcctgggctacagagcgaaactccgtctcaaaaaaaaaaaaagaaaaaaaaaattagccaggcttggtggcggggcctgtaatcccagctactcgggaggctgaggcaggagaatcgcctgaatccgggaggcggaagttgcagtgagcccaaagatcgcaccactgcactccagcctgggcgacagaggaagactccctctcaaaaaaaaaaaggaagtctcaatggagacatggagggaagggttgcaagggaatgaatgacagggaagagatgaatgagaaactcttccaatctatgaagacccaccgaagtttttggttaaagtaacctggtgactgcccacaatacaagtacaaaaaaagctcagggacgctttcatcagtcatcttccaagataagtttctcaaccattgtttgttgtaaggaacatatccaggtaggaatccaggctgcaactactcaagccaagatgatcatcccagaataaactattttatgcaaaatatcctacactcaaaaattcctgtgccaggccgatgaggtcctcaaattaatactccaaatatctgtaagactccgaaaggaccccaagccaccggctgtgataaaggaaaaaagaaaattactaatactcaaaaatattttaccttctattctcggcgggaggtgacaaggggaggtggcgaggggtaccatctcccttcctaaccgcagaactcaacctcctaaaaatgcattgtctccgctggaaaaaaggtgcctgaccatagacctaatgcagctttcaaaacaaggaacaccttacaattctgcggtctctggcgttggaagcgtctaccagccggcgagaagtgtctcaacacaccttccagacctcatatgagttcgggtccctggcttagccaccccgcgtgtggccgcaagcatcaccgttcaccagcaccacccaggccttgctgacgtccaacgtccgcagacctttttgcccgtccggatgacctcccgcgctgccctgaggaacctcgggcacacccgagcatcagcgatcctaccacgggctctgaggcgctgcgcttcgggagaggccccaggagaagggggcgggggagggggggccgcgccacagcgtccaggctggaccgccgccgagcaccactcaccggccactgactcttcagaatggggaaaagctggggacgccgcggggaggacgggcggcggggcacagccgccctcggggctgcggtcaggacgtaggggtgaggaaggcccgaccccctccctcggccctgcccaccagtccccgacgccgggacttcctcctcccgagcgccggcgccgtagcccggggaaggccggtaaccgccgcgggaggctggggccgcgcccggggcgaaggccgaggggaccgcaggcggtggggcgcgcgcggctgggcccgggaactcacccgccggcgaagaggtgaagcagcgtgttctccttctgctggccgcccgtcgccatggccgcgccggctccgcggcccgtcgccgcccggtggcgagagcgcgtggcggctcgagggatgcgcgaggtcgccgggtcttgtctccccgctgccctcagggggctgccggcaacgcctccatgcgcgcgcgggctccaacgcccggctctgctcggcccgcgccttccgcggcgtggccgccggcgcctcaccggcctctgcggcgcgagcccggcggggagctagagcccggcgcgcggccgtcacgtggcgggggccggaccgtgacgtcacgggcgcgcgagtctggggcggggcgtgacgggggtgtggacccaaatttcgagcgctcattggttaggacgcggatgtgggcggggaggttgcgcagttctggggcggagccagccccgagcgaatgactggggagaggggctggcctaggccggagcgtggaggcagtggaaactggctgtgactgactggtcctcgctcctcagagaagcctcgcgaggccctaggccttgccttattttaaaagtttactttgtgatatttacgtgtgcaaaaggtgtacaaattacgtgttacatctcacacctctgtactcaccaccccgtttagggaaacaaaaacataatctaaaaatctataatctaaacagccttagataatcagtgaggccctcacggtggctcacgcctgcaatctcaacactttgggaggccgaggcgggcgggcggatcgcctgaagccaggagttacagaccaacctgtccaagacggcgaaaccgtgtctctactagaaatacaaaagttagccggacgaggcggcgcacccctgtcatcccagctacttgggtggctgaggctggataatcgcttgagcccgggaggcgggggctgcagtgagccaagatcttgccactgcactccagcctggacgacaaagcgagactctgtctcaaataattaataatcattatcattatgtggatttttgatctccctataagtagtagtatatgctgcgtatattttgcagtatgctttttgcttcttttctgatcatctccagcccagacctagatatccaaactgcttctctcagcctatgtcactgggtcattgtcatactcaacctgacatcttctaatctccaggtctcccccagatggagactttcctggccgcctttgcagcgcagtctgtcacacgactatagaaccagggcttctgcagttagtttgttgatttatttaagttgtccttcccatacaggaatgtaagcttcaggagagcagggaccttatttcttttgttcacagttgttcctgacacagtacctgccacctagtaatgcccaaggagctaatgaataaaggtcccaaattgaacttatcattcttcccctcccccaaacctgctctacctctatttcctgtcctggcagtgacaccactgactgcacaggcaccagtgccagaagctttcctgttaccttggactatgtctctctgtctgtctctctctcagcagaccaccattcacctgcagaacgtaccaaccctttctcttccgtctctcagagctccggaaagctgtaccttgaccagaacaagcagttagatgtcctgtgtgtaaacatagagagcttaagtaggagggaattgtgtggaaacgtgggagctagccagccaatctgtatttgattgctgggactctttaaataaaaacagctcttaggagcagtcctccaaaatgcaaatacagtggttactattaaagccattgctcccaggcctaggagaaggggaagccatactagggcatgagatatctgagaaaaagaagtaaagaaaacccagcacagtggcccactcctgtcatcccagcactttgggaggctgagaagagtggatgacttgagtctagtagctcaagaccagcctggataacgtggcaaaaccctgtctctacaaaagaaaaaaaaaagtaaaaataaataattttttatttttattatatgttttttttaatttttatttatttattttgagatggagtcttgctctgtcacccaggctggagtgcagtggcacgatctcgtctcactgcaacctctgcctcccgggttcaagcaattctcctgcctcagcctcctgagtagctgggattacaggcatgcaccaccacactgggctaatttttgtatttttagtagagacagggtttcacca

SEQ ID NO: 2019 - DNA, 4001 bp, Homo sapiens
aggaggcaggtggcccccctcagtccggtgtgtctctgtggataggcacaggtgtccccagctcctcacctgttgcttctgtacccaggccttggcagaggcgaaggtggccagctgggcagctgagcccaccatgactcggggcacagccccaccaacgccctgccacagccccaagagcccttgctgccgccagatggtctccaaggcacccaggacagtctgtggggagagggcacggggtcactggccacccctgcctaggctgggagcatgcccaatccatgcccccagggagctctgagagtggcaggcctcacctggtgattgtgctggtgtcccacggccactgcggccactgtctgagcttgcagctgcgttttgatctatgggagcagagaggacacgggtgtggggatggagcctgggagagccagggtgagctgtgtgtgttgagggcgccctgcccccgtgcccctgaaactcacagctccatggtcccgagcctgaagcttaggggtcaagtgaaatagggttgaggtgcagctctggggttggcctgggttttgcgtctcagtgtgacttggagcaagttacttaaccttttctgggcctcaattctgtcacggttggaaagctgttctgaggattaagtgagacaatgatcctccagcaccagccaagggcaaggcgagcctttgctcaaggggagctttttttttctttctttcctttttttttttttgaggcagagtcttgctgtgttgcccaggctgaagtacagtgccatgatcttggctcactgcaagctctgccaactgggctcaagtgattctcctgcctcagcctccccggtagctgggattacaggcatgcatcaccacgcccagctaatttttgtactttttagcagagacagggtttcaccatgttgaccatgctggtctcaaactcctgacctcaggtgatctgcccgcctcggcctcccaaagtgctgggattacaggcgtgagccactgcacccagccaagggtagctttcttcaaaacattttttaattttttatttgttttgggtggccctgaggcccccctgcagagtgcacacgaggcggaggccctcaagggtagcttttattcttatcgtacatgaggccatgcgggaagagaagtaaccaagccaggatttgagccagcacatctgacaccctctgccccctcccctggctcaggaccagtggggcagggaccgcaggggagcatggatcagagcaaggccctgggccaaggggcagattccaggcttgggctaggatgttccagggagcagccccaccccggctgccccaccccacccaggtccactgagccctgcctttggaggctgcagggcccctgtgggagctgggtcatgggatggtggagggtggacgatggagacaagccactcaccaggtaagcagggctccccacgaaggctcccagtgcccccgccacggctcccgcaaccacggtgccacctggttgctgcgtgaggccagcctggcacgccaggctgtagcagtagaaacgaacgccattcatgaggccttggtacagaaggccggcagccagccccttctgcaggccccacagcccgtctgctcgggccacagcagcgacagaggctatgaagccatggtagggccgtgggtaggtgccccgggcctgcagctccccctgcagctgcagccgcgtcttcaccacctccagggggttggtgaagacacaggccaggcagcaggcagaagcacccagcaccaggtccactgctgggggcaccgtctccatggcctccgggccagtggccttctgtgcccgggtcaggggcacggcacaggccctgtggtggtggcgtttaggctgtctgtaacctcgcagggctacggggctggggtttgcaggggaccgaggccatgtctagagggtaagggtcctggtctgacaggcctgtggctgcctggtgtccctggtctatctcagcagtccacctgctctgctcagctgttccagcggtctgccggagcctgggacgcgcctccgccagctgcgaccaatcccagctgcctctgtgcccacacctgccagccgagggcgggcctggaccctgggatctgggggaaaggtcacttgggactggagggagagcgtggatagggagaaggtgccaaccagcccaggcacctcctcctggcctccctctggccctgggcaaagggctggcacccctgccttgcctctggcttagcctgtccagctttggcagagccctaggcagggggcaagtgactgggaggtccctggcatggggtacacggccaactccgcccctgccccaccctgcccctgatatgcccctggtgactgacttcccctttccaggactcaagtcttcagtctggctcccaccgtctataggcccatgctcagcagggtcagaagtagagaagggctctggagccctggggagctgattggaatcccaggtgtggctctcatgtgtgacccctgggcaagtcacttcctctcagagcttcagtttctctcatttgtaaaatggagatactgacatccactccagaaggttctgtggaggactggcgatgagaagagtgtgcctaggtcagtgctgcacccgataaaggcacccgcatcgcctgctcgcccccacccccactgcctctggctcctatgcccccctcgctgctcccaggacttcagggcacctgggtgagtaggacttgaggagtgaccttggctggtaaggacttgctgccaggcctgccctgggatgccctttgtgcccgctgagaagagaacgccacctgggccagctgtcaggtgtgtctgctcaggctggggccggtaccaacatgcccaccttggcctctgcccccagacagctctctcctgccaggccaccctcagtcacccaaggcccagtccaaactagaggcagaaccacccaagttggagtcccacacccacctcccagggcccaccccttccctcccaggcccttgaggcagcaatgctgagtggcttgagggcctcaggctcccggcctggcagggttgtcaccctctggccagccctggaggggacggcgcagcaagaggcagcgaggacagcttggattctcctgggtttgggcactcacccccggggctgtggaggcaggagcgtcctgccccggggtgggctgcagatggtgggcggcggtgcagacgtgccctggggcttgagctggtggctgctcctcccctggctgctgcagcaaacaggaacaggacggagggcaaaggtcgggccgagaaactcccagggcctgagggtctgcagacggtgagtccgcccggcagcggtggctgatctggttctgcatgtcccgtgtgtcccttgtgtcaggcacagggcagatgatggaggaaggtttgcagaaaagggcccaagggatttggagagctcccttcccctaccctgctcaaaaagggccagtgacaagccttggcaatataacatgtctattttattttaaaaaacaaaacccaaaccacctgaccccttccccaggaggctcttgacgaaactctagggaagggcctggctccagccaagcaggggacagtcagaagatgtcaacatggatgccaggctggtgggctccgcccttctccaagccccccatccaccccctttgctcctcggtgctacaggcactgccgggttgaggggacaggcagggcaggactgtgggcatgcagagcctcctggcagccagggagggctgcccgcccccctgcatctggcgaggcaggcagctgtgtgcgcagtgatggagctaggaggaggaaacatgcgcagacaccccgtgttcccgcttccccacgtggccaggagagtgttcaaacacgaacaaggatggctgggcactcagggccccagcccccaacccaggagagg

SEQ ID NO: 2020 - DNA, 4001 bp, Homo sapiens
accctaccaatggaaagggacaaataggcccaggggcatatgcctcctcctctccacctctactctccttgtaccagaaaattcacatgggactgactattcactaggttctgggataagattctggctcgagagaaggtagtgtcacctagaaggcaaggtcatacaacggaaagaacaccagcaatcaggagatccatgttgagtttcacttccattactcagtagtgtaagactggaaccaagtcacttcactgaaattcagtttccttgtctgttgaatcgggctaataaagcctatcaatgctgtatatgatatgcaacccccagactatccgtcgttcccagcgaatgccgtccgctggtcgcatcttcctccatatccactcggctcccggtactgccgcaaccggaaatttggactctgttattaacgccccctgcgggggacggaggatgagctgtcagcgattccaccaatggcatttgagcctttgagcctcccaggagcgaggatgggctgaccttccgagaactgaggtgaggccgggcctataatcccaacactttgggaggccgaggcgggcggaccacgaggtcaggagatcgagaccatcctggctaacacggtgaaaccccgtctctactaaaaatacaaaaaattagccgggcgtggtggtgggcgcctgtagtcccagctacccgggaggctgaggcaggagaatggtgtgaacccggaaggcggagcttgcagtgagccgagattgcgccactgccctccagcctgggtaacagagcgagactctgtctcaaaaaaaaaaaaaaaaatagagctgtagtacaactcatatgagttaagaattgtgaaggcattttgttaacagcaaagcattatcattacagaaagttctactggacagtgatgctctaagtccttgccacccaaggtggtccacagactggcatcatggacatcacgtgggagcctgttagaaatacagaatttcagggtgcaccctagacctgctgaataagaaccaaacttttataataatcagatcttttcaaatcaaatcatcttctacaactcctgacaagacacccatgggtccccatttctcagctggaaacagggaatagagaccaacatcctccattccttctgttctccctattgcatctgcatcctgggagctatctaccacatgaacgtgaatatatgtacatgcttgcccacctgtcctactgaatatacatttccctaggggaatgcctggggatgcctccgaaccctccttcgagatcatctcctccctacctcggacatggtgagattcccacccagctttcctttggtcttccataggtacccacgtgatccctcatcacagacaccacatgacaatcctctcaagatactccgtgggacaccccctttatgcagcctctgtcctggcccccgcacacccaactctgggtcttcgaacatgccccttgccgtgcttcttcgctgtcagcgaatctcacgatcctctgccaggaagagacgcctcaccgcagttgtccttcattcccaaaactgcatggtaccgcagcctgacaccccaggcatcctttgcctccctgacaagtgcagatcctcagagaccttagttgtcagggacctcaagccggcggcttcttaccttctcagactccggcggctccaccgcgtctgaggcgaactccaagcccggacctctaggccgcagcccccagtctatccgtcgttcccagcgaatgccgtctgccggtcgcatcttcctccatctcgactgggctaccggtactgccggaaccggaaattaggactctgtcattaccgccccctgcagggggcggaggatgagctgtcggggattctgccaatggcgtttgagcctttgagcctcccaggagtgaggatgtgccgcacttccgagaactgacggcctcctggtagccatcttggatttgggcagtagccacgccttctttaccttcgttatgccctcagcgttaaggcgcctgcgtgttctggttgggctctttctaattggcggaaattgaatcaccagacgcttattgaagatccagttgtaaatggggtcaccttgtgtttgggagtgttggaacctttatattcaaatcaaggccgggcacggtggctcacgcctgtaatctcagaattctgggacgccgagtcggacggatcacctgaagtccgaagttcgagaccagcctggccgccttggcgaaaccccgtctccactaaaaatacgaaataaattagccgggagtaatggcgcgcgcctgtaatcccagctagccgggtggctgaggcacgagaatcgcttgaacccggaggttgtagtgagccgagatcgtgccactggacggcgacagagcgagactgtctcaaaaagaaaaaaaaaagaacaaatctaatgtgtgatttttgtataactttttcttctttcctcttttttgttttttagagtcaaaatactactctatcgcccaggctatagtgcagtggcaagatcatagctcattgtaacctgaactcctgggctcaagcgatgctgcggactcagtctcccgaagcggtgggatgacaggcgtgagccactgcgcttgccacatttctcattatttatagagccaaaatagtagaggacaacatgcagcaggaatcactgaggatacatagccaattttgaagtttgggaactcaaaaaactgcagcaatgggggacaacctgaaggtggagaaaaatgacattaaggtggagaaaaatgacagggttagtgggttttctcctcgtgtgcggagacgagagagtgtagaaatagagacacaagacaaagagataaaagaccgctgggcccgggggaccactaccaccaagacgcggagaccggtagtggccccgaatgccaggctgcgctgatatttattggatacgagacaaaggggcaggataaggagtgtgagccatctccaatgataggtaaggccacatgggtcacgtgtccactggacagggggccctttcctgcctggcagccgaggcagagagagagagaggagaaagagagaaacagcttacactattatttctgcttatcagagatttttagtattttcgctaatttgctactgctaactaaaaggcagagccaggtgtacaagatggaacatcaaggcagactaggagcgtgaccactgaagcacagcatcacagggagacggttaggcctccggataaccgcgggcgggcctgactaatgtcaggccttccacaagaggtggaggagtagagtcttctctaaactcccccggggaaaggaagactccctttcccggtccgctactgctagaccacggtccgcttggcaaggggcatcttcccagacgctggcattaccgctagaccaaggagccctttggtggccctgtctgggcataacagaaggctcacactcttgttttctggtcacttctcactatgtctcctcagctcctatctctgtatggcctggtttttcctaggttatgattatagagcgaggattattataatattggaataaagagtaattgctacaaactactgattaatgatatatataatcatatctaagatctatatctggtataactattcttcttttatattttattatactggaacagctcatgtcctcggtctcttgtgtcggcacctgggtggcttgccgcccacacaaccaaattaaaaaataacacagaagggtaaggtaagtctccattaaacccaggaaagagactggaaaactcctctttggagcctgtctatagtcacaggtgaaataaaagaaataaaaggaaagaaaaatgggcaaaagacttgaatagacctttccccaaagaagatatacaaatggccaagaagcacatgaaaagatgctcaacatcattagtcattaaggaaatgcaa

SEQ ID NO: 2021 - DNA, 4001 bp, Homo sapiens
gcgcccagccccccaaggcatttttaaacactccttttccttctactgtccctgtgtttccagggcaaatctctccctactcctcaccccagcctaatttcctcctcagtgtaggggaggatgagatgtccctaaggtgtcttagagactgcatcccgtgtaggagagagattcactgataccaccccccaaatccccactccttatctccaggcgaactctccctcctctgcactttccctgctgggaatgggtgctgggctgaggaaataggctccagaaagagggaccaaggctagactttgagaatcacttcctaacagcaagactgacaaggtcatgggctccctggaatgggcacttgaggttaaattcctagaagtctttaaggagactggggttgctttcacttggaagcagggcctgggcaaggagaccagtgaagggcccagctgctctggtcccagaaatccaggcgaaagcccagagaggcatccagtgaagatcaactccccttgaaggggtggctctgccccttccatcttccaagtagtgaccccacagcccccaaagcttggtcagtgttgagctggtcctcgattcccccagcaagttcacgggggtcagtctggctgtttagtacggtttaagaggcactcttgaatactgggtatatgccaatctccggaagactctgggcattaaaagataaagaggagtccgtctctgccccagggtttatacaaatgagactcagagagcaggtggctagctctgggaagtgcctgggaaggccttcctggcagtggaggtgctcttggccatgctggtctccatgctgcccaagcagggtcttgccaggttctggatgccagggccaggatgagggaggtgggggaggactgtggggttctgagaaagggtcatctgcatgagtgaagccactcagggggaaagccctctctcagtctgcccacttggggggctgcgtcactccagggtcttctggtcctcagacccgtggggccaagtgtaagggggcagttgatgctggaataatagaagctttgttaggtctcagctggggaccctctgggctggttttgaggaatgggggcactgcctgagagtggcttggaaccccttggagctgcaggatgaggggtttggaggctgagagcctggagagctggctgcccatccactgtcctggcccaagcccttctgtgttgaagcattcaccattgagtcgggcgtcccaggtccagctaccgcccacccgcctgcctgatggagctggtcccttgctcaccctctcccactcctcagtttcctccccctccacctcttccaacttctcaggactaatggggacacatgggattctgtgtagtccatgctaagttccccgagctggtggagaagtacatgagtgaaggaggatgtctgggcggtagaaggagggggagacagccatgcagagtaggctggtgagtcaagcattaagagcttttccctccaagacttgaaaagaaagggagaggagcagcccacagcttcaaaggctgtcgcggaggaaggtctaacattttcctttccctcggaggcctttgcctcgctctgtttcggggtctggcgaccaccacaccctcaccctacttgctccctcagtcaagcccagccttgcagcccaggtccttacatagacgtgaagacccaaagggctcctcagaggggaagggctgggaggctgctctcagactccaggggccagagtgtccttcctacttgtgctcagcttggcagttggttcctgtcatccctcctctcggtacccctggtgactgccctcttgcagggatgaccccagcccagtggggtgggctgggctgggtggggcttaccagtgggtgagcaaagccggctgggcagggctgcaggtgtgtctggggagcgggcagccgaaaggtgttcctgaggtgtgtgaaagggctctgctcaaataatccagggaggcgtttataaataacttttcctcagggccacggggtgagccccggcttctgattggctcagaggggaagtggttttgaacactacaccatagctaagcctgaggagataggaaaaggagataagggggaaaaggtcccaaatgaacagccctttttttgttttacctggggagcagggctgtgtgatgggagcttggcacttcctaaatccaccccgaagacaataggtcacattcagcggggctcctgccccaccggctcccccaaggcggccctggaggagggggacgaggcagaggagggggacaaggcaggacaagctcctctgagcttgctgtcctgctgcttatggggctgggggtcaggccaaagagcctcttggacaatgggagctattgaggccacctgaggggtgtgctcttggggatgcttgctttgaagattggagatctagggggtgggaagacagtagtcctctgaacacccctgaggaaggggaagaaccatgtctgggaggccctgggagcctttaggcggttttggtttgtggtggagacctggttcccagttctgtccccaatgttaagttgcttgtgagctctgtgccttggtctatccatcagtgcaatgggggaaattattcctggcccctcaggtagtgtgcaaagagaacacaggggtttagaatctgataaaagagctcaagaaactggacttagaacaattatatgagaggcgacctgaaggctagcaaatctccagtcacagccctctgccgcttctaggaattaatgtctccctgggtcatggcactgctccggctgctgccagcagagctgcccatcccaggcccattgagtgctacggaaggacctcagaaagcaattgtggacaggggctgggagggtgggtaggggagtttcttaatttacttcctgggagggagagtcactacccgacaccaggtgcccattctttgagacatcaagtgctgcactgtcctcgtcctcaactgtcctcccatctctccaaaagaaaccagaggctctgaagtgggctggaatcagtgcagggggcttcagtaaggcacctctggaagttggggcgaaagttccccatggtgaaatgagctagcttcagtacttaatagggactcaataaatatttgttaaatgaatgaaagagtgaattgtctgcaagcccaacccaagggatagtttgtagatgcattgcttgtggggactagggaaacacccgaggtcactcagagttgtcagggtgtagccagacaactggctgaagagagccagaattcaagtgacccaagtgtgccctgacacctggctgagggaaggatgtgtgcatggacactgcctcggggagcccttccccagacccctatgtggacttagctgacatgttgcacattcgttcctctggcttcctctgcttcactctcataacactgaccacaattaatggtaattatgtatggaattgtcagtctttctgcaaacaccgtgaactccctgaggagggcaagggggcagtgcctcttttgtatccctacccacctagcccagtgcccggcacttaggaggagctcaatatagatttgaggaatgaatgaacaattgtatgatagagtctttaaacaaagcaaagccagagggcgagaatttgtccatgcatcttcagtattgtccagtgtcatgggtagcctgacctgttctaaactttgcccaggaaattcctagaaagcagatgagtcattatgttcttccgatagccaggtgacagtggctatcaagatcaaacaactaagtccccttgctgagacaccatgtccaccagggaatcttctggttgtatgtcctttagggcagagaatgcactgcccagctggttggagcgactagggctgcttttgcaggcatgcttctcttttaaatgacccatggacattctgggctacccattggtcca

SEQ ID NO: 2022 - DNA, 4001 bp, Homo sapiens
actcacaccatagtacgtgcttaataaatgtctactggatgaattaatgaaggtggggttggggagactgaccaatgcccatgcagcccacgatgcccagcagggaaccggacatgtggtagagtgggagggcgaggtagatcacatcttcctggtggacaccacacagctgatagaagccctggcattgcaggatcttcagatgactgatccgagcagccttggggaggcctgtggggtggcagttatgggacgatcaggggaagggcaaactccaagctctacctatctgtttgcacccccgctgggtttcccacagaaagaggcggaggcaggacagaagctgaggaccgagaccaggctgtcctggaaatatgggtggtctgggggaggtggagaaatgagtaggaggtgaggagactggggagtgaaatgatggggagaaaaaggatgtgccaatgaaatcagcatcctctctgggggctttgaaggagtggtctgggagcagacccctgccttcctctgccttggtttcggggagctaagtatggtgcccggccctcacccgtggtgccagaggtgaagatgtacaggcacgtgtctgttatgctctggggggaagagaggtatcctggcactggcccatccacttcagcggacacttcagccagcaaatcgctaattccagcagggtgggttcctgggcctgcagcccacaggtggagccccatggctctcagggcgggcaggtccggctccagggactccagaaactctagaagggtgggaaagcacaacgccggggccctggctctacctagaagagcctatgacccatgtcccctccctatcccagcccacactgctcttggatgagggtgaagggtatggacattccatcttgggtctgaggcctggaactcgactccttggggatccttggggcaccaaagattcagcctcatcccttctcaaacccggagactcctatctccacccactttcgaaccccaagggatagtcggcttcttcccaggcccagggatgagaccaagcctttctgtggtctccgacacgcccccttctgtggctggccccgccttagtcagttcggagctccagccttacctggcgccagcaccagcgcgcgcgcgccgcagctgcggaggcagtgcagcagggggccccggcgcagggcggtgggcacaaaggcagtgcgcaggccggccttggccagcccgaaccagagccacagaaactctgggccagcggggaggagcagcgccacagttgctccaggtgacagaggggcggcggctcctccacctctggcggcaccgtcccctccggcaaactccgcgccgcttccggccgctgcatctccggctcccggcgctgcccgctcgccttctccagcgctcccctcgccgctgtcgccgccgtcgggtccccagtcccagcctagcgcacgtaggaaggcgcgtgcagccctgttactctcgcgctccgcctctgagtagctaaagcgccgcgagccgtgaatgagaaaggtgtgcgcggcgcgctgctgggccagttccgcgaggcgccaggccaggctgcagcccccctcgggaccttccgggtcggcggcagccgcggccagggcgcgagctcgaagagcccttttgcagcacagagctcgcaccgcaaaggccaagtccgccggaagccagcgcaactgcggccagaggtgtagcttcagcagcagcagcggtagcaacagcagcaggggcagcagcaggagggcagccatggagcccgcttcctctatcggcaccgtctggttccagccgctcgcaaacatccctgatcctcccttccgaaaacctagggccgctcgttctagctgagacttctccttccagggagcgcgcgtgcgctggcacacgcccattcccacccaggcccccaccactccacacgggcggagagcagaaacccgggaggagtgcgggtgtggggcggccccggactcccagccctccccccacagcctacgctccgccctaggcgcgctccctcccggactgctcgcggctcgcaccctaccaggtcctgggcggtgctcgcgccttccctgaatcccagggttatgtctgtcttctaagttgtttctcggcttgggcggtttaggcatctggctaagccctagagtccaggcctgagagccagggcgtttggatcgcagtccatcttcccctcaatatttctcgttttcccgttaagggaaggtaccattgctctctcccaaaagaatgaacttggcccctggcccatttggttctgcaagtcccggcctgccagccgcaaccccaggggatgggtgggggctgagagttaaataggggaaaggtggaaacccagactgccagatttctgaggggtcacgacagaggcccctccctttgggcaagggtacaataattggggccagccagcaaatgctctccatcctggttttaattgggacagaggaaactggggaaggagagaggaaggaaaaagaagcctccagtggtttagactttcaaaggaagcaacagcagtgatgagggaggggagaacctggattctgtaaaaagacaaattttcggggtgaagaggagcagctctgtgcagttcgcccaaacttcactcctcagtccacctccattctccctggacagcgggggaacaacagcatagccaaggaactctcctctgctggttcacatggcccagcaagtggccacactgtggaaggaagagcatctctgtccctccctggtatccagactttatctccaggtacagttgtccctggagaccaagctggagcatccctcccgtcaagcagcgagtcctccggccattcttggtaggcacacagacttcaactggaggatgacagaccttttggaagcatcttgtttcttgagaaatgagtaaggacaggcctcatcctacgggggatggttctgcatagacagatcagtgcctggctcccacctccagtggcagcaggaaggatgggtagtggccaaagccaagtcccttctgctctagacaaaagtgggggcagaacaggaagggaaagggggatgttctgcggttacaagtaggggtgccaatcaaatcaagaccaagctatacatgcacggggcaaatgccagcagacactccagcacaaaagacattctggcttgttttattgtcatttaaaaacaacttttaagacacgattatctctgccaaaaaaaaaacaaaaaaaaacaaaaaaaaaaacagactcaaggaaatgggatcatttgacaattctgtgaaacttgcctctgggactccctgggctctggtgtagattgaggtgccaacctcagaccaacctaagcctccagggcacaccacgtggggctgtggccaccctttcagactcctttctgaatgcttgtggcatctgccccatgattaggaatggacaccctgaccacgtcatagatgcccatttcacactggcatgtggatagtgactataaaacgtcccttcagaacaaaccaagacctgaaggggaagcaggaagggacacccacacactgagtctctgctctcatcctagcttatctggccagctgcccctttgtcatttcccttctctgttgaaatggctctttgggagactgggggaggagattgcggaaggggccagggggctgaggacttccactatggtctgattttacagagcctctggcttcagtcagatcccaaatatcactgggaacagcagtgtgaggggctggaggccccaggaggagggaaggggctaggggctgcatggcagcttctcaaactcagccagaggagaaagctcctccttccaccgggggagcttggggatgcagcaagggtgtttcccctgcaatctcctcagcctctattaacctttgaatcaccaagaaggagagggcagtccagccggggg

SEQ ID NO: 2023 - DNA, 4001 bp, Homo sapiens
atatttggacttccttgccactagctagaagagcttctcactgaacttttgtttagttatatcccacccttacggctcacctaagatcctgggagccttccccgggaacttccccggggtctcacctcaagcgagggcccaggaagggtgaaccaagtcgtctggatttatggattcaacaggtgtggggcggaaggccttttcctgccgagggtgcggcccagcgccaccccgctcagtctcagcgggacacctccacagccagtaggaagggcagttcaaaattcagtgctacccccgcgtcccagctaagaaaacaagggccatccaggtgccctcccagctgacgagatggaaaaatcaaagtataatagataaagagggaccgtttcaaaagaaaaaggggacttgaaaatattgtagactagggggaggaaaggaggtggaaagaaacaatgccctacacacaggaggggctccacaaacaatttgttgaaaagaaatcgctctgcggacgctacaaagatgccctgcaggacaagcccacttacacagaaaaaaagaaatcctatctagggagttgttggtccccagagtccccatccctcattccccaaccccgtggcgtgcgcgcttcccgctagacttcagcctggggctctttcctggcccccagatcccccgcccctccggttgcgctccccgcctggccccgagggtaaacctgcctccgcggaacacatctccgcgagactgggccaaagctttggggcctgcactcctcgcaaaggagagcctccgagaccggaggttcatctcaacccccgcgttcgagcccgggcctggagaaaagtgccctcccctcggcctcggcctcgtcaccgcgggggactggcgggaggagtaggggaggccggtgggacacctcgcaccaggccgcccacctacaggggcgtccgggctaggggagcagacggagagcgggggcggctcctgactcctccgcgcgccggggccggggccgggccgggggctcggcccgctcagccaatgggcgccgcgctcgggccccctcccccgcaccgggaggggccgaggctgggctgctgctgccgaggtcgtgtgcgacgtgccgctcccgggccctgtgtccccagccccagcagggccgcgtggacggcgcggcgcccccggaaggaggccatgtgctcagtgccggcgccaactacgcacgcggcgccctccggcccgctagatccgaagcccatccccactgcggccagcggcccggcggggcgctgcgctcgggacccgcaccgagccaggctcggagaggcgcgcggcccgccccgggcgcacagcgcagcggggcggcgggggaggccctggccggcgtaaggcgggcaggagtctgcgcctttgttcctggcgggagggcccgcgggcgcgcgactcaccttgctgctgggctccatggcagcgctgcgctggtggctctggctgcgccgggtacgcgggtggcgacgggcgtgcgagcggcgctctcccgctcaggctcgtgctccggtccggggactcccactgcgactctgactccgacccccgtcgtttggtctcctgctccctggcgtgctcactcggggacccgcgactagcgaccggcacgctcgctgttgctacctcttgcctcttgccagagagcgcgcggaccgtagcgtttataggaccccggccattggctggcgacgccggtgtgtcaggggtgtgtgggcaggacctcggggcggggcctggggcccagcctgtcctgggcggcgctctgcggggagggggtgaggggagtggccggggccggggccccccctaaccactgcctcgctcaggctgccgatcggctcgttctctctgcgttgggaccgcggagggcattcgctgtgtgactcagggcaagtgtgcgcacctctctgagcctccgcggccttctctagcaaaatggtggagccggtacccggctgtaaggcaagctgggatgcgcggagtagcgggtggaaagctggactggagttctcactcggccgctgggtgacttcggtgcactagggatagtaacagtaccacctcgtagggttgtagaaagaccaagtgagttaatatttgtaaagtgtttagaacagcgtctactgcatggaaagtagtatttatttgttagagagactccaggaggtcttgcccagggattgacttctcccttccctgtctccaccccccacattcccgtttgtgagccaagccttgcttttgcaccggccgggctctcttgcctggaaatgcatacccatctcaaacctgggctttaaaatcacctcctctgggacgccttcctctacttctcacagttcaggtgagtctatggtgacctgtaagtgtggaaaatatgaaaggcaggctaactgactgacatgataggacattaaggacatgatagacctcgggtttgaaccagctcaactgtatactggcccggccgcgatcctgggcgagttcctggccagtgaggctgttttcgtttttttctttaatttttttttttctcagacagagtctcgctctgtcgcccaggctggagtgcagcggcacgatctcggctcactgtaacctccgcctcccggattcaagcagttctctgcctcagcctcccgagtagctgggattacaggcgcccgctatcacccctggctaattatttttatttttagtagagacggggtttcaccattttggccaggctggtcttgaactcttgacctcgtgatccacccacctcgcctcccaaagtactgggattacaggcgtgagccactgagcccggccgaggctgtcttcttatgagtaaatggaattcccacaccaatctcattgctatcaggagaggtgcaatttccagataagctcatgaagtgtttagcatggaagttctcatttactggttggtggtattgttggtttatttatttagtctgttagtaaataaataaatgctggtctcaaactcctgggctcaagtgatcctcccaccttagcctccgtagtagctgggagtgcaggcatgtgccactgcactggtagtggtattgctatcatctgacttcaccttatttcctctagaccagtgccttacttgagacacagtgaagggaaggacccccagtccaaaggtctgatcaaagtcttgagggtccctttcccgatggagggagtcatggtgggcttactgtctgtcggaaaccgggaggctgagccgaccagatgacccctggagttctctggcaatgtgtccagttctggctgaggggcaccttggttgagtatggagccctgaaacagaaggcaggtgcattctgggcacccccctgcccaaggcttcaattcctgtggtctctctatgctcagcctggaaagcttgggccacctctctcctcacccctggacagaccaagtcctgctgactccgctgtctacaccacctcatcctccttccctcccctgctgtctgcagggcctccatctcctctggtcttttgtcctccagtcctgcaccctgccactctcctgctcatctgtctgaaattgtcatggagggagtaagggccaagcctggccatcacggtccttcttcatggcaccagtttacacgctcagcctcgcccctcacaccagcaactcacatccacacatttgctcagcttgtctcctctgcctgggaagccctccccgacctcaccatgccaaaaagcaccatgggtccttcctcctccgggaagtgtccctggttctcccaagtggaaatctttctctcctttaccatttggtgttttgtaggttgccacttgtcctctgtctgccttccctcagcctgtgagcaccttgaggacaggttctgcagctgaggcacgtgggtgaatgactgaaggagggaaggaatgcacgaatgagtgagcagc

SEQ ID NO: 2024 - DNA, 4001 bp, Homo sapiens
tagccagtgccaaatggaaatcacgcggaggtggagaaaccagcctaaagaatgattgaaaagtagtaacatttacgatggccgggcgcggtggctcacacctgtaaccccagcactttgggaggccgaggcgggcggatcacctgaggtcaggagttctagaccagcctggccaacatggtgaaaccccatctctactaaaaatacaaaaattagccgggtgtggtggtgcatgcctgtaatcccagctacttgggaggctgaggtgggaggatcgcttgagcccagaaggtggaggttgcagtgaaccttgatcgcaccactgtacttcagcctgggtgacagagcaagactctgtgtcaaaaaaaaaaaaaaaaaaaagcgagagagagagaaagaaaagtagtaacatttacggggaactcactctgtgccaggtactttacatgcattatctcatttaattgctccagcaccctatgaggcggtatggttattactcccattttacaaatgagaaaactgaggcactgaagagttaaagaacttacccaagtcccacagctagaataggatggagcaggaatgaatcctgggggcttctacttcccaggcccactctttttttttttttttttttgagatgaagtttcgctcttgttgaccaggctggagtgcaatggcgtgatctcagctcattgcagcctctgtttcccaggttcaagtgattctcctgcctcagcctcctgagtagctgggattacaggcacctgccaccacgcctggctaatttttgtatttttagtagagatggggtttcaccatgttggccaggctggtctcgaactgctgacctcaggtgatccacccacctcagcctcccaagacccactcttaatctatgtgctacagagcatgtttccagtctgcctatggtgagggtctcacatccatgcctgaacaaatgctgttttgcaaaaatgtgcactatccttcctccactccaaatataagcagatgctattgtgatgaataaatgcaaattcttataaagtgttaataagtcagtgttacttttctgacattatgcattttcctcaatcaagggaatctagaaagtaaactgcaattacgttgcaggagtccatgaaaatctttcctctctaaaacaagggagcctcaggatctaaaaggcaggaaacctacgtgacagatctgaactaaattcaaatcaagcaacgccttttctgagtttatcttgctttcatgcagctcagctatgttacttgctgaaaaaattaactgccctgaagccaaaagcaaaacgaaagcagagcgaaacatctcaccaaccatagaaggattttgcagctaacatgtttggttcaagttgggacaaatgaatcctttgggtctcttccattcagttacagatcctgctgttaaaggctgttccagtagaatgatttccacagagcacttgtctctaaacctctctcctccctataaaagaccacctgctggacaagactttccccctctccccaccataatccctcccaacacagagttccctctgcaacaccaggagccccccagcgactctccaggaaggctgcacaggccctggcagccaagcctgctcttggcccctttccctgagcaacacactcaccccttccttcatgctctgatcctgttgctccatgcttgctctggaagggcagagtgccgctcacctccttttagccaaagtaacgcgtgcactgaatggagagagaagacattctgggtgcactttggccatgccaaataacagccaatagcatttttatagccagattaagtcagaataaccctttcaggaacctggtcttcctttcacttctgcttttaaatgaaacgtctggggtttggctaagtaagtgggtgccccctggggactgcaggcccagcattgtcctgatggaacagtctacggtatttccccattgctaaagtctctaccagtcaggctcatggtgaatgactggaagggttatttctgtcaggaacgcatggcaaacaacagctgtcctccaccctacatgacaccaggtaatctgagggcaacagattgggccactagagacctcaaagatgctctccctgccaggaaaactacagtcaagtgtctcttggtggagagtcagttttgcccaagtcaccgtgtaatactgtttggggaaagtttctcattttctgtttttttttttttttttttttttttttgagacggagtttcgctcttgtcccaggctggagtgcagtggcatgatctcagctcactacaacctccgcctcccgagttcaagcgattctcctgcttccacctcctgagtagctgggattacaggcgtgcactaccacgctcggctaatttttatatttttagtagacacggggttttgccatgttggccaggctggtctcgaactcctgacctcaagtgatccaccctccttggcctcccaaagtgctgggattacaggcgtgagccatcgtgtccggcctcttattttccattttaaggagctcagaatgacctagggatgttactttctgtgtattcatcactactgggaaggtggtaaatacctcgaacccctttccaggcagggcagggaaaatgagtcacacctgctggtccgggtccggccatctcaaggccaggccactgtcagccccccatgtttggcactcattcagctgccacagggcacaccagcgcaagtggccaaaatccaaagtctcacaagtcccacaggttttcatctttacagaacatactcccagttctatttgctgtggcgtaaatccagttactttagtgattgattctgaatctcatgcatctttaaacaagcagagactgggagcctgtgttaggcactgttccttgcattagcagcaaatccccagggttgctcagggtgggagactgtgagaagcctagcagcgtggccgtctgtgtgtgtgtgtgtgttggggggtcgggggggtccctattcacaagggagaactcagcattccctttcaccagctactgcctgtctttttcttctgcgtatcactgtcctagcacactgacttgtgactaacgcatagcaagaccagaggtttccaattatttcaaagatctagaaaaagtttccaaagaaaatgcactttaattgcaggggtagggtggggagaggaaatcaacgatgggggagtgaggagacgggtacaggtgtgcaatccaacacaaagaagaatccggccgggcgcggtggctcacgcctgtaatcccagcacctggggaagccaaggtgggtggatcacctgaggtcaggagttcgagaccagtctgaccaacatggtgaaaccctgtctttaccgaaaatacaaaaattagccaggcatggtggcagacgcctgtaatcccagctacttgggaggctgaggcaggagaatagctggaacccgggaggcggaggttgcagcgcacctagatcacaccactgcactccagcctgggcgacagagcgagactcatctccgtcccccatcctccccccaaaaataatcgtccaaagtttgtagtcatcagtcatgtcaagtgcatgacacctgcttctatctaggcccagatcttccacttctccctgcctttgggcgagggggtaactaaaaccgggggtcgctgggggggacgcggacactcccagtccccgccttgacggcccagcccggggaagcggggacagtgagccaggccctcaggcccagaggggatcatcccgggagctgcgggccgcagtacccggttcctgccagtgacagggcgtcgcaagcacagccatggcgtcaccaacgctcgacccgtgcttccgccctggagggagccgagcgcggggacgggggcgtggcgggaggccgtcatgacgccaggctgcgggccgctcagccagtccctctgc

SEQ ID NO: 2025 - DNA, 4001 bp, Homo sapiens
cactaatatatgtatatatacgtaatacacaaacaaatgtaatacagtgtctgtagacatgctaatatatgtatacaagcgtaagcatagacgtataccaaggtcaagcctgtagtcagttctcagtcctcatctgagctcatcagcacaggctgtccctccctccttgactctcatcctttactaggttttggggacattctgccctcagggtcttccacacctgcaagggccccttctctttttccttttttcccctttgccccaatccctaaatgccacagagttcaatctttgaccccattctctttccaatcaacaaggggcctacccaaggtgagagcagtgggacctgaggcccaaaaagactgggctggaaaatggaacaggtcccccagcatcccaatgtgcccggaaaggacgacactccagggggaaacacctcctgccacgccctggtctccaggggtgagcatccagggtactagggcaagctggctgctcccaaaggcaagatggtgcctcctacaggcaagatggcagcctccacggaggaagatggcggctaccttccacccacgaccccggtcagctgctgcccggcccaccttgtgcccaccttgtgcccaccttgtgcggcgtgttgaccacagagaggttgtagccgtactggaaggctgagccaaaggccgcgctcagtgtcgccagcaacagcgtcggctggagccgctgtaggagacaagtccaaggtcgggacgctgtgggcttgggcctcgggaagtggagtggctgggcctccacctccctccagcctgggctggaagtgggggatgggggatcccaggccgtgcccccggaaaagaggaggaggtggcgcagggctggggcttttgggggctgaggtctctgcacgcattcattccctccttgaggatgtatctgagcatctgctacgtgcctggccctgtactaggccctggaggccaagtgtgaagtaggggatgctttaggaaaaaggcccagcaaagcactgcctttaagaagctcactttctagtgaggggagcccaccccgtccaagaaagacaaagatgataattccaaatagctagaatgctgtgaggacaataaaatagggtgatgggtggggtagcagcctgtgaggaatgagagactgtgttcagtagggtgggcagggcagggaaggcctctctgagcaggcgccctttgagccgggaccagaatggatgagagggagcagctgtgtaagcatcggggggaagagcatcccagacagagggactcattgcttgcctctgcctctagaacaggcccttaggaaaatcccggcagtcgcctgtgctcagggccaggctttccatggttgccacaacacccagggcagcttggaggggaactggcctgagggccaaagtctgaggagcaggtgggcagggtctctgaccatgtcctagagccaaggccctggtgcatgccccctccccactgccccctccacccctcactcctgttccacatgtcctcaccccaaccctcacacttagctgcctggctgcccacagcccgtagctctgcacatccaggaacaaccagacagaagggcaggattcgggcattcttcagaggccatctcccctcgatctttaagggtaggggaagcggaggggagcaggggtggaagggagagaggcatctccagcaccatccgctctcccagcattcgctcagccaccctggcccatgtctgagccatgaggtttgagcatagctgcttctccacatggctctcccaggcctggttatcctgaagaaaaaggaagcacgctacccgctccttgctaaaagcattccacggccttcacctccctccacaggtctgcacagctggtgggagagggacagtgacaggttcctagtcttggcacttaccccctccctggatggaatgggtggaggggttcccgcctctttgttctccatccttgttcaggtgggagaacaggtgtgctctacctcccaagtgacacctgctctgcgccagccacctaaagaccggctgtttctcccctgggcctacctggctttatgatccttttgctctctggaccctgctgactttccccaggagcaaattctccttggaaatgttgataagacacacgttgccagtgcacaaatcatacacagcacgaatttcgtctttgcacccaccaagccccaagccgaaagctccctagttgcaccaaggagagagaaaaaacattgcctgacattggtccgcagaaatgaggactttcagagacccagtgaggctgtgacctggatctaggatgctttttctgtgtcatttttccatgtatgcctcttttttttttgagacagggtcttcctttgttgcccaggctggagtgcagtggcgcaatctcagctcactgcaacctcggcttcctgggctcaagctattctcctgccttagcttcccaagtagccgggattataggcacgtgccgccacacccagcttttttttttttttttttttttttttgaggtggagtctcgctttgtcgcccaggctggagtgcggtggcgcaatctcagctcactgcaagctctgcctcccgggttcacgccattctcctgtctcagcctcctgagtagctgggaccacaggtgcctgccaccatgcctggctaattttttttttgtatttttagtagagacggggtttcaccgtgttagccaggatggcctggatctcctgacttcatgatctgcccgcctcggcctcccaaagtgctgggattacaggcgtgagccaccgtacccagcctttttttgtgtgtttttagtagagatgaggtttcaccatgttggccaggctggtctagaactcctgacctctagtgatccgcctgccttggcctcccaaagtgctgggcttacaggcatgagccaccgcacctggctttttttttttttttaacttttattttaggttcagggtatatgtgaaggtttgttacataggtaaactcgtgccacgggggtttgttgtacagattatttcatcacccaggtattaagcccacttcccagtgtttgtttgctgctcctctccctcctcccaccctccagccggaagtagatcccagtgtttgctgttcctttctgtgtgttcctaggttcttcatatatgcctcctcttgtgcatttggactaattgtccatttgggggaaagaacaaattaaacactttcagaaaaacacagttattatttctaattacactaaatagtgttaaataagtcaataaaatattggacaaaggtgcttatttcagaatcatttctactagcattttttttttaaagtagagaatgattgaataaattaggagtaactaattgattggaatgccagacttctgtttcaaaggataattatgaaatgtgggaacatggaaacattaacatgttttttaattaacatgacctttaagagaagtgatcaaagcagaatacacatagtatacctggggaaggccagggtgcggtggttcatgcctataagcacagcacaatgagaggctgagtgggtggaggattgcttgagctcaggagttcaagaccagccagggcaacatggtgaaacctcatctctaccaaaaatacaaaaatcagctgggcatggtggcatgcccccgtggtcccagctacttgggaggctgaggtaggaggatcactggaaaacaggaggctgaggctgcagtgaggcatgatcacaccactgcactccagcctgggtgatagagcgagaacctgtttcaaaaaaaaaaaaaaaaaaaaaaaggatacctgggggaaaatgtgtttgcccatgggtggtaacaggtgggtaaatgacaagactgagagaatgaaaggtccttatttatgtttatcctgctcctgctcctgactatgttgtaggtattttctct

SEQ ID NO: 2026 - DNA, 4001 bp, Homo sapiens
ttttaaacttttattatgaatataaaagtttcttggtaggggggtttaaaaactgacaaatcaacaataaaaatcaataatcacagagattattagaaaaattgaaactaaatgactacctgccctactaacttttaaatcaaaagtattgatcttttcaaaaagtattgatcaaaagtattcaaaaagataaaaagtattgatcttttgaaattacacaccagagaaacttaattttctttggaataacaccttgccgagtggagtgagaggaaaaccaattacttattaaacctttccaatgtacaacttgaatttcactaacttcatattctgcactcgaaaaggaaaattatgtagcataatttataatgatacaaggtaaataaacgtaagtgaaggaaataagaccaaattgttaagcaccattgagcttgggtagtaggacactggttgagtcatttccatctcctttctttcaacatttattttcaaatttccttcaagagcacttaatgttaaatataaaaagcatccactaaaaatataagatgaataaattaccatcacttttagttcagtacgattatgaaaagtcctgggaaaatgttaaacatgcccagacaggtcctaaatctatgatttccaggattagggatcaattagctgaagcatacactgctgttcataaaagaaacctttaaccagggtttacacgctctgaatgcatattatgaaacggagttcaatgggcataagaactactttggcagagcaaggtttccagcacccaactactggggacgaattggggattctctccgtttcccaagagggccaaggaattgaattgggaagcatttctgacgctgttataaccataaccagacaagtctccagcaaagttgctgcagcctgtaaagacagccaagtgcgggtgtggactgcagcgggatgatgatcacctcctgaccctttttcttagggtctgacccacagcccccacctacaaatatgccagacgcgtcgccggctccttgcacccgactgagggggttctgatttcctggagcagcagcggggcgtgtgcaggacggggagggagcaggcaggggcggcgcggcgcaggcccgctcgggcagcagggggcgtgcgggccaccccgccgaaggccaggcgaggctctgggcaccccaaacccaaccacctgcggcagcgactttcccggctcacctgcggggtccaatttcagcccgttggagttgctggtattggccaccagggtgttggtctcctcctggtcgggaccctgctcgcccggggccacgttgatgtcgctgctcccggggcgggtgctcttaacgcgaggccccttggggaggccgtggccgtggccgtgacccccgtgcgagtggccgtggccggagtcctggctgaagccgctgtgatggtggaagaggcagagccccagcacgttgaccagcagcccggccacgccgaccccaaggaccaccagcggctgctgcatctcgtgcggctcgatgaagcgctcgatggcctccagcaggatggcgaaacagaggccagtcaggaagatggcgttcaccagagcccccattacctcggctcggatccagccgaacgtgttcttctgggtggcgtgggtccgccgggcgaagcgctcggccaccagcgccaccaccagcgccagcacgtccgacagcatgtggaaggagtcggagagcatcgccagcgacgaggtcacccggctcaccaccacctccagcaccatgaacatgaaggtcagcgccagcatgcacagcagccggccccggttccgaccccaacaccccatggctgcggctgcggggcccgccgagcccggcccggagactggtgcagcggcggcgttggcgggacgcggagggtcggcgaccgcgacacggaggagcgcccgagtcgggccgttcgggaaaccgctgaggggcccccgcggccgcacggggacaagcccgggtcaagccgccgagccccgcgcctgtgggcgttctccgccagccggcggcgccgcgccgcgcagctcctcaggcgtccgtcctcagagccggcgccgaggcccggctcagcctcagcagcccccacacccaggcggcggcggtggcggggagctgggctcccggagccggggtaccaagagccgcagccggagcaggagcaggagggcggcgggcgagggcggcaggagagggcgacgggcagcttcgcgccgagaaagctccgagcatctgagggctctgcttgctggtctcctctgcggcggctggactgaggagcggatggctgaggagctagagaggcggcggccacggcagctgcactcggcccggtctcgggcgccttcttcgcccccccgcctttgcagacggtttacaaaaaaactttgctttgcactcggaacccccgttttcacacggacccgagcgtgacaaggccttgccgccccgcccaccaggcccggcacgcttccccattggtcaggaccccctcacgacagcctcggcgtcccgcccagccacgctcactattggatggagcctcggaggggcgggaagggggcggggtcgcggctccaacagataggggcggggccttttcctcccggagccgggcgtgggccggggggccgtggccgggtgcagcggcgggcgaattgggggcgcgggccgcgtgcagcgggagggggaggggctggccgggtcccctcgggtgtggcggagtcctggcctgcggaccatcgcaactcccagcacacctgcgggggccgggctgcaaagtctgcaaacagactttgatcctccgagcccagtccacgtgggggcgggccgcgcggcggctgtgtgacagctcggcggcgggggaggggccggaggggagcccctgagcgcggggccctcgagtactcggtcctgtcggaggaggccgacagacgcataaacaagtgcgactgtaacttgggactctgctggacgccgagctgaggagttagtcctcccgaaggtctgctaggggcgtggaccgaatctttgtacatgttttgggaaagccagtttctcctatcaccatcaacccctggagaccttgtgtgaactcaggtgtctgtcactgattatctaaggacagttcagggtacagacttcaggcaggagaaacctgggctctgctccttgccttgtcaatagccagctgtgtggctttgagcaagtcacctaatctctctagacctgtttccccatctataaaggactggacaaatgcaactctgaagatccccgtctgactccaaaattctaaggctctatgatttaacatttatttatagactacacacggtggaatcttgtgctggttgctatggggaggtggaggggcagtaagaatacaaaggaacgagtttctgtccaggtggaggtaaaatataaacacgacattttaaaattacgatggaatactcttgataaattgtgctattttagactgaatacataagcactgtgttgtgggtggagatgagttgatctggaaaggaacagcttgcccatctaaggtggggtggtggctggaatcagagtggcttaagctggacctgaaaggcctcaccacagcccctgcgcagcagaaggacctccccacccactgccctagattactactggacaaatgcagtgccagctattgcctggagatgtgtatacaaggcttgtttggagctgttattttgcattgttttggtattcttgtaattcctatgaaatttttttcacttgtatgtagtgtgtttctagtctccccatccagactggagagctggatcctcaccttctgtttctgttttgctggaatataaagaatggaggaaaattttcaagacattattaaggaaaaaatgatagaatttgatgattaattgggtattgggaaggaggaagctaggtaggagaaca

SEQ ID NO: 2027 - DNA, 4001 bp, Homo sapiens
aaccttggatagcagctcacctactcttttcctacctttatcaaaatcaattcaattaaaatgggttgcatgatttattagcaatatccacggaccagtaaaaccaagtaaagtagtaacacaatattaatatgtgcagctctggagcaggcagtattagcatgggtctcagtggagctaagataaatcattagcaaccagtttctccctcaggatcaatgcagtgattacgaaagagagttgggtcatagtctatgcatgtaactggcctactttcaaacacacctttgccttattaaaagtcaaacagaaataaacaacacagtccatgtgtgtcatagaaagggatttcaaataggcccaaagtcaatcctacctctgatattcagagcttcagactttttctcttttttcatcatgtcttctggctcattctgggtgttgaaggaatcacctgcattcaaagaagaaaccttgtgttgtgtataagttctacaaacaaacaaaaaaaaaccaatggactcaaaataaagttttgttattttaaatttctactagcttaagggagacccttctgcacacccacagctcagaacagtacattttggccttgaaatagccttgtgatccacctttggacttcattcacacatcctttcaagttaaaacaaaaagagggtgaatgggagcccacctgcagcccctaaacccgtaacacccaagaagacaaacggatgggcaaagagggggggagaacaacaaaattcagacagcaagtaatgagagggaggaggggttggagagtcctgcctgttgcccaataatagtgaccgatttccaagaaaatcaatactcatatacagagaatagggtaagggaaaagaggccagggctacccgaggatccaggagaaaaaagaagggatggggaatatgttaaattggcagaagagaagtaaagcgggattgtaaagggaatggatttattaaaaaaaaaaaaaaaaaaaaaaaaaaaaaacaacaacaacaaaaaaaaaaaaacagaaaaaaagcatgcagaagaaaaagagggcgtggggtgagaagaaagggaccgggtgggaggaggaaggaagggccaagcggtccaaaggatgcaaccgaaaggcacctgctacgtttgcgaacacggtcgcccccttctcccgcttcctttccaccgaggtcccccggagggttacggccgagtccgagcctggggctgtcgggtccgccgcgcgccgcgggtcctccgcgccctgaggccccccgaaagcgccggggacacagccctccgccagctgctgccgctgctgcaggcggcgactgcgtccccggaggcagcacgcgaaccaggcggcgcagtcctggaagatgagcagccccaccacgttgaccaacagccccaggacgccgacgatgagcaccagctcggggtcatcgatgcgctcgggccgggccaggcgcagcacggcctccacgaagatggtgaagcagagcgcggtgaggaagaccgcgttgctcagcgcgcccaccacctcggcgcgggcgtagccgtaggtggcgctgaagccccgggtggggcgccgggcgatgtagccggcgctcaggcccacgcacagcgagatcaggtcggagagcatgttgaaggagtcggagagcagcgcgatggagttgcccaggtagccggagaccagctccgccacgaagaaggcgacggtgagcaccagcatgaagagcagccggcacgtcttgccagagtagcggcccatctcgccaccagccccgggcgcccggcgccgcccaggggagcgcagcccaccccgcgcgcagccacaggtggggggcgcggcgcggatccgtgaggcccggtacccgcctcccagattgtctcgccggccctgccccaccgctttttataacgcgaggccgagcgccaccagtccccgcacgtccagagtctaaaggagtggcgggggcagtatctgaacagcccgtgcaccgcctcccgcggcccttttcccctccctcgcggcctgggcctgacttggcaggtggccacgagccgatgtctctctttgtgggacaggactgtgcagagaggggcgctgcggaggagagggggcgtgtctggacgtcaatcttcacagactccctccccatgcagaggtgggattcacccagacaccccgcttctcctggccctcagggtcgccagtgtcctgttgactcagtcataagggccttggctgctgtggggtgtgttcgctgcggtggactgggacaccttcgcgtacgtgcccataggcaccttgcggtgcagattccatattaatcaggtgcaaggccccggagcacaggcttggggcaacttgcccttgagggtgcttcctgcttttcatttcgtgaaatgtgacctcatccgccactcagccctccaccctcattccactaaccccaggataaagctatttaatcctctcttgttcctcacagccattataaacggtgcaggatcgttcctattacccactcatggcacaagatcgtccccgttccccttcaggatcttcgctgtcaaggcttccttccctgggtgaatcgcaggcagccctcaggagagcagaccccacttctgtaagcatgcactcctgcctagcactcgaaggctggtctactttgtggtagacacaagtcccttggccgccaaagaaaccagggctgacctcctctgtgtacttgtctcattcttcattgaagagaatattctactcacccccacgtgtccctgacagcatgacctgatacgcagtacaatcgactgacctacatgaaggtttattccaaataaagactcttttttttttttgagacagagtttcgttgttgttgcccaggctggagtgcaatggcgccatctcggctcactgcaacctccgcctctcggattcaagcgattctcctgcctcagcctccagagtagctgggattacaggcaccatgcccggctaattttttattttttgtatttctagtagagacagggtttcaccatgttggccaggctggtctcgaactcctgacctcaagtgatctgcccacctcagcctcccaaagtgctgggattacaggcgtgagccactgcacctggccaagactcttctattgacaacaggctgtgttccaaataaaagttatccagaaggtaactgtctccaggactctggaagaggctgaggaagggacccttgaagaagggtgtctgctgctggtctcttcctgctgtggaggtttgagaggcctggctcctaggtttctttgttggtttcttttgttgtctcattatctcatcccatagaggatttgaaggtgcagtctggtcatctctattctccttccccatccctagcccctgaactttaaccattcctgaagaatacacatgtagttttggcttagaaatgaatacaaatgtcttattccaaaaacaacaaaaaacaaacaaacaaaaaaaaaacacaggtcaggcgtggtggcttacacctgtaatttcaacattttggaagaccgaggtgggaggatcacttgaacccaggagttcaagatcagcctgggcaatatagggaaaccccatctctacaaaaaataaaaataaaaaaaattagccaggcgtgtgtgcctatggtcccagctattcaggaggctaaagtgggaggaaggcttgaacccaagaagtcgagactgcagtgagtcgtggtggtgccactgcactccagcctgggtgacatagcaaggccctgtctcaaccccacctccccccaaccacagaacatcctaacctctagccctattcattgtccttagccttgtaaaacataaccttgtctttcagtatttctgaggtccataacagccatgctaaagcatccttgatccaagtcccaccttacaccagataagcctccaaactcagagcttattaaa

SEQ ID NO: 2028 - DNA, 4001 bp, Homo sapiens
ccatcagactaggatttcccagaggacagaggccatggttgacatcctcttcccccatccagatcaccctcctggcctcactcaggggaggaaggggggatccacccattacagccacctaagaacccctgttctaacccaccctctctctcaaccccatctccagccaaaccgcgatcctcaccagctctctgccagccaaagttcatggtcttggtggctggccgggaggacatccagagggagaagaggctgatgagcatgctggcaaagtcagtgagcaggtgtgctgcgtcagtcatgacagccaagctgtgtgccaggtacccacctgcagggtggagggtccttatcagctcccccagagagctggctcccaagactgtgtgtgcagcagggagaccacaggctctggaagaggacattctgggctcaagatctctctacccatgagctgtaccaccgtgacaagtgacctactctctctgagcctcaacttccactctctgtgaaatgggccaccaatatctacttagagggtgaatgtgcacatcaagttcaaatagggactggaaaacatagcagatactcagtaaatgctcttcccttctaggaattcaggccttcccttagctacgagttgtgcgtgatctttggcaagttacttcacctgaacatgcctcagtttcatcatctgtaaagtaaggagaataacgtcacccatgtgagaacacaggttgttgttagacctgcatcagataatgtgtatataaaggcttactgtagtgtgtgttcagtaattggggcttttagtgtcagtattgctgggaacatccagtctatccatgcaccaacttcatttaattagcccaaaagtgcttaccaacgacttctccgatcatgaacaacaggcagatggcagaggctacatacagctggcgctgggccttccccttcttggggtcacagtgactgtcaggacccttctgagcatggcagtgatggttgctctgggcagccagctcaatggcctgcaagtccaggccaggtcggggcagaggaatccagccagccccttcctgccacagagatcccgtgtatgacctggccagaggggaagagagggaacgctcagctctgagatgaggtaaggagggccgactctagtcccatttctctgtgaggccttgtgtccactgggaaaaatagctaaggacgctccgagctcgacaaaccagaggtgagaagcctgtattcagacggggatgataggggaatgggagtcctggggcccggggcccttcagaggccagaggaggtgaagaccctgggaaccggccaaggggcgtgctgtccagtggagcgcggggaaggaacagagcgcaggctctgggagaacagcaggccccctccagcgcacttgggacacagggcctccccggggcggggctgcctggggcaaagtgctgggcggggcgggactccaggcatgggaaccgccaatcccccggccccaggccccccgcgggcaggggtcagaatctgggctgcgccccaagggagagacggtccttgggccacagcccattatcttcgttccctcacctcaccccacccctcctgcatggtcccagctcaagccgcagccaaaaccaaccactgctaggatggcaaatgcggaggtgcgtcggctgccgccaaaattcccgcccgtccccaggctctcgccttaccggattgccggcctggcgtccaacagatgctgcttctccttggcctccatgcagtcccgcgccgagtcccggcagccgcgcagccgccccgccgagtgcgccctgaaagttgcgcgcgggactccgggtggcgctcacccacctgccccgagggccccgcgaggtgcgctcactccggcccggctcctgcggcccctgagctcccccggctcccgctgcggctgcagctccggctctggctccgcgtgccaagcgctcccgtgtctcgggtcagccgctgcgccccgcggccgccggctttatccggccctcgccaacccgtgtgaagctgccgtcggcgcgtcgtgtgcaaaagcccgcggggaagggggggcggtcgccggctgcaaaaggcccggctgtggccccgcacacctgtgcctgcgcccatggggcccgcggagcccacctgccggccgcgagaagtttgccagccttcgcccggcgcggcgccgggtgttgctgagtgaggacggggtgacgcctgcgccccctctcccgcgcggggtgcgccgcctcgccgccgaaaagttctcgactttagtttgtagaaatccgctttggtggtcccgacggcaggaatgtggctccttgcctcggaagagggtctccagaggctactggggccgcgtctgccccctccgactggcggctgccctgggcttgatcatgttcccctctcaggccggagaccccccgaggtcggcttgcgttcctgtcctcctgctaggagggtcctggggtggggtgggctgcgccgccctcaggctggggcagtgtctctccctaggaccggctgggactgatcgacccatcctcgccactgaagcagcgccagctcctcctctcctgcgcgcaggagaatctggagtggccggctttgtctccacccgcacagagaacagtgtcatcggcagtcaccatcggagcagagacgaccactgccactgctgccaccccttctcccctcccccgcagcggctcctgggagccccaggaagcctgacaagcaagcctgggagatgcaggccggaggtgccaccgtgttggtaccgctgggagaagccctgtccttcctggccagcttggtgccccacccacttgaagcagcctccttccctggcggttcttggggattggggagcctgtggcccccacgctggcctctgacaggtgccctctgtgtagaaagaagctgctggagacctccctgtctggtcaattcgtctccccagcaccctttgtcgctaggaccataggcttggtgggtatggcctttcacagagccaagagtcagaggtgcaggcctcttgcccacaccactggggacaggaaggggctctttcagtctctcatcttgtaggagacggggtgccaggagtgaggatgtgaggtgcacccgctctgcttgggtcctcactgagtgcctctctgcttctctggactctggttttcttctggaaaacctcagacaccctggttttctccaggtctgtctactctgagcaccagcaggctcagcattacctggagaaggtgttacaacgcaggttacaggtccctgcatcagaccaaccgaaccagaatctctgggtgtggagcctgaatatttccaggattcagtaggtctggggcagggcctgggaatctgtatttataaaattctctggtgctattgtggcatcattgttcatttttatgtatagtggtttttttgtttgtttgtttttgagacagagtttcatttctgtctctgtcgcccaggctcgactgcaatctcagctcactgcaatctctgcttcccggattcaagtgattctcctgcctcagcttcctgagtagctgggattacaggtgcccacgaccatgccaagctaatttttgtatttttagtacagacagggtttcaccatgttggccaggctggtcctgaggttatgatttttttcaaagaacacctttatctaaagtatttagggataaaatgtcatctgggttttgccttaaaataatcccagtggggagagtacggtactggtatagaagaaataaatatgtcaccagctgttgaaactgagtgatgggtaaatggggtacactataactattccctctacttttcagtatttaaaaaatgttggctgggtgcggcggctcacgcctataatcccagcactttgggaggctgaggcaggcggatcacctgaggtcaagagttcgagaccagcc

SEQ ID NO: 2029 - DNA, 4001 bp, Homo sapiens
acactcctgatacaatcagcacatatcccaaaattaatttggcataatttaggaagagaaaaatgtaaaatatactgtaaatattatatatttatgataaagtatgattattcaagtacaagtgctttcaacatctacagtatattaaagtgtgttaatactatgggattaaaaaattaatctatgatggggtatccttcaaattaacacatctgattcccaaaggattcaaaatggttattacatatattaagatttcattgtgccaatatgcctttatacccaactgttgactaaaccaataaccttcataatctgctggttattgagtattttttatagaactgaattgacggttgaattgaaagaagcccaagcattatataaaagtatacatgtcacaaaacctggtgatattacctgtcaatgtttgatctcaacagaagatcaaggacagcgattttctctgaaaatgggtcttaaacaacagagactaagtctatttaataaatagaaaacaggttcttaatctagagtccaagatttagtacagggaacccaacaacatcctgaagctttatgtacaattctgagtattggctttcatcagatttttgaaggagtatgggatctaaagacagaattagtacacctaggagtgtgacagtcttgttagcagaacaacttcataagaccttaagttactcaacagcaaatacctgaataatagtaacttcactgccacagagttacacactagattttcctcctcctaaggatgtttcaaaaaaaacaaaaaccctcaaaggtgccaccaaaacccaagaaatgttgtttctagaaactatatgggatttttacatcgcagttaagactacaggaaaatcatgagacagtttcggcattaaagagagaagagaatgacacatattcctcccgatatcactttataaaacctcccattccaagccccaataacaaactaagtagaacatctcagatatactctctcagaatcttaagggtgaaatccaaatgccactcccccccgagagaggcagcaaacaagtttctcccaattccaacaaagtgggtaaacctaaggcctacaattagaaatgaaagattctgcccatctgctaaaataaggaggggcttgtcagtcttgtctgatggaactggaggggagcgtgacaagagaggttgcacaggataggcccagatcttactcaagaactgtagccctaccagattggtgtgggtatgagaaagcaactcagcagcagaggtaggtaacaaaggtaggacctgaacctcctagtgaggagctacgtggcattaagcaaacagtgcttcgtctccctcacacccagcttccgcccaaaccattttcccctttggttaccagttgctccagatgccgtagagtagttccacaaaagcgaaagagaggttcaggcacaggaagaaaaacaggttccgggaagtcttgtcggacagtatagacctgggaatgatacacgtggaaaagagccgggagagttaaggaggtgccgggaccccgaggctgggtaccctcttcaagaccctcccagttcacatgctcctttcttcacagctaggggttgacggggagtttttgactctccctcactggacctcgggccatcctgaggtctgggccttctccctttctgccggacaccccctccccgcaaacacagcaccccgcacctaaaccagcccgagatcttgccgaacaaattgaacttgggtggtttgtattcatcgtctttgatggacaggggcaacatcttctctgcccggcgaagggccgggtctactcccctctagaagtggctccgtggggtgatggcagtgacagtagtgacgcctcaaacgggaatccccagcgcttgtccggggccgcgcgccgctgcgagacacagacagacacagacacacacccgggaattcgcttacttccggcccgggccgcgcaacgcgtcctgggacaggaaaggagggaggccggtcgcgggcggggcctgcgcggcggagggcgtggcttgcggcgggggcgggatgagaaaggtgctggagctgttggagggacgccaggaggtggcaactaccagggggtgtgaggggctgacctgggatggaatcctgccacccggactcaggaagaaaatcctgaggtggcgacctgcagactgggctgggagatggagagcccgctcacgcccacccgaccgcctaccaccagtgttcccggatgcatgggctccagcgcctgccctttcgccatttcctcccaactggcattaaatcctggtgtggtagatatcagtgattaagagtctaggcagccacgtgttctattgccgccagtccgcaggaaacgcaagtgatcgttttgctgcgttaactctatgggcgcccaaatcttaggaatccattccacgccaccccgaaaacagcgcttgacccttctggactgccacgcaggaggcgatcaatgtttttctttctttatttttttaagagacaaggtctcgccctgtcacctaggctggagcacaatgaggctcactacagcctggaactcccggacgcaagtgatcctcctcagcctccggagtagctgagacctcaggcgtgcgccaccatgcctggcatcaatcaatgtctttcaaaataaaggctgttaaacgtagtataggaaagaagctttttaatggtaggttctaccagacgtgtttgtttgatttttaggtttggttaatgcattgtttcccgtacaatctcaacccgcggaaaccccgaaactctagaattcgtgccggtctctttcgcttccaggtcatccccggggcaacggccgccgctctaattcttgtcagaacctccaggccagtttcagcaacgtgcaggcagaagctggcccctcggtgggatgcgagggcgtgtggagcgcggggaggagagccccacaggcctttcctgggcacccgcggtggatgggaaggctccttcgggcgcctttcagggaagttgtttggctgagggaaggtggtccgtcacgtgaatgtttaaaagttgttaccttggagaagaaatggaggaaaggattggctttcggaggtgggctggaaactacaaaaccgagcttcctgggaatgccttttaggccgacaggaagtggagcgtcaccgaaagggaggggcggccactcggggactgtcccttgctccaggcgctcactttgcgggcggcactttttccaggttgttaatccagctaatggagaaggatagatgcacgctacttggtttagaaaaaaaaacaaaaatgagcaaacgagacgccccttccgttttatgataactaagctgcagggaaataaatcggctggccctactgcaatctactgcactcgaggtaaggagacacagcaaaatgctccagtattagtatttttctttttgtagtgaggatatatgcatgttttgctctcgttctgagaactttgtgtgtgtgtatggagtattcggtggttttatttttgaaaatatgtacttattctacaattttgaaaaatgttaattaaaactgctgtgtaaaaacagctaggtttcagaagtaagttctgggaagagtattttgtatttgcctttgttagcgtatatttcattcttttaatttaagtgtagaaatatttaaaattagtagcatttactctttttttggaaggaagtttttgtattagcagtagaccttgaattttactctactgcactgctgaggaaaaattaattgggtgcaaactagatagtttaaagataaataattctatggtaattggatttttctccaaaacgcccttattcaatatgatttaacttgggagaaggcgggagaagtaatagaaataattaaatttcagcaactgatttccagcataatcctaactcatcaaggtcagctgcattttgaac

SEQ ID NO: 2030 - DNA, 4001 bp, Homo sapiens
atacactcctgatacaatcagcacatatcccaaaattaatttggcataatttaggaagagaaaaatgtaaaatatactgtaaatattatatatttatgataaagtatgattattcaagtacaagtgctttcaacatctacagtatattaaagtgtgttaatactatgggattaaaaaattaatctatgatggggtatccttcaaattaacacatctgattcccaaaggattcaaaatggttattacatatattaagatttcattgtgccaatatgcctttatacccaactgttgactaaaccaataaccttcataatctgctggttattgagtattttttatagaactgaattgacggttgaattgaaagaagcccaagcattatataaaagtatacatgtcacaaaacctggtgatattacctgtcaatgtttgatctcaacagaagatcaaggacagcgattttctctgaaaatgggtcttaaacaacagagactaagtctatttaataaatagaaaacaggttcttaatctagagtccaagatttagtacagggaacccaacaacatcctgaagctttatgtacaattctgagtattggctttcatcagatttttgaaggagtatgggatctaaagacagaattagtacacctaggagtgtgacagtcttgttagcagaacaacttcataagaccttaagttactcaacagcaaatacctgaataatagtaacttcactgccacagagttacacactagattttcctcctcctaaggatgtttcaaaaaaaacaaaaaccctcaaaggtgccaccaaaacccaagaaatgttgtttctagaaactatatgggatttttacatcgcagttaagactacaggaaaatcatgagacagtttcggcattaaagagagaagagaatgacacatattcctcccgatatcactttataaaacctcccattccaagccccaataacaaactaagtagaacatctcagatatactctctcagaatcttaagggtgaaatccaaatgccactcccccccgagagaggcagcaaacaagtttctcccaattccaacaaagtgggtaaacctaaggcctacaattagaaatgaaagattctgcccatctgctaaaataaggaggggcttgtcagtcttgtctgatggaactggaggggagcgtgacaagagaggttgcacaggataggcccagatcttactcaagaactgtagccctaccagattggtgtgggtatgagaaagcaactcagcagcagaggtaggtaacaaaggtaggacctgaacctcctagtgaggagctacgtggcattaagcaaacagtgcttcgtctccctcacacccagcttccgcccaaaccattttcccctttggttaccagttgctccagatgccgtagagtagttccacaaaagcgaaagagaggttcaggcacaggaagaaaaacaggttccgggaagtcttgtcggacagtatagacctgggaatgatacacgtggaaaagagccgggagagttaaggaggtgccgggaccccgaggctgggtaccctcttcaagaccctcccagttcacatgctcctttcttcacagctaggggttgacggggagtttttgactctccctcactggacctcgggccatcctgaggtctgggccttctccctttctgccggacaccccctccccgcaaacacagcaccccgcacctaaaccagcccgagatcttgccgaacaaattgaacttgggtggtttgtattcatcgtctttgatggacaggggcaacatcttctctgcccggcgaagggccgggtctactcccctctagaagtggctccgtggggtgatggcagtgacagtagtgacgcctcaaacgggaatccccagcgcttgtccggggccgcgcgccgctgcgagacacagacagacacagacacacacccgggaattcgcttacttccggcccgggccgcgcaacgcgtcctgggacaggaaaggagggaggccggtcgcgggcggggcctgcgcggcggagggcgtggcttgcggcgggggcgggatgagaaaggtgctggagctgttggagggacgccaggaggtggcaactaccagggggtgtgaggggctgacctgggatggaatcctgccacccggactcaggaagaaaatcctgaggtggcgacctgcagactgggctgggagatggagagcccgctcacgcccacccgaccgcctaccaccagtgttcccggatgcatgggctccagcgcctgccctttcgccatttcctcccaactggcattaaatcctggtgtggtagatatcagtgattaagagtctaggcagccacgtgttctattgccgccagtccgcaggaaacgcaagtgatcgttttgctgcgttaactctatgggcgcccaaatcttaggaatccattccacgccaccccgaaaacagcgcttgacccttctggactgccacgcaggaggcgatcaatgtttttctttctttatttttttaagagacaaggtctcgccctgtcacctaggctggagcacaatgaggctcactacagcctggaactcccggacgcaagtgatcctcctcagcctccggagtagctgagacctcaggcgtgcgccaccatgcctggcatcaatcaatgtctttcaaaataaaggctgttaaacgtagtataggaaagaagctttttaatggtaggttctaccagacgtgtttgtttgatttttaggtttggttaatgcattgtttcccgtacaatctcaacccgcggaaaccccgaaactctagaattcgtgccggtctctttcgcttccaggtcatccccggggcaacggccgccgctctaattcttgtcagaacctccaggccagtttcagcaacgtgcaggcagaagctggcccctcggtgggatgcgagggcgtgtggagcgcggggaggagagccccacaggcctttcctgggcacccgcggtggatgggaaggctccttcgggcgcctttcagggaagttgtttggctgagggaaggtggtccgtcacgtgaatgtttaaaagttgttaccttggagaagaaatggaggaaaggattggctttcggaggtgggctggaaactacaaaaccgagcttcctgggaatgccttttaggccgacaggaagtggagcgtcaccgaaagggaggggcggccactcggggactgtcccttgctccaggcgctcactttgcgggcggcactttttccaggttgttaatccagctaatggagaaggatagatgcacgctacttggtttagaaaaaaaaacaaaaatgagcaaacgagacgccccttccgttttatgataactaagctgcagggaaataaatcggctggccctactgcaatctactgcactcgaggtaaggagacacagcaaaatgctccagtattagtatttttctttttgtagtgaggatatatgcatgttttgctctcgttctgagaactttgtgtgtgtgtatggagtattcggtggttttatttttgaaaatatgtacttattctacaattttgaaaaatgttaattaaaactgctgtgtaaaaacagctaggtttcagaagtaagttctgggaagagtattttgtatttgcctttgttagcgtatatttcattcttttaatttaagtgtagaaatatttaaaattagtagcatttactctttttttggaaggaagtttttgtattagcagtagaccttgaattttactctactgcactgctgaggaaaaattaattgggtgcaaactagatagtttaaagataaataattctatggtaattggatttttctccaaaacgcccttattcaatatgatttaacttgggagaaggcgggagaagtaatagaaataattaaatttcagcaactgatttccagcataatcctaactcatcaaggtcagctgcattttga

SEQ ID NO: 2031 - DNA, 4001 bp, Homo sapiens
ggaaggccttccttgtttcttctttgtaggaagaaatgataaaagcaaacaccaaggctgacaggcatatagcatgttcagaaactggacgtctaattaacgactagtttggctaaaaaataggatatgtggaaaaaagtaatacttgtttaataaaaggaaaaaagaaagaatcatattgggggccgggtgcggtggctcacgcctgtaatcccagcactttgagaggccgaggtgggtggatcacgaggtcaggagatcgagaccatcctggctaacatggtgaaaccccgtctctattaaaaatacaaaaaaattagccgggcgtggcggcgggcgcctgtagtcccagctactcaggaggctgaggcaggagaacggcatgaacccgggaggcggagcttgcagtgagctgagattgcgccactgcactccagcctgggcgacagagcgagactccgtctaaaaaaaaaaaaaaagaatcatattgattttactggagccaccgtcagactcaaattctgaaggaaaaatctgaagcctccctaaataatataaaatttattaaatgcctccctaaataatttacattttattctgaagccgatcgagagtcactgcgtatttctgaggaaggaataaccaaaaaaagaaagtcataagatctttggctttaaaagtaatatggaggcaagtgactggaagggtgccaggctgaggacaagtccagtttggaagttattgctatagtgcaagtaagaagaggaaagacgagcatatttagcagacaggtagtgggaatgaaaaaggggagaactaaatttgagatgctgaagagatagaatcaacagttgggaggaaagttagcctcagaaatataagtttacaagtcattcccttgaaacaccctgagtttaccagtgaaagtgaataagaacaccaagtaagaaactgcaccaaatttcatctttaactactaaagtcgaatgttgatttcaaaaacgaaaagacttaattttcaaatactgcatttaagagaacataataaaagatcgtcttttactataaagcaatgcacccacacacctgttctgatgagaatctcaccccacttcaaacagtccttgtgttcttactagccttaccaagggcagcctttccatttctttaagttcctgcggcttcttgagctccaggtgctggtcgggtgcatctgtgcctaccacagggctcaacaccgagcgagagctcatgggatgttcactgaaggaatgacgggccccagccgggcccacccgtcactagctccgcacgcaccaggcgctgaggcacacactgccgtcttcattcgcttgacacacccctctcctcgggccttttttcctcctccacccagtacattccgcacgtcgtccgtcggagttacaacgtgtcacctcatctgctcccacccctacttagctagcactgtatttcaggtcttcgataccgtccccttcacccctacagacttcacatcagccccctcgcatgcctcctcttcctcctcctccaggagcttcccgggccgccccgcagccgctagcctcctggttcccgcccctccccaggtgcgctgaggactcacctcccgcgcagctcgaccggctgagcccaccaccgggggccgcggttcagctccgccgggcgccccaggctgccgagtccgctgggtcctacgcgaccgctgacccgcagcgccgccggctcccgtcgccgtagccaccgccagctcggtgcagcccaggcgtttccgggttcccgcggtcccgtcccccaaatgctccggcttccgcctcggctctggcaaatgccgttcccggctcggctctggcagccccagctcggcacttggcagctctgtccctaaggcgacgcacctgggctgctctgctggcagcccctggttcctgcttcaccgtcgcgtggaggcctggggcactgctttctgctacacctctcctaggagcgcgaaacagatggagtgacactcgtcgagggcctctgcgggactgtctgtttgcagagggtgccaaggtgtccactgcgtaaggaagggcaaagtcctttggggcaaagaaccctgagaggaacggggagatggattttgaaagcaaacgaaccctctcctaaaagtgactgtcactgacctgaaaacaaccagattagctatggcaaaggctgccaaccaaccagtggtctgcaagaaggcttgttcttccacttcacccaccctgactgagatcttgagactgaaggaaacccaaagccgtaccaccaatgggcctagtgtcatcaaccgggagaggaaaaagaaaactgggcccagaggattgcagagttatgagggaccaaccccttcctggctgcatggatcacagcattaccttttaaaagtgttccagtagctgtgttggaaaccctctaaccacggcagcccattcaggtgatgaacaggctgaaatcagtacttcaggttcagctggattatcaaataagcgaataggattatctctttttgttaactcagggctgctataaattaagcctatgtctctttatattgcaaatgattaaaaccatgtccaagagagacatacttagaaaaaaagtgatattgaagaaaaataagtaactgtattagagtagaataactggttttaaaattttctgcaatacagtcttgagaaaattcctggatggtaaaatacatattagatcttaatacatgcccagttttttttgaaaccaaaatgtgcctgttagatgatgataacagcatgcctcgttttattgtgatttgctttattgctcttcacagacattgcttttgtttttttgttttttttttttacaaattgaaggtttgtggcaaccttgcctcaagcacatctattggtgccatttttccaacagcatgtgctcactttgtgtctctgtgtcacataatattcaataatttttgcaatatttaaatttgttcatcattattatatctggtatagtgctttgtgatcaatgatctttgatgttactatggtaattgttttggggtgctgatatggtttggctgtgtccccacccaaatctcaacttgaactgtatctcccagaattcccacgtgttgagggagagacctagggggagataattgaatcatgggggccagtctttcctgtgctattctcatgatagtgaataagtctcatgaaatccgatgggtttatctggggtttctgattttgcttcttcctcatttttctcttgctgcagccatgtaagcaagtacctttcacctcccgccatgattctgaggcctcccccgccatgtggaactgtaggtccaattaaacttctttttcttcccagtctcgggtatgtctttatcagcaccatgaaaatggactaatacaggtgccatgtactgcactcatatagaaaggcaaacttaattaataaatgttatgtgtgttctgactactccaccaactgcccatttccccacacttctcccccttgggcctccctatttcccaataaacagcaatattgaaattaggccaattattaaccctacaatggctttgaaggaaatcaaaatattttaccccaaaatatactactttgacatattttgagatgactgtttagagggcctgcaatcagaagtagcctttgcaggccagatgtggtggctcacgcttgtaatcccaagactttgggaggctgaggccagcggattgcttgagcccaggagatcgcgaccagcctgagcaacatattgagatcccatcactacaaaaaataaaaatttaaacatgtaccagtcataatggtacatgcctttagtcctagctactcatgagggaggctgaggtgggacgatcacttgatcccaggagttcaaggccacattaagccatgatcatgctactgtactccagcctggctgatagagcaag

SEQ ID NO: 2032 - DNA, 4001 bp, Homo sapiens
ttgaacctggaaggcagaggtggcagtgaggcgagagggtcacgccactgcactccagcctgcgtgacagagcaagactccatctcaaaaaaaaaaaaaaaaaaagtagtaagtacaaatgctttccttaggaagcttacattacagtagggataatagaactctcaaattacaatgcaaatttaacaagtgttgtaagatttataaagcccagcacacatgaagaaaaaaaaatgggctgggcgtagtggctcatgcctgtaatcccaacactttgggatgtcgaggcaggtggatcacctgaggtcaggagttcaagaccagcctggccaacatggtgaaaccccgtctcaactaaaactacaaaaaaattggctgggtgtggtggcgggcacctgtaatcccagctacttcaggaggctgaggcaggagaatcgcttgaacccgggagacggaggttgcagtgagccgagatcgcaacattgaactccagcctgggcaacaagagcaaaactctctcaaaaaaagagaaaaagaaaaagaaaaaaagaatgaactggatttatggcagatttcagaaagctgcataagaaagagatggcatttaaggaattgaagaataagtagaatttctacaaagacagcaaggaaggccttccttgtttcttctttgtaggaagaaatgataaaagcaaacaccaaggctgacaggcatatagcatgttcagaaactggacgtctaattaacgactagtttggctaaaaaataggatatgtggaaaaaagtaatacttgtttaataaaaggaaaaaagaaagaatcatattgggggccgggtgcggtggctcacgcctgtaatcccagcactttgagaggccgaggtgggtggatcacgaggtcaggagatcgagaccatcctggctaacatggtgaaaccccgtctctattaaaaatacaaaaaaattagccgggcgtggcggcgggcgcctgtagtcccagctactcaggaggctgaggcaggagaacggcatgaacccgggaggcggagcttgcagtgagctgagattgcgccactgcactccagcctgggcgacagagcgagactccgtctaaaaaaaaaaaaaaagaatcatattgattttactggagccaccgtcagactcaaattctgaaggaaaaatctgaagcctccctaaataatataaaatttattaaatgcctccctaaataatttacattttattctgaagccgatcgagagtcactgcgtatttctgaggaaggaataaccaaaaaaagaaagtcataagatctttggctttaaaagtaatatggaggcaagtgactggaagggtgccaggctgaggacaagtccagtttggaagttattgctatagtgcaagtaagaagaggaaagacgagcatatttagcagacaggtagtgggaatgaaaaaggggagaactaaatttgagatgctgaagagatagaatcaacagttgggaggaaagttagcctcagaaatataagtttacaagtcattcccttgaaacaccctgagtttaccagtgaaagtgaataagaacaccaagtaagaaactgcaccaaatttcatctttaactactaaagtcgaatgttgatttcaaaaacgaaaagacttaattttcaaatactgcatttaagagaacataataaaagatcgtcttttactataaagcaatgcacccacacacctgttctgatgagaatctcaccccacttcaaacagtccttgtgttcttactagccttaccaagggcagcctttccatttctttaagttcctgcggcttcttgagctccaggtgctggtcgggtgcatctgtgcctaccacagggctcaacaccgagcgagagctcatgggatgttcactgaaggaatgacgggccccagccgggcccacccgtcactagctccgcacgcaccaggcgctgaggcacacactgccgtcttcattcgcttgacacacccctctcctcgggccttttttcctcctccacccagtacattccgcacgtcgtccgtcggagttacaacgtgtcacctcatctgctcccacccctacttagctagcactgtatttcaggtcttcgataccgtccccttcacccctacagacttcacatcagccccctcgcatgcctcctcttcctcctcctccaggagcttcccgggccgccccgcagccgctagcctcctggttcccgcccctccccaggtgcgctgaggactcacctcccgcgcagctcgaccggctgagcccaccaccgggggccgcggttcagctccgccgggcgccccaggctgccgagtccgctgggtcctacgcgaccgctgacccgcagcgccgccggctcccgtcgccgtagccaccgccagctcggtgcagcccaggcgtttccgggttcccgcggtcccgtcccccaaatgctccggcttccgcctcggctctggcaaatgccgttcccggctcggctctggcagccccagctcggcacttggcagctctgtccctaaggcgacgcacctgggctgctctgctggcagcccctggttcctgcttcaccgtcgcgtggaggcctggggcactgctttctgctacacctctcctaggagcgcgaaacagatggagtgacactcgtcgagggcctctgcgggactgtctgtttgcagagggtgccaaggtgtccactgcgtaaggaagggcaaagtcctttggggcaaagaaccctgagaggaacggggagatggattttgaaagcaaacgaaccctctcctaaaagtgactgtcactgacctgaaaacaaccagattagctatggcaaaggctgccaaccaaccagtggtctgcaagaaggcttgttcttccacttcacccaccctgactgagatcttgagactgaaggaaacccaaagccgtaccaccaatgggcctagtgtcatcaaccgggagaggaaaaagaaaactgggcccagaggattgcagagttatgagggaccaaccccttcctggctgcatggatcacagcattaccttttaaaagtgttccagtagctgtgttggaaaccctctaaccacggcagcccattcaggtgatgaacaggctgaaatcagtacttcaggttcagctggattatcaaataagcgaataggattatctctttttgttaactcagggctgctataaattaagcctatgtctctttatattgcaaatgattaaaaccatgtccaagagagacatacttagaaaaaaagtgatattgaagaaaaataagtaactgtattagagtagaataactggttttaaaattttctgcaatacagtcttgagaaaattcctggatggtaaaatacatattagatcttaatacatgcccagttttttttgaaaccaaaatgtgcctgttagatgatgataacagcatgcctcgttttattgtgatttgctttattgctcttcacagacattgcttttgtttttttgttttttttttttacaaattgaaggtttgtggcaaccttgcctcaagcacatctattggtgccatttttccaacagcatgtgctcactttgtgtctctgtgtcacataatattcaataatttttgcaatatttaaatttgttcatcattattatatctggtatagtgctttgtgatcaatgatctttgatgttactatggtaattgttttggggtgctgatatggtttggctgtgtccccacccaaatctcaacttgaactgtatctcccagaattcccacgtgttgagggagagacctagggggagataattgaatcatgggggccagtctttcctgtgctattctcatgatagtgaataagtctcatgaaatccgatgggtttatctggggtttctgattttgcttcttcctcatttttctcttgctgcagccatgtaagcaagtacctttcacctcccgccatgattctgag

SEQ ID NO: 2033 - DNA, 4001 bp, Homo sapiens
aaagtaaaggcatttcatcttcgtttggagtcaagcagaggcagacagtataaaataagcccaaagaataatgaatgcaggatacactggctagattagatggatagagaaactgcaaaactattgtactctcaacaagtgtgcattaattaaaaacagaagaatattcctaggttattttttctcttaagtttaaagagactgtaggccttctttgacacatattactacttttattctttacattcattataaccactctagactgggcaattttgaggctgcaatttttaaatacgcaaggcactgataaaatatgttaatacatactgacttcatttcacaaaataaagtatcgcttttcttcttttacctttcgaggtacatttctgtcaaggtcaggaaacttgactactctgagcgcctttcccacccagagaactgccactgtggccaccatctgtaaacaagagaacacagattcactgttctacacataaagacacacacagaagttctaacaacataaaccacgtaatggtgaggattccaactaacctggccaagtccaacacatagtgaggagggaaatctacaaaaagggcaaagaaaaaaacaagatcagaacaaacctaacttagctccgtgaattcaatttgcacatcggcaacgttaataaggcattccgatacaagccacatcaacgtccgcccctaaatcaaacaaaaatcttgggagaaaactctctgcctgttggttgtcagtccaccccgctgatgtagcctcgggcggccgcttgtcccatcttgtccgagtctacagtttcagtccgctgcctgcaaaggatttctcaaggcagtgcagatacagatctctgcaacgatttcacacaccttaaaaaaaaaaacaaccaacttctgcctctgggtcccagtgttagcaagggaataattgtctgctgggttgaggatgcgtacgtccccagaggctgtcagcgggtgcaggggacactgaagccccggccccctgtccaggctgcggaggagggaggcttccctcgctctcctccctgatcgacaggcataacggctcaaaagtcaccaagcaaatcactttgctccatctctctgaagggcagggttttcggggcggtgcgcccagggcatggcaggcgagccccaaatgtgccgggccggccggagctccgcgcagggagcggacccctgccacaggcccgctcgccaggccggctccgctgcccgggccgcgcgcgtcagccgcccgccctccccagctcccgcccaactttgttcggctttaactttggcagtcaaagtccagggagccggcgccgcgccgccgccgccgcccgctcctcctccgcggcctgggccgccgccgcctcggccctacctgtaattggtgagcacgctcttattcaccaccacgatcaggaaggagctcacgccgtaaaagccggcggccagcagcttcagaaacacggtcagcgtttcggccgacgccatccccagctcctcctcatctcggagtgtggaggatttcgcgggggcttctcctttaacccgagcatgctgacgtctatgaacttccgccatggctgccgcagcagcggtggcctggcggcggggcctagcggctcgggggcctgcagcggcagctcccaggggactccaggagttggggaccgcagactaggccagctgcgcgctcgccgcctcgactccccgcttggccgccgcctgtccccgcccaggggcagggacgccggggttcacacccctggagactttgctcgggcattgtgcaacgcggggtcagagagtagggccgcgccgggcttagcctgggcaggggttggagagagcctggagaaggggcagtggcgacccccctgcccgaggcggataaggagaagccaggggaactacatcgagacaccagagcgccgggcgacaaaccacagactccgggtgacagtcgccctgcgcctgcgcacgagcacgcgctgggtctctccgcggggcgcgtacctggggcgtggggagtctggtggcagaggggctggaaggccgtattctccggataactgccgcaactaagtgcagaccctcctcccctctgttacaggtggccggccaagtagttacagtacactgcgtctagactaattctgaatgctcttttagtctctcttgcagggggtaaaaacccttcaaaagtatcagatgtggatcaacagtaaacactcaacgaaaatttcattccgcaatgcctcaggcttcttacattttctgaacccagaaaacaccaaacaatacttttcagattgagaagtttcgtttgtttgttttaagaaaaatgttgacatatcccaaaaagtagcaagataagcagcttggggattggggaaagcacaaggtgtttggagcctaaaagacttgatttccaattgtaggattcctagaaatgacgaccccccccccccccaccaacacactcactccttattgtgtgtcttggaccaattagatgacctccctgaacctgatctctgtggatgtgtagctagcaaagagctagttttcggtaaatggtagtcattattgtataacagaagcaaatcattatgatcggtttaagcaaagaaattacgtattgaactttaatagattaggaaagaagaactttgaattatttttctaagtgcttggtctgtatctttttaaatttcttttttttttttttcttatttttatattttggtaaaccaggtatagtggttcacacctgtaataccagcactttgggagcaggtggaatgcctgagcccgggagtttgagaccatgctgggcaacaaagtgagaccctctctctacaagaaaataaaaaaattagccagatgtggtggcgcacgcctgtggtcccagctactcaggaggctgaggtgggaggatggcttgagcccaggaggtcaaggctgcaatgagctatgatcatactactgcactccagcctgggcaacagcacaagaccatcttaaagaaagaaataaattgtggcaaaatatacaaagtataaaatttatcattttaaccctttttgagtatgcaattgcatggcattaactgcattcacatcgttttgcagccatcatcactaatccatctttagaactttttcaccatcccaaagtgaaactctttcccctttaaacaatcactccctgtttccctacttccttccctctctgctgttaaccagtgttctactttctgtctctgtgaatttgactactctaggtacctcatataagtggaatcatgtagtatttgtcctttcgtgatgaacttacttcattaacgtaatgtcttcaaggttcagccacgttgtagcatatgttagaatgtcctccctttttaaggctgaataatattaaattatatgtgtataattggtttatatcttttgagttactttgagaacacctatgttcttcaagtgtttcttaaaaaactggtacacaggatgaggttcttaacatagcctacaaggtcctagataatgtggttcctacccacatctccagaggcactattcacgtttccctcccctaaggtgcagataaatcaacaatgtgggttccggcttctgtgtctttactcccattattccctccatctgggctgctttttctcttcctcctctcacccagctcctgaaaaactcttacatttccttccgtattttggcagaacattacctcttctctgggcagccttcacactgccccccacttccctctacataattgatctctctcctttgtgcctctcctaccgcatctttatataccccctttatagagtgtccatctgctgctgctgctataacaaaatacctgagactggataacatataaaaaatagaaatttattttctcacacttctggaggctgagaagtccaagatcaaggtgcca

SEQ ID NO: 2034 - DNA, 4001 bp, Homo sapiens
actccgtctcaaaaagaaaagaaaaaaaaaaaacaaaacaacatatttcacagagaagaatttatgtttttggagaaggagtttcgctcctgtcgcccaggctggagtgcagtggtgagatatcagctcactgcaacctcaacctcccaggttcaagcgattcacagaggacaatttctaaaaggcaaataagaagcaggaagggtgcatgctccttctctactgccctgtaacagtcattccacacttaccacctcaaaacaacaaatgcttttgatgttggctcctgtggggcagcaatctgcgggaagcttagccaggcacctctggcttaaggtccctcctgaagctgcagtcacaccatggaccagggctgtgacctcatccgaaggctcaactggggctgaggcccacctctgagctcactcaggtggacgctggctgggttcagttccttgctggctataggtggaaagggcccccaccagtttcttgccagcttctccacaggacgccccacagcctgacaggagctttcatccagcaagctcatcagggagtgggagagagcagccaggacaggagcccaggcctttctgaacctcatctcagaagtgacatccttcccttctgctgtctgggcacagctccccgggtggagcccgaggactagaaggaaaagaaaacttggatttaaaatgggataaagccataggagctgctcgtcccaccacaggaatctcaacgccgggttactgacaaagcgtcactttgcacctcgtccaactgtgcagacctctcctagccaggcccctgcaccagaggttaagaatccgtgcccctggtcaggaagtccaggtgggttcaaacggccagcagggaatttcaggcaaaatgtgtcccaaatcttcaaaccacgccccagaactcagacctccccctgggagttcgtcccaaggaaaccacctgcaagaggctcaggctgcaggggacactccgcttccaaaacccggaagctggagaccacacaagtgcccaacgccaaaggcaccccgtggagggacgccctgtgccctcccccgaccaggtgacccgctgcgccctacacatcttcaccaggaaacatctgttatcgatgtggacgaagcgcagcctgcactcccagatccgctcattttcgttctgccctccgttttacgattcgcctacactgaaaatgcgtgagtggagtggaaagccttcctactcctgcctcagcgaccccttctaaaatactgcctcgtttggcctgaaaatgtgatttgcaggcttcctgagcaaagtagatttcactccattaaagaaaaaaaaaaagaaaaggcaccgaacggggctcggctgtcgggagttttgctttagttttttgcgtgttttgttttgtgtttttttgttgttgttgttctttttgcggccacgcacaccgcgttcccaggcttcagggcgtgggggtcgccgtggactcccggacgtgaaaacgcttaaagccagctgggaaaaccccaccagcgttttccgcgcacagcgccagccataggaaaggacccccaggagcgaatccgggcagggaaaccccggacgcccgcacactcagcatcagtaccggcacccagcacccagcaccgagcaccgagcacgcagcaccaagcaccgatcaccgagcagagcaccccgcacgcagaacccaccgagagcctgatgcagtctccgccgcaggcatagcgctaggccccggcgccttcacaacaaagggacgctggcgggcggggcctaagaggtgcgcggtggaggggccgggcgcgaggccgcggagacagctcggagctcggcactggggagtggcacagcgctggcggatccaggtgggcttcacggggcgcccgcgggaccggaaatgacgcgcagaaccctgcatcgggctcctcgctgccccgcgggcgccgctcctcagtgccccagagccacggagccggggaaacgcgccgcggcccacaacgcccccgcggctgcccgttggttccgcccgagccgttctactccaggcagacgggaggagaaacacggcgcgctcagcgtcccctgccccgttggttctgctcgggcccttccactgcaggccgacgggggtggaaacacgcagttttttttttttttttttttaaggtctagggtaacacggggcttttaagtgcctctccgcggccgcctggtggtccagcccgggccgctgcagtgcagccacacggggagggacacggcgcgccgagtgctccgggcggccgcacgttggttccgcccgggccgttccactgcaggcagagggagaggacgacggtgcgcgtagtgcatccccgtggcccgttggttccgccggggccgttccactgaaggcagaaggggggggaaccgtggccccaccccccgcggcagcccgttggttccgcccgggctgttccaccagcggcacttcagggcgggatcggccagtctgtggaggcagcggcctctaagccccggagggtttactgcccaggtttgggttccaggaataagaaatccactgaataggcttaacttagaagacacaaaggcgcctcctggcggaagtggccacgctccgcccagcctgagggaaagctgctctgacagctgggcccggagctgcggggggcggggccgccgcgcggggtgaggactcgcctcagggcgctgattggctggtggcgcgctccggggcggggccttcgtatccaggctggcgtcggggctgccgcgggacatccggagcagacacccgcgggcgcgcctgcggccccgaggacccccggctccggagcttcgtcgagcgttttcctagcgttactttcccaaataattttcaggaatgaagttacggctaaagggctctttagagattacttttgggccgggcccggtggctcacgcctgtaatctcaacactttgggaggccgaggccggcgcatcacgaggtcaggagcttgagaccagcctggtatggccaacgtggtaaaacgtcgtctctactaaaaatacaaaaattggccgggcgtggtggcgggcgcctgtaatcccagctactccggaggctgaggaaggaggatcacctgaacccgggaggcggaggttgcagtgagccgagatggcgccactgcactccagcctggcgacagagtgagactccgtcaaaaaaaaaaaaaaaggaagaaagaaaattataaaatgaagtgaaattaacgcagtggagtgccacctgcctgctgcctgagttcactatccacacggagttcataaatttgagagcagtttacaaagtagattctcctactttccaggaaacccagaaatgtctggtgatttgcccaacagtctcagctgttgtggtcagcagggccgctgtggtatccaaatgatttcaaaagcagatttataaaaagtactccttgtttttttttgagatggaatttcgctctcatcgcccaggttggagtgcagtggcacgatctcagctcactgcaacctccgcctcccgggttcaagtgattctcctgcctcagcctcctgagtagctgggattacagatgtgtgccctcacgcccagctaatttttatatttttagtagagacagggtttcaccatattggccaagatgttctccatctcctgaccttgtgatctgcccgcttcagcctcccaaagtgctgggattacaggcgtgagctaccccacgcccggcctttatttttttttgagacggagtctcactctgtcgcccaggctggagtgcagtggcgcgatctcggctcactgcaagctccacctcccaggttcaagagattcttctgcctcagcctcccgaggagttgggatcacaggcacccgccaccatgcccagctaattgttttgtatttttagtagagacggggtttcaccgttgttagcca

SEQ ID NO: 2035 - DNA, 4001 bp, Homo sapiens
gtttcgctcctgtcgcccaggctggagtgcagtggtgagatatcagctcactgcaacctcaacctcccaggttcaagcgattcacagaggacaatttctaaaaggcaaataagaagcaggaagggtgcatgctccttctctactgccctgtaacagtcattccacacttaccacctcaaaacaacaaatgcttttgatgttggctcctgtggggcagcaatctgcgggaagcttagccaggcacctctggcttaaggtccctcctgaagctgcagtcacaccatggaccagggctgtgacctcatccgaaggctcaactggggctgaggcccacctctgagctcactcaggtggacgctggctgggttcagttccttgctggctataggtggaaagggcccccaccagtttcttgccagcttctccacaggacgccccacagcctgacaggagctttcatccagcaagctcatcagggagtgggagagagcagccaggacaggagcccagacctttctgaacctcatctcagaagtgacatccttcccttctgctgtctgggcacagctccccgggtggagcccgaggactagaaggaaaagaaaacttggatttaaaatgggataaagccataggagctgctcgtcccaccacaggaatctcaacgccgggttactgacaaagcgtcactttgcacctcgtccaactgtgcagacctctcctagccaggcccctgcaccagaggttaagaatccgtgcccctggtcaggaagtccaggtgggttcaaacggccagcagggaatttcaggcaaaatgtgtcccaaatcttcaaaccatgccccagaactcagacctccccctgggagttcgtcccaaggaaaccacctgcaagaggctcaggctgcaggggacactccgcttccaaaacccggaagctggagaccacacaagtgcccaacgccaaaggcaccccgtggagggacgccctgtgccctcccccgaccaggtgacccgctgcgccctacacatcttcaccaggaaacatctgttatcgatgtggacgaagcgcagcctgcactcccagatccgctcattttcgttctgccctccgttttacgattcgcctacactgaaaatgcgtgagtggagtggaaagccttcctactcctgcctcagcgaccccttctaaaatactgcctcgtttggcctgaaaatgtgatttgcaggcttcctgagcaaagtagatttcactccattaaagaaaaaaaaaaagaaaaggcaccgaacggggctcggctgtcgggagttttgctttagttttttgcgtgttttgttttgtgtttttttgttgttgttgttctttttgcggccacgcacaccgcgttcccaggcttcagggcgtgggggtcgccgtggactcccggacgtgaaaacgcttaaagccagctgggaaaaccccaccagcgttttccgcgcacagcgccagccataggaaaggacccccaggagcgaatccgggcagggaaaccccggacgcccgcacactcagcatcagtaccggcacccagcacccagcaccgagcaccgagcacgcagcacccagcaccgatcaccgagcagagcaccccgcacgcagaacccaccgagagcctgatgcagtctccgccgcaggcatagcgctaggccccggcgccttcacaacaaagggacgctggcgggcggggcctgagaggcgcgcggtggaggggccgggcgcgaggccgcggagacagctcggagctcggcactggggagtggcacagcgctggcggatccaggtgggcttcacggggcgcccgcgggaccggaaatgacgcgcagaaccctgcatcgggctcctcgctgccccgcgggcgccgctcctcagtgccccagagccacggagccggggaaacgcgccgcggcccacaacgcccccgcggctgcccgttggttccgcccgggccgttctactccaggcagacgggaggagaaacacggcgcgctcagcgtcccctcccccgttggttctgctcgggcccttccactgcaggccgacgggggtggaaacacgcagttttttttttttttttaaggtctagggtaacacggggcttttaagtgcctctccgctgccgcctggtggtccagcccgggccgttgcagtgcagccacacggggagggacacggcgcgccgagtgctccgggcggccgcacgttggttccgcccgggccgttccactgcaggcagagggagaggacgacggtgcgcgtagtgcatccccgtggcccgttggttccgccggggccgttccactgaaggcagaaggggggggaccgtggccccaccccccgcggcagcccgttggttccgcccgggcggttccgcccgggctgttccaccagcggcacttcagggcgggatcggccagtctgtggaggcagcggcctctaagccccggagggtttactgcccaggtttgggttccaggaataagaaatccactgaataggcttaacttagaagacacaaaggcgcctcctggcggaagtggccacgctccgcccagcctgagggaaagctgctctgacagctgggcccggagctgcggggggcggggccgccgcgcggggtgaggactcgcctcagggcgctgattggctggtggcgcgctccggggcggggccttcgtatccaggctggcgtcggggctgccgcgggacatccggagcagacacccgcgggcgcgcctgcggccccgaggacccccggctccggagcttcgtcgagcgttttcctagcgttactttcccaaataattttcaggaatgaagttacggctaaagggctctttagagattacttttgggccgggcccggtggctcacgcctgtaatctcaacactttgggaggccgaggccggcgcatcacgaggtcaggagcttgagaccagcctggtatggccaacgtggtaaaacgtcgtctctactaaaaatacaaaaattggccgggcgtggtggcgggcgcctgtaatcccagctactccggaggctgaggaaggaggatcacctgaacccgggaggcggaggttgcagtgagccgagatggcgccactgcactccagcctggcgacagagcgagactccctgtcaaaagaaaaaagaaaagattacttttggccgggcgaggtggctcacgtctgtaatcccagcattttgagaggctgaggcgggcggatcgcctgaggtcaggagttcgagaccagcctggccaacatagtgaacccccccccatctctactaaaaatacaaaaaaaaattacccgggtctcgtggcgcgtgcctgtggtccccgctactcgggaggttgaggcaggagaatcgcttgaaccttggagttgaaggttgcagtgaggcgagatagcgccgctgctctccgacctgggcgacagtgggagacttcatctcataaataaataaataaataaatattacttttacgttttgttaaacttccacttgtttttgtttccgttgcatgaaccttcgtaaagcttcaggaggctgatggcagcctccttccccaggcttccccgtggcgcccgcagccgggttgggccagaggctgggactgtttcctcccgtggggtctttggtggggatgtccccagaggagtggggcaggaggaggggcacggagcgcccccgggagccggtcagagcgcagcgatggtgtctgtggttccaaccactcgggaggctgaggtgggaggatggcttgagcctgggagcttgaggctgcagtgagctagaatcacagcaccacactccagcctgggcgacagagtgagacccttgtctcacaaaaaaaaaaaaaaaaaaaaaaaaaaaaaaaaaaaggctgggtgcgttggctcgcgcctgtaatcccagcactttgggtggccgaggcgggcggatcacgaggtcaggagatcgag

SEQ ID NO: 2036 - DNA, 4001 bp, Homo sapiens
acactcactccctgcttccctcagagaaataaatggccaatccttccctccccaattcacacatgcatgtgggcaatgtctgggtaggcttagaaatacaaacacccctggaagaggtagcacttgcactaaactcaggtgtagatggctgatatcaagtcattcctgaggttgggatggaggagagaagaagacagccacaagaaggaaaaaaacccaacctcctaaagatagaaaatgttgagaaataggtaagtagttgcagttcagtgcaaactgatgttctggaaaaaatgcttgagctttggatcggacagcccaggattccattcctgcttcaccacctaccaactgtgggtctaggacacgttaacccaccttgctgggcctcacagtgctcctcagtaggatggggatcacagtactagggcagctgcaggcaggcctgtgtggacagctaagcttgggatatacaattaccaagccagcctctgtcttgtcctcgctggttctgagattcattgtaataaacaagaagtcacgagtgggaagcagggtcaacagtagcctagagaagtccaggcttcctgggaagggcagaagccaggctctgtcggagcccatggctgcccctcattcaccgctgatgctcatgggctctgttagctcagcacaagcaaaagcctagaggggagctcctgggacccaggggatggtctgtctgcctcacctggccaaggtggcttgctcctggcagagggagttagtcattccacctctgcctcctgggaggaggagttaagaactgggactggccctctgccccccttctccattggaaagcaaggccccttaggccagcagaagccagctgtgtctgaggaagctctcctcggtgggctgcttcttcccctgtcctctcgctcacatttcctgggtgggagcagttccaggcagaaaggacaacacggggaggaggacaccttctgggggcctctcacagcccttccaatccctctccagggcctgggaaagagcctgtttacagactggtgctggctcttccctcacctgtgcgccccgcccattcccaaagagcagggcagtcagttggctggtggccggaaaggcttcggaacacgcaggacagacgtctccttagcccgctgcagccctctcccgcctctaccaactgcgggcagcacctttggtcggcctgggggtgaggcacagagctccacacccaggcaactcaagtgtgtgtgtggtaaggggacactgggagcggctggacgaccccctcctgccgaacagacaagagccccaggacaaactgggatggaggtgagggtgcagctgctgccagatgcgctgggtgctgcccaggaaggagagggttggggagccgggtgctcactcgccgcagcagctcactcctgctcgccagggagctcagggcagcccctgaagctgccagatccccccacgcaggcggcggcgctctgcactgcggagccgcgtcctgggggagcagtacccccagccccggcgccccgcagccagacagcccccctcagggtggcagcattccccggctagggtgcagggacccccggggcgaggcggccgcgcattaccttccactttggtaagggtcaggaccggactgttgcaggcgctgagcggggccacccgggccgagtgcttcttcatgatgagccggccgcctgcaggagcgctgccgccgatcgcctacatcctggggccggctggagcgcgtctctcccgggcccgtggccgacgcggccctctgccgccggggagcaccagcggctcgcccctctcagtcccggcctccccggctgcccgccgggctccggttgccgcgttgctcactgcggcggccgccctgcagcgcacatcctccccggccgcgcagccactccacacacacgcgcgcacagcctcctacttggaggttgctgcaaactccaacgtcacgtacaagtgcactccctgctcccaccccgcagctcacctgctccgccctcctccccgggacgcccagccccgcagccctcatccctgtcttcctcccagccaggtcctgactgcagcctctggccaccacctctctgagaagccctttaaaaggaccagcgcctgcggaggggagaccctgagaacttaagcctcagcgttgcacaagtttaaaaagggaagtgcttgactttggattgagagttgactcttcagtgtgcggaagtcctgaattatttcacagggagagttagaaaaagcaaagcttcccaaggctgccattcacttcttgagtctagaggcacattatcttgtctggccccgtggacagctatttttttgcggggtggagtggggggtggttcaaacaccacagaagcaaaacagccacaagaaaacaaaggcttgaagagatttctgctcccaccccaccgcctcagtctggagatccaaactcacctcggtagcaggaaagctccttttctgcccagctcccaggttcttgcttcagctgcagatctgacatttgcctctgcaggcaccagcttcactgctggcactcagacacagctgtaagctactggccgatggtgctcattaaaaagctatgacatatacctattgcatcacttgccagcacaatccctgagtgaccactgagtccggaggggcatttatcccatgacagtgcatcatcagaggtgccctgctatcatccctgcaggtaggacacacagggctcatgcagccccagaactcccagggccttgtgttcatctcctttacagatgcccagccatcagtgtgggtcccagcctcaaggatcagttgagattcaaggtgggttttgttattattgttggttagatctttgcccagaatttcagaaccttcaatgctacctggtttcctgtctcaaagttaaaacttcattgtattatgtcattcaagtccccacaagggtagctctgtggagtggtacaggggagagtgaaactcaagcaatagggtttcctagctcagcacctaccagatgtttctggtgacatccacctgcaacccccagctctctggcagaagtggctcctaggagttgctcttgttggattcttattaattgccctcttgaacagctgtaatgaatggaatggctctgatctccaaaaggccagggcttctcagggttgcttcctcaccactacagccaaggaaaaggtatatagggtccctgcagagccctctagtggtacccctccacattatacgcctcttacaggaaacgttccaagactcctagtgatgacactacaataagccaataagccacttccttctttggaataagcttacagcaaaagaattacatgttgtatattaaagaggatctttttactacaaaataatacttctatgtgtttcatcaagttcatcaataaaatttattatatatagtaactaaaacaaatatcacataataattgcacacgtttttaagcacatgctatgtattatttatgttaactgttttacataaataatttcatttcctactctcaaaagctctgtaagattgttgttatctcgtttcatagatggggaaactgaggctgagaggataatgtcgcaggtcacagactgagtaactggccaagcggggatttaaatccaagtgtgaactattcaaaagcctgaacttataaccagtacgttattctcttacatgttggagagataaaatgcaaaaattcctcatagctattccaagtcagctgagagatacgtgtcaagtttgaatgtggttttgatatatgatacatgacttcaccgtgcctgagcatctgtacactcctggggaaactggtttatacttgtgctgatgtggatgtcctccagcacttcacattggcctctacacacgtgttctactaggcaagtcacaatgacaagttgtactagtctgt

SEQ ID NO: 2037 - DNA, 4001 bp, Homo sapiens
accaataaataatgtttcaattttaagcaataaaaggtcgaaaaaaactcaaaatcaacaagctattaatctagtctttattacaaatgaaagacgtcaaggcccatttctcatacggactgaggtggcaaatggcaatctcttatgtcaaactacagtgatgagaccacctaattatggttatatttatagatatctggatttcatcataatcaacctctctcttgcaaagtgagaaaaagaaatgtccaccaaattagtcctggtgacataagataatgtctgtctaattgatcacagcatcctcaaagccattagctaggacccacggaaagaaaaacatttcagcttctccacctgacaccaaacattcaacttgcagggaccaacaccactatctagaatgatccctatagaacctccttactgaagaccgataaaatccaggggagaagggcgtgaacggcatccaaaatgaagaccccaagaattgtcctctatcatcagggctaggagatgcaaggaagagttaaaatcctggctatgtaagtcagcatctccatctgagcctggtgagacctgaccgagggccctgtgagactttcagatccgcggggaagccacactgtccgggatactttgagtttctgatctgtttcccacggtctgccacataggagtgtcctccgtatttggcagtggagagataaggatacagagagatcctgtgtgtgggagaggaaggggtgtaagagaacgcatcagaacgcctcagaggtccaggagaactccgtctccgggcctcttcctcgaagttgcaaacctgggtctgtatcagcaggcagggcgggagggggtggctggacgcctcactgcgtgcgctccccgaggctgctgtgacaatggtaagaagatggaccagtgaacgggaaacatgacgtgagggggtcttacttttgcagctcgctgcccagggctggtagccatagtagccagtgatgcgcaggatccgctcctcgatggacgtgagccccaccggcccgctggtgagatcctccacggagcgcgaccatttcagatcctccttaatcgcctcgtccaccaccaagtacttgagctgccggagctgggggctgatgtcggacagtctccgggggctgacgtccggtgacctcctcatgccactgcggtcgcaggcgccacgggcaggtgggtgggcagggggagcatggacagagaggaggggattcgtgaggagcagatcccagggcgagagcaagagcgcggccggggccctccgggggcgagcgccgcggcagagcccgcgctcctcccttcccgccgccactcacccacttccccgggcagctgtccccagtgccctatcctgggcgtctcggggcagtgcgggttggggcgagtggcgagggaaagaatgactgaaacttcccgagcagctccaccgcgcgcgccgcccttccccgagcctcagactgcccagtgtcccagctgcaaagggctaccccggcgctccggcctcccgcccgccggctcgctcacccacgcccggggcgctactcacacggcaatgctcttgcccctgggtgcgccgctgggaaactctcgaatccccataggcaaagacagagtgggaccggcagctcccagacttgaggcggaggggccgcgggccggagctccctgcagccgctagcctgggaagactggagtgcgctgcccaccgagggtctgcgccgcgccggccgccccgggccgctttgtgcgcgcccgcgcggtctgtacccgagcgcctccgcggcgtgcggcacgatgcaggcgcggcggttcagcccggtgactccaggccggcccgcgcgctcgccgcaacgacccggcagccgaggcagcgccgcgccccacgcccgtcaccgtcgccgccgccctagcacaccgcaggcgtgagtctcgccgcgaccgggagagccctcccagctgtgcgctctcgaggcacctggtcgggcggggaggcgtcgggtcggggcgcacaggggccaggcgggggcgctgctgcccacttcccgcctcccgggcgtgcgctccgccccggagcccgcacctcgcgcccgcgctccgcctggaagccttggggcaccggacgcgctcctccacccttctcttttgactcaaaccctgccgctcccagttcagtacttttctctctctctctcacactctctctctctctctctctctctctctctctctctctctctatgtatatgtctgtctctctctttctctaaattagcaaaactacttggaaagaaagaaacctggttccatgctcagcatgccaagtgaataaatggcgtttcataggcaacgctgagacacaaaatgtattatctattacgctgtggggatctctcagtcagacctggtcctcagagagcttactttcccactgatgatgcaattacgaaatcagttctctcttcatagatttccattttaaaagcttctcatctttttccttaccaccccactgcccccgacggccgaaaggcattctcttcagactacctaatcacctttcctaatattatttttcatcggggcaaatttagaaaagatagaagtatgtggagaagaaaatatccattatccagccaaaaatgacgactttcaattatgaacgtattctcttccaggcttttttccaacgcaaaatacagttgtcacaaaaatcggaatgaaattgtacacactactttatgtactgctttttttatattaaaatcatattgtatagcagcaaactatgaatagaggggaactttctcaacttgaaaaagaacatttacaaaagcgtacagctaacaccatgcttaatggtgagaaactagaagctttcctgttaaaataaggaacagggcaagtatgtctctactcagcaatccttttcagcatcatactgaaagtcccagctaatgaaattagacaagaaaaggaaattaaaagtatacgtattgtgaaggaaaaggtaaaagaaaactgtctttgcagctgacatgactgttgatgtagaaaaatttcaattgacaaaaaaactctcctgttactaataagcaattatggtaagattgaaggatacaaaattaatgtacaaaagtcaactgcttttctatatactagcaacgaacaatgggaatttgaaattaaaaccacaatactatttatattagcacaccactcaaatgaaatatttaggtacaaatctaataaatatgtacaatatctatatgagaaaaactacaaaactgtgatgaaagaaatcaaagaactaaataaatagagagatattttatgttcatggatggaaaaatttaatattgttaagatgtcagttcttcccaacttcatctatagattcaaagtaattccaatcagaatcccaggaggttattttgtgaatatcacaaactgattctcaagtttatatgaaaaggcaaaagacccataatagccaacacaatattaaaggagaagaacaaagtctgaggactgatattgcccaacttcaagacttactatagttacagtaatcaagacagtgtggtattggtgaaagagcagacaaatagattaatggaacagaatagagaggccaagatagacccacacatagagtcaagtgatctttgacaaaggagcaaaagaaatctaatggagaaaagatcaccttttcaacaaatggtgctagaacaactagacatccaatcacaaaaaaaaaaaagaaagaaagagagaaaaaaagaaaagaagctggatacatagatacagaccttacacctttcacaaaaattaactcaaaatagatcatagacctaaatataaaatgcaaaactataaaactcttagaagataaaaaggagaaaacctaggtgaccttgggtttgtaaatgacattttagatacaacatcaaaggcatgatccatga

SEQ ID NO: 2038 - DNA, 4001 bp, Homo sapiens
aacagcatttctgatctctacttaccagatgccaatagcaggcacaatgttccctccatccccctccccattgtgacaactaaaaatatccccagacattaccaaatgtttcctgaggggcaaagccacactcctagttgagagtcactgatgtagacatacatgaaaaggtcacacattgcccatctccccaaatactcatacatagagccacatatcacaggacattcaggcttatacgcagtcacacggaaacacaggtcactcagtcacagacacacaaagggatacatccagtgttacttcctcagttttagaggaaaaaaggaaagagcccaggatgactttcctgccccactatccaacggcctcagtttttcctataataaaccaagtcctatgccgtggacttgatcattcctcacagcccacttccttgggccaaagcctaaaaaggttagcaacaccaagacccagggaatcgcttcctatccttctcaggcctacagagacctctatctccagccctttaggaaagtggtgagagagtgaagatgattcttggagcacttgctggtagctagaactgagaacccatagagcaagtcacacacctgagaaaaagtgtcttactgtctcaacgggaatgtaggggtcacacagggaatggggaagggggagggaacacatagaaagaattatgccccataaccaaaaatcacaattcataccacatgccaaaagtcttccacacagtcatggagtggcacatgaatcaatctccacaaaccaacactcccagaggtgtgtgattcccctcccgcaagtcacatgcccaggccagtgctcaccgtcacgtgcaaggctgccagggcctcatctatggcagccaggtagtcaggcagcaggtccaggagacaagtggccaaaaagacgccccccgcgaaacagcttactaggctcagggctttctggcgggaagctgggtaggggtgaagcacagaggggaataagcaaacaaaccccctccagggccgaccaccccaacccaaacaatggctacccttgcctttccctcctcctttggtcactccccgccagccccagagccctccctaagccaagcattcatagcagtgtggggaaaaggagaggcttacctgagccttcatggttagctcctggccggcgcagcacacagatgggcaccaggctgcagaggagggtgagcaccagcagcagcaccagggcccccaacttcacctccagccccacaggcactggaggctctgaagctaccgcctcggggcgccacaccaggagctctggctctccccagggccccatgatgcttctggtagctccagtgactctcagacctaggaagacagaccagagtggttgggaaaaatcatgcaaaggaagatggggcaaggaatggggaagcttggtcagcagagtgcagctccctggccccagccactttgtgaccttcccctacccagggtgactcatctactcctgtaccaggaacattcctctcttctcacactttctttcccaagtgacttattcagggagactgcacgggggaaaccgaggcatgagaaaggctgtatggatatctcatcaccctttcacctggtgcccccagaaaactaggaaactaggagccgcctccaaataggacctggagctggagttcccctaaggaatgtagaggccgggtccccaactcccgaacggagtgggtgaagccaaaaaggctagggctgtgcagagatgtcttgggtagcttcgtgggccacctggacagggtaagtttgggtgctggatcgctccatcgttccccttttcccagcgcagagaacaagcgcttcaggccccaggatgggacctagaggcagatggccaaagagaggggccctaagagtctgcggtcccgggacggactgaggcgacactgagggcggtgcctgaaagtccgggctccaggaggcggggtgcgaggccgccaagcgtcgcgggaagcagatgaagaatgcgtgagctgggactcctgttcccgggcccggggaggcctgggcagccgacatggaccccgctgccagacagcccgcactcacctcgcgagggtctcactacatggtctccgcgcgcttccggcctagagtcgggaattcccgccccctcccatagctcccccctcccccacaggagccgcgtacccacgaccgactgccaatggcagcaccgagtgggcggggacagaccgggagtgacgtcagttaggagcaatcagagatcgggagcgggagcgggcggagcaggcgacctgaggagagtgagcgagagcaagagcggatattaggaaaaggacctcggggctggggccctggggcgcatctgtggaggactgaggggccggagcgggccagtcaacaaaggctttgattatatggatatttttaaaagagggagaccccgcattgtcaagtcttccggcccacatctgaaaacatcttcctggccttgggccaaagtctcatctgtccctcagaaggctctgacacctcgtcagtgcctcttggcgcccaagggaaagcattcccctcttgggaccaacttccttgactgctttccctcaccagcacccacaacaaggaaaaagacaaggcagaattggaaaggggggaaagcaaagagagggtatgtcttgaaaatcatcccttctcgactacttatggcactcagtgcagcctccgccttctccaggtgggtggggacgtggtgggaccggaatgcggggtgctgaagccgcgcccagggaagagcccccagcgcattccaggatatctgcgtaccgcgcctgcgggcgtctggccggttctcccacctgatttccagcccagctcccgccaccctcgccggtcggtttgctgtttgctgttccttgaatgccccaaggtagttgtttcagctcaggactttcaccgtttcctcaacctggattcttgtggcccacaactctgtgccttgagaatcctcttctagcctcaagggacggtaagacaaaagaaaatttaaaaagggggctcagctgttcttttatgcaaaggtgaaaaaagcttcattgcctaaagaagggacagatgggatcttgcttcctacaggaaaattaattttaaaaaagaaaaaaaaaaggggggacagtgtaatgcttctcacaaggctccagaaacgaagcccagtaattccttaagtaaaagaggaatgtgaagacttcttaaggggccgggcgcggtggttcacgcctgtaatccaagcactttggaaggccgaggatgaatcacctgaggacagaagttcaagaccagcctggtcaacatggtgaaaccccgtctctactaaatatacaaaaattagccgggcgtggtggcgggggcctgtaatcccagctactcgggaggccgaggcaggagaatcgcttgaacccgggagccggaaattgcagtgagccgagatcgcgccattgcgctccagcctgggcaacaacagcgaaacttcgtctcaaaaaaaaaaattattcgtaattggtaacattaacaaggaattatgactgggggggtcaggaaacctggattctggtccaagttctacctttatagttgtcaaatatatatatttgtttatttatacacatacatatgtcatatatgattaataattgtatatatttatggtgtacaacatgatgttttgaaatatatgtacattgggccgggcgcggtggctcacgcctgtaatcccagcactttgggaagccgaggcgggcagatgacgaggtcaggagttggagaccagcctgctcaacatggtgaaaccctgtctctactaaaaatacaaaaattagccaggcgtggtggcgcatgcctatgatcccagctactcaggaggctgaggcaggagaatcgcttgaaccggggaggcggaggttgcag

SEQ ID NO: 2039 - DNA, 4001 bp, Homo sapiens
agacacacaaagggatacatccagtgttacttcctcagttttagaggaaaaaaggaaagagcccaggatgactttcctgccccactatccaacggcctcagtttttcctataataaaccaagtcctatgccgtggacttgatcattcctcacagcccacttccttgggccaaagcctaaaaaggttagcaacaccaagacccagggaatcgcttcctatccttctcaggcctacagagacctctatctccagccctttaggaaagtggtgagagagtgaagatgattcttggagcacttgctggtagctagaactgagaacccatagagcaagtcacacacctgagaaaaagtgtcttactgtctcaacgggaatgtaggggtcacacagggaatggggaagggggagggaacacatagaaagaattatgccccataaccaaaaatcacaattcataccacatgccaaaagtcttccacacagtcatggagtggcacatgaatcaatctccacaaaccaacactcccagaggtgtgtgattcccctcccgcaagtcacatgcccaggccagtgctcaccgtcacgtgcaaggctgccagggcctcatctatggcagccaggtagtcaggcagcaggtccaggagacaagtggccaaaaagacgccccccgcgaaacagcttactaggctcagggctttctggcgggaagctgggtaggggtgaagcacagaggggaataagcaaacaaaccccctccagggccgaccaccccaacccaaacaatggctacccttgcctttccctcctcctttggtcactccccgccagccccagagccctccctaagccaagcattcatagcagtgtggggaaaaggagaggcttacctgagccttcatggttagctcctggccggcgcagcacacagatgggcaccaggctgcagaggagggtgagcaccagcagcagcaccagggcccccaacttcacctccagccccacaggcactggaggctctgaagctaccgcctcggggcgccacaccaggagctctggctctccccagggccccatgatgcttctggtagctccagtgactctcagacctaggaagacagaccagagtggttgggaaaaatcatgcaaaggaagatggggcaaggaatggggaagcttggtcagcagagtgcagctccctggccccagccactttgtgaccttcccctacccagggtgactcatctactcctgtaccaggaacattcctctcttctcacactttctttcccaagtgacttattcagggagactgcacgggggaaaccgaggcatgagaaaggctgtatggatatctcatcaccctttcacctggtgcccccagaaaactaggaaactaggagccgcctccaaataggacctggagctggagttcccctaaggaatgtagaggccgggtccccaactcccgaacggagtgggtgaagccaaaaaggctagggctgtgcagagatgtcttgggtagcttcgtgggccacctggacagggtaagtttgggtgctggatcgctccatcgttccccttttcccagcgcagagaacaagcgcttcaggccccaggatgggacctagaggcagatggccaaagagaggggccctaagagtctgcggtcccgggacggactgaggcgacactgagggcggtgcctgaaagtccgggctccaggaggcggggtgcgaggccgccaagcgtcgcgggaagcagatgaagaatgcgtgagctgggactcctgttcccgggcccggggaggcctgggcagccgacatggaccccgctgccagacagcccgcactcacctcgcgagggtctcactacatggtctccgcgcgcttccggcctagagtcgggaattcccgccccctcccatagctcccccctcccccacaggagccgcgtacccacgaccgactgccaatggcagcaccgagtgggcggggacagaccgggagtgacgtcagttaggagcaatcagagatcgggagcgggagcgggcggagcaggcgacctgaggagagtgagcgagagcaagagcggatattaggaaaaggacctcggggctggggccctggggcgcatctgtggaggactgaggggccggagcgggccagtcaacaaaggctttgattatatggatatttttaaaagagggagaccccgcattgtcaagtcttccggcccacatctgaaaacatcttcctggccttgggccaaagtctcatctgtccctcagaaggctctgacacctcgtcagtgcctcttggcgcccaagggaaagcattcccctcttgggaccaacttccttgactgctttccctcaccagcacccacaacaaggaaaaagacaaggcagaattggaaaggggggaaagcaaagagagggtatgtcttgaaaatcatcccttctcgactacttatggcactcagtgcagcctccgccttctccaggtgggtggggacgtggtgggaccggaatgcggggtgctgaagccgcgcccagggaagagcccccagcgcattccaggatatctgcgtaccgcgcctgcgggcgtctggccggttctcccacctgatttccagcccagctcccgccaccctcgccggtcggtttgctgtttgctgttccttgaatgccccaaggtagttgtttcagctcaggactttcaccgtttcctcaacctggattcttgtggcccacaactctgtgccttgagaatcctcttctagcctcaagggacggtaagacaaaagaaaatttaaaaagggggctcagctgttcttttatgcaaaggtgaaaaaagcttcattgcctaaagaagggacagatgggatcttgcttcctacaggaaaattaattttaaaaaagaaaaaaaaaaggggggacagtgtaatgcttctcacaaggctccagaaacgaagcccagtaattccttaagtaaaagaggaatgtgaagacttcttaaggggccgggcgcggtggttcacgcctgtaatccaagcactttggaaggccgaggatgaatcacctgaggacagaagttcaagaccagcctggtcaacatggtgaaaccccgtctctactaaatatacaaaaattagccgggcgtggtggcgggggcctgtaatcccagctactcgggaggccgaggcaggagaatcgcttgaacccgggagccggaaattgcagtgagccgagatcgcgccattgcgctccagcctgggcaacaacagcgaaacttcgtctcaaaaaaaaaaattattcgtaattggtaacattaacaaggaattatgactgggggggtcaggaaacctggattctggtccaagttctacctttatagttgtcaaatatatatatttgtttatttatacacatacatatgtcatatatgattaataattgtatatatttatggtgtacaacatgatgttttgaaatatatgtacattgggccgggcgcggtggctcacgcctgtaatcccagcactttgggaagccgaggcgggcagatgacgaggtcaggagttggagaccagcctgctcaacatggtgaaaccctgtctctactaaaaatacaaaaattagccaggcgtggtggcgcatgcctatgatcccagctactcaggaggctgaggcaggagaatcgcttgaaccggggaggcggaggttgcagtgagccaagatcacacctctgcactccagcctggacgacacagcgagactccgtctcaaaaaaaaagaaaaaagaaaagaaatatatgtacattgcagaatgggtaaatcaagctaattaacatatgcattacttcacatatttatttgtgatgagaacatttaaaatctcttggcaactttatttcttttctttttccttccttccttcctttcttctttcctcctttctttcttgacagagtcttgctgtgttgcccaggctggaatgcag

SEQ ID NO: 2040 - DNA, 4001 bp, Homo sapiens
cccgccaccacgcccggctaatttttgtatttttagtagagacgggatttcaccatgttgaccaggctggtcttgaactcctgacctcaggtgatccacccgcttcagcctcccaaagtgctgggactgcaggtgtgagccaccacacccggcccaatagatctcctcaattttaccttaccttgatgtatgattttaggcaagtcagttttcctcaccagagtttgataaatcaggggcaaggaggaagttaaacaagcagatgactgcagagggtccttccagttctaacatcaacggaagctaactacattccccactcaaatcatctctgcacatacagcccgcaggaagccctttgaaatgtatttaaccacctttctcgctctcagaatgatctcaacaagaacagctttgctttccttggagctctgcatcaatctaggaaggctgctttgtctcttcactacttgagcaggatggagagatatgagcgggaaagacagataagaaatctgagaaagccccacaaggtgggttgatagtgtgaagaacatgggctgaagcatccaaatcttggttcagctacttacagggtaaccttgagaaagttacttaaacttgtcagctcggacgggcgtggtggctcacgcctgtaatcccagcacattgggaggccgaggtggacggatcacgaggtcagatcgagaccaccctggctaacacggtgaaaccctgtctctactaaaaatacaaaaaaattagctgggcgcctgtagtcccagctactagggaggctgaggcaggagaatggcgtgaacccgggaggcggagcttgcagtgagccgagatcgagcctctgcactccagcctgggccacagagcaaaagaaaaacaaacaaacaaacttgtcagctccatctgctgtaagaattatatgagtaacatggaaatgcctgactagaccctgttcccgtttttacccttagcccgttcaaatcttcataaggataattagtagcagtttgagttctgggattcacactccaaactactgttttactcacccagctacccttttctgaaatactactgaaaaccatacctgtatcagtttacctccattgttttacttgaagtgaattcctggaccatcagacattagaccaaggcaaaaaaataaaaataatcaatcaaccctgagttttggtattactactttctagtcatggatctgcctcctcataggtaaaatttgcaaaatattacccgccgtgtgtgcctcagaactgttatggattaaggaagagaacaatttttatgaaaacgttttgtaaattatacaagtgtgggacataatgttcccggtaactgtatgcaaacaataagacaacaaacgcaaaaggctttttaacttgttgcagttttcctgccccgtgtccctccgtgaatgagcagcgtgcagcgagcgtgtgcgcacagctgctgttctccattaacgccacactgctcggcttgcggacggggaaacccgccatcgcgctcctgccgcctgccgagcgaggatcaccgctccactggggtcagcgggctgttgactccccgcctgggtgaaaccggagcttccgagtcacgtggcgcgcgaagacaaacctggctgctcagggtttcccggagctttctcccagcttcccggcgattcatattctggcgcttacccctccctttaggctggcggaacccaatccccgcctgacaaataagtcccgccggccggacgcagtggctcgcgcctgtggtcctagctgctcgcggtgctgaggcgggagaatcacctgagcccgggaggtcgggggctgcatggaaccgtgatcgcaccaccgcactccagcctgggcaacagagcgagaccctgtctccaaaaataagaataaagaaaaaaaaaagaaagaactgcggccccattggcctgactctcctgaacagccaaactgtctccgaccagttacggaagaggcggccttgagagggtagtgtgccattggctcgatgtcctgcccctccgaaacctaagtcttcagcttccaatcaggactcagctttgggaagagcgccacgcggtgggcgaggggatgccctagtaaattcgcaggtctcttgactctttccgcctttgtttacaaccctgccatgatctccctcttgcaaaagcgagggctacagaacaggcattcaggagtcctgtgctccagtcacagccttttctgttcttcagctaggagacaccaaaccctcaggaagatttactatagctaagagaaaactgcagcagaaagggcgcggctacctacttcttaaattccgtttgtggaccctcagactcttagtcccctactcccagatacagcggccctaccgtggctcctggcaaggtggcatccacttttgtagtgtaaggctgggggcggggtttggctggcaggtccaggatacgagatcctggaagaaagaaaaggtgtagtgtttggggaggtcaacgggctatgctggcttgacagggctgggctcttcagaacaggtaatgcttggggggggcctctttgtctaaacctgagggatagggctgaaggtgaaatatcgaggggacaggtgagggggcttgctagtgaggaaggagtgggggggcggggataatggaaaagggagcagaggagcccagaaactgtagggggtagtaagcagccatcattccgtttctgcaaccctccgtcccacacgccttcctgcagaagcatggatctcggaatccctgacctgctggacgcgtggctggagcccccagaggatatcttctcgacaggatccgtcctggagctgggactccactgcccccctccagaggttccggtaactaggctacaggaacagggactgcaaggctggaagtccggtggggaccgtggctgtgtgagtgtgacgagtgggagtgggggtggggttgagacacaactctgtgataagaggcttcagctcccacttggagacaggtctgaaaacagaccacccccaaaatagacgtaagttgtataataactgtctccatgcccaagaagtgaaaggactgaaaatgaagcataagtcagggaggacttccaaaattcttccctgcacatatatataaccttttcctactgtagggccttcaagagagtgagcctgaagatttcttgaagcttttcattgatcccaatgaggtgtactgctcagaagcatctcctggcagtgacagtggcatctctgaggacccctgccatccagacagtccccctgcccccagggcaaccagttctcctatgctctatgaggttgtctatgaggcaggggccctggagaggatgcagggggaaactgggccaaatgtaggccttatctccatccagctaggtcagtgttctttgtgggaagggggaaatggcccttcgggactggccctaaccatggggttaagggggtttacccaacctgtgccactacccaggccctgcggctgtcagggtgttcctaagtctcctttctcccagctacctgttttctactccagatcagtggagcccagcatttatggtgcctgattcctgcatggtcagtgagctgccctttgatgctcatgcccacatcctgcccagagcaggcaccgtagccccagtgccctgtacaaccctggtgagtcttggtgtcagccagaaccactactccttgatacatatataatcacacagacagagcaaagggatgagggaatggaaactgatgatgaactgcctttgccccggtttttgtggcattgggcctgaagaccaaggagacatgaacagttgaactattttttattttttgagccagggtcttactctgtcatccaggctggagtgcagtggtgcaatcacggctcactgcatcctcaacatcttgggctcaagcaatcctcctgcctcagcctc

SEQ ID NO: 2041 - DNA, 4001 bp, Homo sapiens
gccacactcctagttgagagtcactgatgtagacatacatgaaaaggtcacacattgcccatctccccaaatactcatacatagagccacatatcacaggacattcaggcttatacgcagtcacacggaaacacaggtcactcagtcacagacacacaaagggatacatccagtgttacttcctcagttttagaggaaaaaaggaaagagcccaggatgactttcctgccccactatccaacggcctcagtttttcctataataaaccaagtcctatgccgtggacttgatcattcctcacagcccacttccttgggccaaagcctaaaaaggttagcaacaccaagacccagggaatcgcttcctatccttctcaggcctacagagacctctatctccagccctttaggaaagtggtgagagagtgaagatgattcttggagcacttgctggtagctagaactgagaacccatagagcaagtcacacacctgagaaaaagtgtcttactgtctcaacgggaatgtaggggtcacacagggaatggggaagggggagggaacacatagaaagaattatgccccataaccaaaaatcacaattcataccacatgccaaaagtcttccacacagtcatggagtggcacatgaatcaatctccacaaaccaacactcccagaggtgtgtgattcccctcccgcaagtcacatgcccaggccagtgctcaccgtcacgtgcaaggctgccagggcctcatctatggcagccaggtagtcaggcagcaggtccaggagacaagtggccaaaaagacgccccccgcgaaacagcttactaggctcagggctttctggcgggaagctgggtaggggtgaagcacagaggggaataagcaaacaaaccccctccagggccgaccaccccaacccaaacaatggctacccttgcctttccctcctcctttggtcactccccgccagccccagagccctccctaagccaagcattcatagcagtgtggggaaaaggagaggcttacctgagccttcatggttagctcctggccggcgcagcacacagatgggcaccaggctgcagaggagggtgagcaccagcagcagcaccagggcccccaacttcacctccagccccacaggcactggaggctctgaagctaccgcctcggggcgccacaccaggagctctggctctccccagggccccatgatgcttctggtagctccagtgactctcagacctaggaagacagaccagagtggttgggaaaaatcatgcaaaggaagatggggcaaggaatggggaagcttggtcagcagagtgcagctccctggccccagccactttgtgaccttcccctacccagggtgactcatctactcctgtaccaggaacattcctctcttctcacactttctttcccaagtgacttattcagggagactgcacgggggaaaccgaggcatgagaaaggctgtatggatatctcatcaccctttcacctggtgcccccagaaaactaggaaactaggagccgcctccaaataggacctggagctggagttcccctaaggaatgtagaggccgggtccccaactcccgaacggagtgggtgaagccaaaaaggctagggctgtgcagagatgtcttgggtagcttcgtgggccacctggacagggtaagtttgggtgctggatcgctccatcgttccccttttcccagcgcagagaacaagcgcttcaggccccaggatgggacctagaggcagatggccaaagagaggggccctaagagtctgcggtcccgggacggactgaggcgacactgagggcggtgcctgaaagtccgggctccaggaggcggggtgcgaggccgccaagcgtcgcgggaagcagatgaagaatgcgtgagctgggactcctgttcccgggcccggggaggcctgggcagccgacatggaccccgctgccagacagcccgcactcacctcgcgagggtctcactacatggtctccgcgcgcttccggcctagagtcgggaattcccgccccctcccatagctcccccctcccccacaggagccgcgtacccacgaccgactgccaatggcagcaccgagtgggcggggacagaccgggagtgacgtcagttaggagcaatcagagatcgggagcgggagcgggcggagcaggcgacctgaggagagtgagcgagagcaagagcggatattaggaaaaggacctcggggctggggccctggggcgcatctgtggaggactgaggggccggagcgggccagtcaacaaaggctttgattatatggatatttttaaaagagggagaccccgcattgtcaagtcttccggcccacatctgaaaacatcttcctggccttgggccaaagtctcatctgtccctcagaaggctctgacacctcgtcagtgcctcttggcgcccaagggaaagcattcccctcttgggaccaacttccttgactgctttccctcaccagcacccacaacaaggaaaaagacaaggcagaattggaaaggggggaaagcaaagagagggtatgtcttgaaaatcatcccttctcgactacttatggcactcagtgcagcctccgccttctccaggtgggtggggacgtggtgggaccggaatgcggggtgctgaagccgcgcccagggaagagcccccagcgcattccaggatatctgcgtaccgcgcctgcgggcgtctggccggttctcccacctgatttccagcccagctcccgccaccctcgccggtcggtttgctgtttgctgttccttgaatgccccaaggtagttgtttcagctcaggactttcaccgtttcctcaacctggattcttgtggcccacaactctgtgccttgagaatcctcttctagcctcaagggacggtaagacaaaagaaaatttaaaaagggggctcagctgttcttttatgcaaaggtgaaaaaagcttcattgcctaaagaagggacagatgggatcttgcttcctacaggaaaattaattttaaaaaagaaaaaaaaaaggggggacagtgtaatgcttctcacaaggctccagaaacgaagcccagtaattccttaagtaaaagaggaatgtgaagacttcttaaggggccgggcgcggtggttcacgcctgtaatccaagcactttggaaggccgaggatgaatcacctgaggacagaagttcaagaccagcctggtcaacatggtgaaaccccgtctctactaaatatacaaaaattagccgggcgtggtggcgggggcctgtaatcccagctactcgggaggccgaggcaggagaatcgcttgaacccgggagccggaaattgcagtgagccgagatcgcgccattgcgctccagcctgggcaacaacagcgaaacttcgtctcaaaaaaaaaaattattcgtaattggtaacattaacaaggaattatgactgggggggtcaggaaacctggattctggtccaagttctacctttatagttgtcaaatatatatatttgtttatttatacacatacatatgtcatatatgattaataattgtatatatttatggtgtacaacatgatgttttgaaatatatgtacattgggccgggcgcggtggctcacgcctgtaatcccagcactttgggaagccgaggcgggcagatgacgaggtcaggagttggagaccagcctgctcaacatggtgaaaccctgtctctactaaaaatacaaaaattagccaggcgtggtggcgcatgcctatgatcccagctactcaggaggctgaggcaggagaatcgcttgaaccggggaggcggaggttgcagtgagccaagatcacacctctgcactccagcctggacgacacagcgagactccgtctcaaaaaaaaagaaaaaagaaaagaaatatatgtacattgcagaatgggtaaatcaagctaattaacat

SEQ ID NO: 2042 - DNA, 4001 bp, Homo sapiens
gctttgtctcttcactacttgagcaggatggagagatatgagcgggaaagacagataagaaatctgagaaagccccacaaggtgggttgatagtgtgaagaacatgggctgaagcatccaaatcttggttcagctacttacagggtaaccttgagaaagttacttaaacttgtcagctcggacgggcgtggtggctcacgcctgtaatcccagcacattgggaggccgaggtggacggatcacgaggtcagatcgagaccaccctggctaacacggtgaaaccctgtctctactaaaaatacaaaaaaattagctgggcgcctgtagtcccagctactagggaggctgaggcaggagaatggcgtgaacccgggaggcggagcttgcagtgagccgagatcgagcctctgcactccagcctgggccacagagcaaaagaaaaacaaacaaacaaacttgtcagctccatctgctgtaagaattatatgagtaacatggaaatgcctgactagaccctgttcccgtttttacccttagcccgttcaaatcttcataaggataattagtagcagtttgagttctgggattcacactccaaactactgttttactcacccagctacccttttctgaaatactactgaaaaccatacctgtatcagtttacctccattgttttacttgaagtgaattcctggaccatcagacattagaccaaggcaaaaaaataaaaataatcaatcaaccctgagttttggtattactactttctagtcatggatctgcctcctcataggtaaaatttgcaaaatattacccgccgtgtgtgcctcagaactgttatggattaaggaagagaacaatttttatgaaaacgttttgtaaattatacaagtgtgggacataatgttcccggtaactgtatgcaaacaataagacaacaaacgcaaaaggctttttaacttgttgcagttttcctgccccgtgtccctccgtgaatgagcagcgtgcagcgagcgtgtgcgcacagctgctgttctccattaacgccacactgctcggcttgcggacggggaaacccgccatcgcgctcctgccgcctgccgagcgaggatcaccgctccactggggtcagcgggctgttgactccccgcctgggtgaaaccggagcttccgagtcacgtggcgcgcgaagacaaacctggctgctcagggtttcccggagctttctcccagcttcccggcgattcatattctggcgcttacccctccctttaggctggcggaacccaatccccgcctgacaaataagtcccgccggccggacgcagtggctcgcgcctgtggtcctagctgctcgcggtgctgaggcgggagaatcacctgagcccgggaggtcgggggctgcatggaaccgtgatcgcaccaccgcactccagcctgggcaacagagcgagaccctgtctccaaaaataagaataaagaaaaaaaaaagaaagaactgcggccccattggcctgactctcctgaacagccaaactgtctccgaccagttacggaagaggcggccttgagagggtagtgtgccattggctcgatgtcctgcccctccgaaacctaagtcttcagcttccaatcaggactcagctttgggaagagcgccacgcggtgggcgaggggatgccctagtaaattcgcaggtctcttgactctttccgcctttgtttacaaccctgccatgatctccctcttgcaaaagcgagggctacagaacaggcattcaggagtcctgtgctccagtcacagccttttctgttcttcagctaggagacaccaaaccctcaggaagatttactatagctaagagaaaactgcagcagaaagggcgcggctacctacttcttaaattccgtttgtggaccctcagactcttagtcccctactcccagatacagcggccctaccgtggctcctggcaaggtggcatccacttttgtagtgtaaggctgggggcggggtttggctggcaggtccaggatacgagatcctggaagaaagaaaaggtgtagtgtttggggaggtcaacgggctatgctggcttgacagggctgggctcttcagaacaggtaatgcttggggggggcctctttgtctaaacctgagggatagggctgaaggtgaaatatcgaggggacaggtgagggggcttgctagtgaggaaggagtgggggggcggggataatggaaaagggagcagaggagcccagaaactgtagggggtagtaagcagccatcattccgtttctgcaaccctccgtcccacacgccttcctgcagaagcatggatctcggaatccctgacctgctggacgcgtggctggagcccccagaggatatcttctcgacaggatccgtcctggagctgggactccactgcccccctccagaggttccggtaactaggctacaggaacagggactgcaaggctggaagtccggtggggaccgtggctgtgtgagtgtgacgagtgggagtgggggtggggttgagacacaactctgtgataagaggcttcagctcccacttggagacaggtctgaaaacagaccacccccaaaatagacgtaagttgtataataactgtctccatgcccaagaagtgaaaggactgaaaatgaagcataagtcagggaggacttccaaaattcttccctgcacatatatataaccttttcctactgtagggccttcaagagagtgagcctgaagatttcttgaagcttttcattgatcccaatgaggtgtactgctcagaagcatctcctggcagtgacagtggcatctctgaggacccctgccatccagacagtccccctgcccccagggcaaccagttctcctatgctctatgaggttgtctatgaggcaggggccctggagaggatgcagggggaaactgggccaaatgtaggccttatctccatccagctaggtcagtgttctttgtgggaagggggaaatggcccttcgggactggccctaaccatggggttaagggggtttacccaacctgtgccactacccaggccctgcggctgtcagggtgttcctaagtctcctttctcccagctacctgttttctactccagatcagtggagcccagcatttatggtgcctgattcctgcatggtcagtgagctgccctttgatgctcatgcccacatcctgcccagagcaggcaccgtagccccagtgccctgtacaaccctggtgagtcttggtgtcagccagaaccactactccttgatacatatataatcacacagacagagcaaagggatgagggaatggaaactgatgatgaactgcctttgccccggtttttgtggcattgggcctgaagaccaaggagacatgaacagttgaactattttttattttttgagccagggtcttactctgtcatccaggctggagtgcagtggtgcaatcacggctcactgcatcctcaacatcttgggctcaagcaatcctcctgcctcagcctcctgagtagctgggactacaggtgtgtgccaccacgtctggctaatttttgtagagatggggttttggggttttgccatgttgcccaggctcaggctggtcttaatctcctgagttcaagtgatctgcctacctcagcctcccagggtggtgggattacaggcatgagccactgtgcccgactaacatgaacaattttttttttttttttttttgagacggagtctcactctgtcacccaggctggagtgtggtggcaccatctcagctcactgcaacctctgcctcccgggttcaagcgattctcctgcctcagcctcccaagtagctgggactacaggtgcctgccaccatgcctggctaatttttgtatttttagtagagacgggtttccaccatattggccaggctggtcttgaactcctgaccttgtgatccgcctgcctctgcctcc

SEQ ID NO: 2043 - DNA, 4001 bp, Homo sapiens
taatacctcttcaaatccctggtccttaaagtcacgagaatcagtgtggaacaccttatgtgggaaggagaaagaaaagaaaaagaacattacactatagcaaaggacagcttgtactgggagaatttccccccaaggaagttaggagttcatcatatagctatagagtttgctatttgcctccctttttccgcaaaaattactcagtcctgcactgctccatctggaggctcagcaggagctatccccgccatcctccccaccagcaaccctcctgagggatcaccaccgtggtcaccagcaatgagatgtgaccagcctgggattgggaagatgctgtgcagaagccctctgcactgtttcctcagcaactgggggtgggtaggtgtgtcctcagcaagaccccttcttgaatgcccattaagaaccctgcattatttaagtggggttcagttacaaattcagtcacaaactccctgccacacagccacccctgtataaagtgactgcttatcatcacaagacagcaacagaaagacagccacacagggcaaagaaatagggagaaactgattgctgagtgaagtcccccagaccccagatcgttctagcttctgagaaaacaaaacaaagctaggaggactccctgggcagtggggcaagcctgccagaccaaggccaagagccagaggcctacccactcctgcccttgagagtcaacagtgttacaaagagctcagacagctgactcggatccaggcctctgtctctccccgtctccccctgctcttggccctgtgagcttgtcagataggacaagggagttatctcagttagaagggacagagcataaaacgattgcttattacccacgcatttcagttaattaggctcctcctgttccccagggttactgagagttggatatagtggaattcttagaaacaaaaacaaaaaaacaaaagtagcaataaaaaaaacccaaaacaaaaaccaaagcaccgtaagccaatatgcacttgctccaaatgcatctctttagctgtaatggctccacttctctgcctaaaggaatccccaggcttcctaattcctgatggactcccatcctattccatttcaccagaagagctcttattcgtaaaaaataaatttaaagagagttccaccaggtaagaggaacaggtccttaagtattccaaacacacacaattagtcaagttcagtttaggaaaggaggtatcaaaccccaggaactggcccaggagaactgtttcctctatcaattcagtcacccaccaggactcccttttccaatctccttaaacacagtactgtggttctttcaaactccctcaccagagatccaggaggaaacctctgagtccagtgcccctatgccagaaaagtttctgagtccgctaaaagctgacacccccgcctccctcctgtgttcctggcaggccactgaacctgagagggggctcccaggaggggaagccagtcctccctcaccactccccctgtaaagagacttcagacaggcctaaggccctgggacgaaagaagcaaaagtgaaccaggacgccctatcccctcctcccaggcggggacaaaaaagacccattttagtatccccaaccccgaggagggagagaaagtaactgggtggcctcctcagtctctccaccactcagattcagcaaatgcgctgcgcgccaggactgccgccctccaccaccccctccccgccccaggaccccacaggactgacctgcccctcgcctgggaggaaggggggcgcctggcaagtggcagcgtggcccgtggtctcggggggtgcagggcaccccctcttctcatcactcctcctcgacagtcctccttggcccccggcgtgcccccccacacccccagccaaggcgagcgtccagccgcgacacccggctcgctacatttcgcttctgcgttacagcgaggccgccgctccgcttccacgcgggggaggtggccggggagggcaggatatatcgcttcgggcccggcgggggggcacccggacgggggaccggggagccgagctcacgcgcccccaatcgcttcttgcccgcggactcgggcccaactggttggctgccggtggcaaacgtgatctggggcagactgggtggcaccccccccgctccatcaaaaatagattctcggatggacaacagcagcagccaatcagggactggggagggggcgggatcaacctcggcccggcccccttccttcgcttcgtgcccaggaggcggggcgccggggaaacgcagtaggaggagtgacgggaaccgggagccggctccatgcgcctggagcgcgcgggtcccagcgcccatcggcccggggtccgaggggcccgctgcccgggctcgctgcgtggtgctaccgcccccgggcccgctgcgccgcgtcggagccccagcagactttgagaggcgtgtgcgacagtgcgcgtcctctcctgcctctggatgtttccttggagcctctggccttcgggaagaccggtaaacgtccctgtggagccagccagccagccacctctgacccccgggctcaagcagccagccgcgtgctccctcctcccacttggtacccggacagaacagtccctaccttgctcttctcccgccggctcgtcactttaggctccctccagattccgcgttccttgagcaaatggctcacccctgacgaatccggccttaaaaaagtcccggccttgaaaggggtggagactggcgggcgggagcgaaaggaggtcagacccatggctggggtcgcacacgcatcacctgaggtcggagaggaggggagcctcacttcctctgacccactgagcctggtggcagcgtgcggagagatgtcaccatcccggactaaatgaaatccaactttccctgacgcaccttgtgggatcaaagaggggtgttcccatgctcacctttcgccacttcctccctggggtatctccacctctccaacacaagctcaatgccagttctctttgggatgtttttgtgcagggggtgtgacctccctcataaaggaacccccactcccaagttttcccctcttgtcagtggaacctgtgaccaacggttccttcctgtccttttcctccctgaaagtagcccgggggcattcgaacatggctctagacccctgaatagggtttggagcggagatgtgcctggggagaagagatcgcagtgctgtgtatgaagctttgggcacgtgctcacaagagcacacacagcaacctgagcaggtcattccttttgataaggatgacaaatacacataccaaaccctgttcccctcacccaccccaaaccagtacccccaggatgattccagatcagctctggagcatttgcatcaagggcctgcagactcacaggacctactagagcaaaatatcagtgtctcagaccccagttttggcctcaaatactgggtttttctgccaggagaagtagctgctagtctaggaaatgctgggacttgtccagaaagatgaggtttgtgaatacggggtgtggggttgggtggggaattaaggctgatgtatctggaggaactttggttgggctggaggcaacttctgccctgttctattcaacagttccctcccctccactaccccatttaatctggccacagctcagctacctgtgtataaaatcttgatctctctcctatttcctttctaccttccgtgtttttacttactcgaaaactgttcccctctcctgtgtgtatttttttaattgaaatataccaggcatttaggaaaggaacacgaaacctaagtgtacaggtcaacaaatgatgacacagtgaacacccccatatgaccaccatccagatctagaacgagatcattattggcatcccagataccctccttctatccgctcctggtgactatgccacactccttctcaaaagta

SEQ ID NO: 2044 - DNA, 4001 bp, Homo sapiens
gacatctgtcacaagacctgaaagctgaacaacagaggcagaaaaaaaagtccaaaaacaaaacactccttgctctgttttaaatacctgcaaataaaaaatgttgcaaaagacactaaaagccagtgagctaagaaaggactctgactcttaaaacagaatgccatagtgagaacttggatatattaaaacttcagacttattttgcaaatgaaatgtaattttaaagcagtttccagctccgtgccacctctcagctggttcacaattcttcaggctgtgataggtcatctacaaagattttccccaggattctcagctgttgggctgagagtttggtagtgaggtcctaggttgaagctgtggaggggctacggcagatcattaaatcacaataacagcttgaggtcaaagctgccaggcacaaggcaggccagctgctccctgcatttatacaacagcagtctcagataaaaacaccaaccatctgcgaagttaagcagaaggtattgtaggtgcactgtctctcccagctcctaggggagagttccaacgtaagcaacaaaaaacatctgattatgtgtttcagacctaaccttccactgtgcctgtaaccaagcctgtctatgtgaaacgggtcataagtgaacaaatgcctttcttacttggaaagaacaaacatgatattttagggcctattcagatggaattcttttcaacaaaggtaattactatctggtagttattaccctgctctataaattaatcatttaccatgcagcaaatagcatgccttatcctggcatggatgatttcgtgaaagtggcctttgaaaatgtcgggtgagacgttttctgctgttacctacaattctaaaataagtataaaagcagcaagattcggcttccaacagactctctcaggattataaccgcatagcctgatggagtttaccagcaatcatacatacctcgaaattagagtgggaaaaatcattccttgttagctatggttaacagtgttggctgctaaacacaacatatctctcgcgcgcgtgtgtgtgtgatgttcagctaaaggaaatgcagtttatttctaggcttaccctggcttttcctttgttaaaggtgcaccaaaagcttgaggaatatttgatttgggggtgtggcaggtgctaaaagaacttctgttcagtaagttcggagagtaaaaggagacacattggccttactaaatagcaatcacattgcaaactgttaattcccatttcctaatggagtcaccccttagaacatggcctgtagcaaaaagacagcctttctagcgagtctaggacaagaattctcccgagtacaaactgatgtttattgtgggttaacggcagaagtctctcactgcagcaccaactacgatttacatttgggacagagttatttccagacgtgcacacacactctggcctctttcctaccaagcacccacacttaccaaaccagtccaaaagagaaagaacaggaataaccatgccgtatctgtgcatttcctataaatctggggtcgccactccctttgcctaggggctccttctgcagaaaccttccagaaaaagggagagttgagaaaaagaagataaacaggtggactcaacctggaaaccgaacccaaatctactcgaagaggggccaaagtaaccaatctttttctaaatttttaaaattaatattatttttttacgtggccacctgaagctctttcacacagcctttgaaacacctgctctgcgcggagcggatgttaagccccctgccgccaagtgcttacctggaggtgcacctgaggacgaccccaagtttgcgccccgcggcccgcgtctcccccgcctccgccccagcactggagcagggtccaggttcctccccgccaggtggccccaaggtactaagcgggggcgggatccccgaggcgcgggaaaggcggaagcgtccggcagggaaggtgcgtgaaggcgggggactcgacccttccccggggctcctcccccgagggccgaggctgcgagcgcttaccaggtactcggcgcccaggcagtgcatcgtgcgctcgccggcgggggccggtgactgggagccgccgccgcctcctgtacgcggagacgcagcgcccgcgagccggggccggggccggggctggggctggggctggggctggagccggggccgggccggggaggggcgggcacggtgcagcgccgcctcccgttcgcctctgcgcctggcccggcgactgcgggcgctgcggtccactgggtccgcctcttcccggcatgggtttctgcccagctcacccgctgtcagctggggtcctgctctggtgggaggaagaggctcagacgcttccctgccctctcgcctcaaccacctcgaggcagcggctcccaggatgtgcactttgacgactaaagctgagccggcgccgccacgaccttgggcgggtggtcggcctctgccctgagcaggaagtagaaagtctcagcagacccttcctgagggccgagcaacagtgtagtggcgtattccacatagcaaacaggtaagcagcatttactgtgtgctggattctgttctcactgctattgttattcctaatctacggaggagggaaactgaggcacggccattggtgatgcaacttgttcgaggagacccagtaagttgtggaggcaggagtcgaacccagacactccgggagaccggcgctctcgaggtggtttactctgacttctctcccaccttgccttaggacaatcattgcctgacttcgcaattgaaatggtagtgtccactgaagcgactggtggcatagttttccaggtagtgtcagaccagcgcaaaagcactgttggggtgaggaatttaaaaaacgaaaaacaaaaaaaactgcaggccgacctccccccacctcctctcaatcaagcctctacccttccccctgccacccttagggttgctaggttaattgcttcctttaggtgctgcttctccctaagggtagaaacctgactggaggaaagatctgggtaagtgggagaaactgggaatgatagacagtggttctctggtgccagcgatttccttctgggctcacaccaccctcccactgcaaactcactgggccttcctggatgcatgtttatcagacagagtaggtgaaaccccaggggaacatgaattcataggacaaagaattagacactggaggagtgcaactactgttaaaagaccacaactgaataacatatgccatctgaaactgatcagtagagcagatggaccaagatttttaaataagcatgataaatttatttaaaatgagttatgatattagcaatatgaatcaggaaaaaatatgaaactaaaacatattaagcataaaaataataattagaatgaatattgatgctacgtattagtaatgtgcaatagtctaaaagatgcagctgacgatgaattagtaattggaagagcactttcagcaaacctccagaggcagtagaaaatgttttaaaaaacaagttagcttatttgtaaattttctagcttatatctagggtaaaactagaacagaaaggaagaaatataaaaacagagaaggggaaatatttgaagatataatggagataaatttcaaggtagaaaaaaaccttcagattgaaaaggtttatctcaagcaaaatgtttctatatgtaagtatttaaaagcataactttgaacttattttctattaagccatattgtcattagaatgtgagaatgtattaataataaaaatattcttatgaaagattcatttgaatgacattcttggaggacataatcaagcaagaagagaaacaaattcaggagatgatacaatagatatagcatgagagtggccaaatatttaggctgaatttattgttgtgttagaaaaaagaccaggaaccacccaagtgtccaggaac

SEQ ID NO: 2045 - DNA, 4001 bp, Homo sapiens
ttttgcaaatgaaatgtaattttaaagcagtttccagctccgtgccacctctcagctggttcacaattcttcaggctgtgataggtcatctacaaagattttccccaggattctcagctgttgggctgagagtttggtagtgaggtcctaggttgaagctgtggaggggctacggcagatcattaaatcacaataacagcttgaggtcaaagctgccaggcacaaggcaggccagctgctccctgcatttatacaacagcagtctcagataaaaacaccaaccatctgcgaagttaagcagaaggtattgtaggtgcactgtctctcccagctcctaggggagagttccaacgtaagcaacaaaaaacatctgattatgtgtttcagacctaaccttccactgtgcctgtaaccaagcctgtctatgtgaaacgggtcataagtgaacaaatgcctttcttacttggaaagaacaaacatgatattttagggcctattcagatggaattcttttcaacaaaggtaattactatctggtagttattaccctgctctataaattaatcatttaccatgcagcaaatagcatgccttatcctggcatggatgatttcgtgaaagtggcctttgaaaatgtcgggtgagacgttttctgctgttacctacaattctaaaataagtataaaagcagcaagattcggcttccaacagactctctcaggattataaccgcatagcctgatggagtttaccagcaatcatacatacctcgaaattagagtgggaaaaatcattccttgttagctatggttaacagtgttggctgctaaacacaacatatctctcgcgcgcgtgtgtgtgtgatgttcagctaaaggaaatgcagtttatttctaggcttaccctggcttttcctttgttaaaggtgcaccaaaagcttgaggaatatttgatttgggggtgtggcaggtgctaaaagaacttctgttcagtaagttcggagagtaaaaggagacacattggccttactaaatagcaatcacattgcaaactgttaattcccatttcctaatggagtcaccccttagaacatggcctgtagcaaaaagacagcctttctagcgagtctaggacaagaattctcccgagtacaaactgatgtttattgtgggttaacggcagaagtctctcactgcagcaccaactacgatttacatttgggacagagttatttccagacgtgcacacacactctggcctctttcctaccaagcacccacacttaccaaaccagtccaaaagagaaagaacaggaataaccatgccgtatctgtgcatttcctataaatctggggtcgccactccctttgcctaggggctccttctgcagaaaccttccagaaaaagggagagttgagaaaaagaagataaacaggtggactcaacctggaaaccgaacccaaatctactcgaagaggggccaaagtaaccaatctttttctaaatttttaaaattaatattatttttttacgtggccacctgaagctctttcacacagcctttgaaacacctgctctgcgcggagcggatgttaagccccctgccgccaagtgcttacctggaggtgcacctgaggacgaccccaagtttgcgccccgcggcccgcgtctcccccgcctccgccccagcactggagcagggtccaggttcctccccgccaggtggccccaaggtactaagcgggggcgggatccccgaggcgcgggaaaggcggaagcgtccggcagggaaggtgcgtgaaggcgggggactcgacccttccccggggctcctcccccgagggccgaggctgcgagcgcttaccaggtactcggcgcccaggcagtgcatcgtgcgctcgccggcgggggccggtgactgggagccgccgccgcctcctgtacgcggagacgcagcgcccgcgagccggggccggggccggggctggggctggggctggggctggagccggggccgggccggggaggggcgggcacggtgcagcgccgcctcccgttcgcctctgcgcctggcccggcgactgcgggcgctgcggtccactgggtccgcctcttcccggcatgggtttctgcccagctcacccgctgtcagctggggtcctgctctggtgggaggaagaggctcagacgcttccctgccctctcgcctcaaccacctcgaggcagcggctcccaggatgtgcactttgacgactaaagctgagccggcgccgccacgaccttgggcgggtggtcggcctctgccctgagcaggaagtagaaagtctcagcagacccttcctgagggccgagcaacagtgtagtggcgtattccacatagcaaacaggtaagcagcatttactgtgtgctggattctgttctcactgctattgttattcctaatctacggaggagggaaactgaggcacggccattggtgatgcaacttgttcgaggagacccagtaagttgtggaggcaggagtcgaacccagacactccgggagaccggcgctctcgaggtggtttactctgacttctctcccaccttgccttaggacaatcattgcctgacttcgcaattgaaatggtagtgtccactgaagcgactggtggcatagttttccaggtagtgtcagaccagcgcaaaagcactgttggggtgaggaatttaaaaaacgaaaaacaaaaaaaactgcaggccgacctccccccacctcctctcaatcaagcctctacccttccccctgccacccttagggttgctaggttaattgcttcctttaggtgctgcttctccctaagggtagaaacctgactggaggaaagatctgggtaagtgggagaaactgggaatgatagacagtggttctctggtgccagcgatttccttctgggctcacaccaccctcccactgcaaactcactgggccttcctggatgcatgtttatcagacagagtaggtgaaaccccaggggaacatgaattcataggacaaagaattagacactggaggagtgcaactactgttaaaagaccacaactgaataacatatgccatctgaaactgatcagtagagcagatggaccaagatttttaaataagcatgataaatttatttaaaatgagttatgatattagcaatatgaatcaggaaaaaatatgaaactaaaacatattaagcataaaaataataattagaatgaatattgatgctacgtattagtaatgtgcaatagtctaaaagatgcagctgacgatgaattagtaattggaagagcactttcagcaaacctccagaggcagtagaaaatgttttaaaaaacaagttagcttatttgtaaattttctagcttatatctagggtaaaactagaacagaaaggaagaaatataaaaacagagaaggggaaatatttgaagatataatggagataaatttcaaggtagaaaaaaaccttcagattgaaaaggtttatctcaagcaaaatgtttctatatgtaagtatttaaaagcataactttgaacttattttctattaagccatattgtcattagaatgtgagaatgtattaataataaaaatattcttatgaaagattcatttgaatgacattcttggaggacataatcaagcaagaagagaaacaaattcaggagatgatacaatagatatagcatgagagtggccaaatatttaggctgaatttattgttgtgttagaaaaaagaccaggaaccacccaagtgtccaggaactggtgggtggctatacataactgtgatgcatctatacgatgaaatacaactaagcattaagaaggaacagacttcttacatatgcaaaaacatggatgatctcaaatgcatgttaagtgaaaaaaagtcagatataataagctactctatgattccatttatgtgacattctggaaaaggcagaaaatagatcaatggttgt

SEQ ID NO: 2046 - DNA, 4001 bp, Homo sapiens
agattaatatcctactctcaagtagaagagacggcaaccttcctttcttaaatcctctttctcagtctcctatttatacctcaaaggactaactgggctgggaggaggaagggattctttggtaaggaggaatagataaatacagctggaaaggtttttatttgaatattttagggtttcatttctttgggttttttcttttttaattggcaagtaaaaatttatatatttatggtgtgaaacctgatgttttgatatatatacacattgtggaatggctaaatcaagctatttaacatattcattaccttacattcttatttttgatggtgagaataaaagattgtagattttaagaaactttctatcttcttagtttggaggactgtgaaatcttgtgctgttgggagattttagggcttttgtattctctttatcactctgatttttggttcggtagtgcttcaatttggaaagtatcttctaaactaaatgaactagaggagccaggaatcagtactcaaaaaagcagaggagaaagcaagctgctacaagaaactcaagggaaacaagaaaagagaacttcagggtttcagcccaattcactaaataggaaagagggctaagattcaagatcagtgttggaactagtaacaaatattacatttcatgatagaggtgcaaaaataatgaaccacaggtatattcatgatctaatgttatgtaacctattacccccaaattttagtggtttaagacaagagtaagcatttattatatcttatggtttctgtgattcaggaatccagaagcagcttgattggatagctctgggtcggggctatcatgaaattcagtcagatgttggctgaagctacagtcatctgaaggcttgacttggttgcagggtctgttcccaagatagatcactcacataactagcaagttgttgctattagcaggaggcctcagttcttcccacacagagctaagattcaagacttctatgcaagtcaagaaatacacacacacacacacacacacacacacacacacacacatagtgaagtctgaatataaattaggaactgagctcttcttctctctccataggtatatacatatacatacatatacctatatacacatagatatcctggagaattatttagagagagcaatatttctacatcagctccctaggccaagtaaggtgacccaatggacttcacttttctaaaaagtgcagttatacttatgtatcttctcttactattcatcaaaataccgacaatattttgggctgaaatgttaataatatctgtatgaacctctgcttcaaaaaataatccaagggatccttgagtatttttaaaacatggcatctggtttccccaaaatgagcaacataagaaagcaaagaatacaaaagaacaaggcagaagccatagtgtatgtctttatgatgtagttttctgctgtacagtactgatcacatggtcagctgtgattcattttggaaggggagtatgaacaggtgtgaataccagtaggtaaggattcctagagatgttatcaacatctcagcccgaaatattgtcgatattttggtgaatattaagagaagatacataagtgtaactggactttttagaaaagtgaagtccattgggtcaccttacttggcctagggagctgatgtaaaaatactactctctttaaataatcccccaggatatctatatatatacacacacacacacggagaggaagtgctcagttcctaatttatattcagacttcactatatatatgtgtgtgtgtgtgtgtatttcttgagttgtatagaatacgtacttatgaataacaaacttgaccaattttcctacagacatagacttcttgcatttagcagtatcactcacctcttactccatcatttcttcaataactccatcaacactgaaccttctaactctaacatgctacgattcactactgtgaaaaaaaagctgatgtcataaacacattgtgttccagtatcactaagggccataccccattcttaggtaatccctgaggtcctactagccttgctagcctcaaaggagtcacttggagtataaagagggggaggagactgaacaaagtcctggagctatagtatattttttcattgttaatccttggcaaagaagtaggtagtttggaggtggaagtaggccatgattacctttaaaataatctactattatttgtgtctttcctgaatatcatagcaccttcttgtcacaaatgcttaggggaaagaaaatcatccaatataccccatatcccacttaccaacatctctacagtaaaatgagacccaagagcatgatttccttaactagctatcaagcaactacctccaacaaacagcagttatcattaatatgttcatgctattttcatttgtgaggtctgtaatccatcagaacaacctgacagtgattaagtaaaatcaaagagactttgtaaacatctgtgtgcttttattgttacaaatgcttcattataaaaagatcagtcaaaagcataaaagtaccctggtttaaactttttctgtgtttgaatgagaatgtttctcttggaacatgctcatatcaggcttccacttggcaaaatcacgaattggctgatgttgttttagaggctttctcatgtccccttccaaacatcactcttctccttctgtggacccctttctgttatctaggagcccctcatgctgccttccacattctgcctactgcacagtcatgttctggacccctcagaatccccctctaccattacaatatgtttttcctaagacttacttgcattgaaaggcttgccagggaagtgactaatcttatcatcttgtactaaatgttaaattaatcctcattctctctagaattgttttctaagcagggattcctagagatgctatcaatatctcagcctgaaattgcataggtattctggtgaatagcaagagaaaataacgtgagtataactggaccttttagaaaagtgaagtctattaggtcaccttagttggcctagggagttgatgtaggaatgctcctctccctgaaataatcttccaggagaggaatgtatccccaaatagcaagtgaatatccaatggcttctcattgcacttaaactctatattcctttttatgaccaaaaaggcctggcttctccctaactgtctcttccttacacattacacctcttccttttgtatgtgaatgtgccaagctaccacctcatttctaccttaaggcctgaagtgttatgttccagttcttggcatgcaaattactcttcatcacttgtttcccgacacaaatgccacctttccagacaatctaaagtaacctcaaaatcatttgctcgcacatcactttgttttatttctcctggtattaatcactatgtgaaattttctggttcatattatttgtcacctgcttcttccaggcctcctcttacttcattgtctatcatgttcattaccgtatccctagtgttttgcacagaatctggtacatattcagtgctcaataaatatgtgctaaatgaataaatgaataaattaacctaaacataagttttacacttaagtaattgagcaagaagtctttgttgtactaatattggaaaaggcaggggtgggggtggtgacgtgattataaccaatgtaaccagcttgcatttataagacttgtattgattatgaactatagcattttttcgttaaaaacattatcaatattggattgtaaaagattccattggcctttctgaaagactgtccttttgatgagatgtcacaaatgaatgctaatgtcccttgagaaatcctgccaacagatcttattcttctatcaatgttaagaaactgcatttctctttggccaatttctaggcttatggatagtctctcttgctaggacttcagaagc

SEQ ID NO: 2047 - DNA, 4001 bp, Homo sapiens
aaactacatttagtaaaaactgttcacaaatgtttatcataagaagaattttagaaactcatttttgagaccgggcacagtggctgacgcctgtaatgccagcactttgggaggccgaggtgggtggatcacctgagctcaggagttcgagaccagcctggccaacatggagaaaccccgtctctactaaaaatacaaaaaattagctgggcatggtggcgagtgcctgtaatcccagctactccggaggctgaggcaggagaatcgcttgaacccaggaggtggaggttgtagcgagctgagatcgcaccactgcactccagcctgggcaacagagtgagactcttgtctcaaaaaacaacaacaacaacaacaaaaatccatttttaaggttcccataaaaatgggtgaaagtggaatttaagatcataaaatctaattttcatgcacaaatacaaacattcgccagaccatctttactgtaccatatgaccatttactcggtcaaaaggaaatccactcatctccctggatcccccgaaggctatgcaaggggtccactgtgcttccagagtacagaggatgcttaaagtaacagattcctcaaactgtgttgtgggaagtttaagcggcaaatgattaataaaagtaatcaatgtcaatgtagtttgaatgcttacaatgatcctactacgagcggaaaccatttcctcatttctttcttctcgttatgaaaatgagctccccccacggggttgccttgggccacctcccttcctagggcgtatttgcttatttgtttatttgagacggagtctcactctatcgcccagactagagtgcagtggcatgatctgggttcactgcaacctccgcctcctgggttcaagcgattctcctgcctcagcttcccaagtagctgggattacaggcatgtgccaccacgcccggctaattttgtatttttagtagagatggggtttcaccatgttggccaggctggtcttgaactcctgacctcaggtgatccacccgactcagcctcccaaagtgctgggattacaggcatgagccaccgcgcccgacccctcatgcttctttctacccattctcaaaattcttcagtgaggtcctccaggaccaggaaggtgctctacggacttgggagggtgcacttaataggctagttactgaatcgtggccgtttcccactttgcatctccggcagcttgacccctactccagggccaacttttcccaaaagcccaggccaggtgcagcctgaacgtggctttcctccgcccctgactctgcttccctgtaagagctgaaaaacatgcacggctgtcactctagaaataattagagaagttgctgattgtcgagggcagaaggagctgaacggcttccacctcagcgcgttccccttggtgctgactcgctcgggaaaggggagtcctcggtgccctcgctaagtaaccctgggatgctgaggggcgttgccaggcccctggtcaacaagagggctcagccccacgcaagaggtgagccgggagcggatgacacctgcccaggtgactagggaccaggcctccggctcaaggagcgcatcaggagctggggccaaggccggggtctcctccccttgccagcaaggatgagagcacctgccatctggccggcaccctcccctgggcccgaggctcctgccctcggaggggcgagacgggggagctccgtggactctgcaattcatgagacttccacgaggaacaaaggtctccgtgccggcctcgggtcccggtctcggcgccctgactaccccggggcccagggcgcggcgccccggcaggcacggagccagagagcgggcggagggcgcggaggagacggtggtacctgtgggtggagacggcaggcatccctgtccccgctgggctgctgcctgcccggccgcggtcccggctgctgcagcatcacccggggcggggcgctgacgtcacggccgcagcctccgcatccgcgcggggcccggagccttaaagcggcgccgcgtctggggccccgcgggcgggaggggagcccggtgtcctcctgggcccttcccgcgggaggcccgtcccggtgcttcgcgcacgacggcgcggtctgcaggatctgccaggatcccggaggaaaacgtccccccggcctcacagttctcaccgttttcttctgattttaaaagaaataaatacattttcgtgtcttcatgtataaatagatacccatgtgttcgcggatacgtgaatgccgcagtgcgtgtgccaagcctgtgcccatgtgcgcagtggggcagccgggcctgctggaggcgtcgcgactctgggcccggagctgtccaaggcactggggatgccgcaagaacaaggcaaagttcccgcccctgggggaactttgtaatgtaagtaaatacataaatactttatgtatttattatttacttcattttttaaaatacagagaggcagggccttgctatgttgcccaggctggtctcgactcctgggctcaagtgatccttctgcctcggcctcccaaagtacaggtgtgagccaccgcacccggctgcatgacatttaagagagagacacacacacattaaacaagacataaaataaatggtatgtcagaagatggcaatgccctagagaaggggttagggagtgtggggctgcagaggcgctggccttgcaggtttctatcaggttgttggcgagtcctcacctggaaggtgacactagaaggaggatttgcggagcaggccgggcacggtggctcacacctgtaatccctgcgctctgggaggccgagaggggcagatcacctgaggtctggagttcgagaccagcctggccaacatggcaaaacccccatctctactaaaaatataaaaattagccacacgtggtgctgggtgcctgtaatctcagctactcagctgaggcaggagaatcgcttgaacctgggaggcaggggttgcagtgagctgagatcgtgccactgcactccagcctgggccacagagtgagactccatctcaaaaagaaaagaaggacctgaggagctaggggggccagccagactgacgtgtggggaaggtcacgccaggcactgggaagagcaagtgcaaaggccaggggcagaagtgagctgggctgagtccaataattacggatgaaataattatgcagctggtagtggaataataaccccagggaagcgctgcagagtgggggcacggggccctgtggaagtttaccgcggcggattccaccccattgggagggtcgagggctcctcaaggagccctaccaggccaagtagagagaacagcatgtcccacacagagggctcagagagctctgcactggcagagctccggaggggagagggcctggaggcacactgcaaaggaagtggagggggacagggatgcagaggcctgggaaggaggtgagggctggggaggtgggacaggcccaggtgtggcctcttaggcagttgccagtttctaagagcaaagagaagcctagaaaggttttatgtaggggagtggatggcatgaatcctattcacagttagcaaagatcataaagctcagagtgaaaacagattggagggaaccaggggaccacatgggcgtaccgggtggcacaggtgggagagttgggggtgttggtagagggagagaggtgatggactggccggggacttaggactccatgattgactgaaggtgggggggtacaggaacagcgagggtggtgctaagaagtttctagcttgagcgatgagggaagagagtggattcatggaggccaaagcaggtgtgtgctggagtgaatgccataggtttgctttgggatatgctgagcttgagggccttcgcagcctctaggccaccagacacttgggtctggagctcaaagatgctcctttatgagtcccctgcacatggg

SEQ ID NO: 2048 - DNA, 4001 bp, Homo sapiens
ctccaccacccagtggcctggaatgggctcaggagaccaccagggatcactgtctactcctcctcctccttcaacgttattcagggagccaggagggatggggaagttcaccacacactccatgaatacataggaaaactccccctaacacacacccactaaattggggcctgtctgtccacagctgtacattcatccacagctgtatttttatcttcaaactcattctgctgactcaagctgcattttctgagcactttcagaacaacagagtcctggctccacgacaggcctggtgggaggagataagggaggaatgagggaatgggactgatccaacagaatggcctgcgacctcaaattgcgtcccacttatcccctacaatatgctgctctatgggtttcctcaggcttcccgtctagcctgggcctcctgggccctcccactcccaccccaataggccagcctgtttcccaggcctcgggcaggtgagtctacaccaaggcggtctctgctctgaaaggagatctgctaagtgcctcaggaaaggtagtccgaagcccctaggacctcaaccccacccctgagcaaaggttccaggaccccagcaagggtcactgcgggccctggtcaactggcaatgcccggctgcagactccagggcagcaagacagcagctgggctattcttagtccctgctccaccgggaccgggtctgtgtaacagctgaagggcgagtcctcaccaggtacccaccatgccaaacccctccctacccccaactctggccccttggaaaaagaggaagcatagggaacacgccctggagtggggaaaagctgagcaggtcaagagtgtctgtcaggaagatggaggctgattcagaggtcaagggcaagagcaactcacaggactgcagtgcctggggggagcggaagactacaggaaggcctgacccgcactagggagaaagcatgcaggtccctggggcttttctagcaagcctgcctaggcccagagctctgagaagctgcacgggatgcctaggtaccaccacatcacacctgtttgccgtttgcagaactctgtccttccccacctgagacctgggaggcgaggagaaaacagcggcctttctctccccacagagggggaaactgaggctgaaaaggggacacagtaacacacacacacacacacacacacacacacacacacacacggtccagtcccaactctgtacccagagctcgccccagttctaagtccaagagggctcagtcccctttccctgtcttaataactcactcttcctcaagaaagccggcctgggcctgagcaccccgcggcgccgcggccgtcggctcccgtcccggctcccccaagtcccggactgtgcgcgccgcagtgactcatcctgcccctttccggtgaagcccagacaagagaagaaaataaacgcaactttccaaagaaaagtctgacacgggaggctgcaacaggagccagcggccggtccgccagccgtcggcccggcccggtccggcccggcccggggctccggggaggggccgctccccgcccacaccgccgccccgcctgggacagcgcgggcacctcctgcctgcccgccctccgcggaagaaagcacagctcagcggggacccgtgcaggcgccgggcactcggcacccgccccggcagagcgtgtgggacgcgccctcctctgggattcgcgcggggctcggcgcgcagcgccccggacggccacggcgcagccccatcccgcggggcgcaaaacacgcgacagcgcggagctcggccgtgcactgctgctccctttcccgcgccgggaccctcacccctgggagaggagggggcgcgctcctacctggccgaggcgcgcggctgtcacccggagccagcgcgtgcaggctggttccgcccccccttccttgccccccacgcgcgccagccggcggcttttaaatctccaggttactccgcggggggagagagcatgcgcgctgggactgccaggaggggggcggggcgaggcgggacggaggtggggggtgctgcgaggggggatagaggggtggggctggtacccaggggaagaaagcgggaggtctcgaagctggctttgtagccgcgccgcgacgggcagcccccgcgtggctcccagactgccctatcattacctagggcagggcaccgccccctctgtcgctcgccaccaaacatttaggtgaaagctacccggcttcgcggggcacctcccctcccctactcggagccagtctgctgcgaccattacccaggcgtgccattctggccacccgatctccaggcagagctgctccctacctgtccaggaccatcccttcaaaggagatgtcacattctctccgaattacccttctgctctttgctattctccgacgcagacagagctaactcaatccctctttctgcgctgaaaaccaaattccaattttttttcttcttaagagtgtgtacggggaagaatggatgataaattgccaatgaaatgttctctttgtcagctgttgagcaaggtccgaacagatacctgttccagaatgtctttgatggagtcccaggctggccctggggttgggggttggggggcagttttgtctttttttcctccatggagttttattgggtggagagaaatccaatttagttggattgttgacttgaatactacaaagtcccaggaagatgccttcgaaggggaagacctggttggccttagccaaccaggcactggggcactgggttccaatgctggccctgtgtcaacagccgtataacgtgggccaagtcccttccatgttctgggcctctgtaagagggggtgagccaaatgatttctaagggcaccttccagctgagaggtagaaggaggcagagaagaaagggagatagagaagggagaggaaatagtggcgccctggtggtagtggggaacagagagcaggtgccagagagagttgagaagagaaaaatcaagaatctaccttctgagtcactaaacaagtttaacttgaaaactgtctcagcgttgcctccctggagcagacacacctctacctggggaccctcctggagatggctttccaaagtctttggcataccctctcgtggcaagcagagagactagggtggagtccagggtctctgagctggtgtcccctctcctccaggaaagaggtcaggagtcaggggaaatttcaggtcagctggaaaattacagagccaggagagagtggacggtggtattttgcaggcttgggaaagaacactgggaacatgagagagttgtcgcaccacagacaagtaagagcccccctcttcctcctgcctcccaccacttctttccaggggcccttgtgctttatgccttatgacagggggatgaggaaggagagctcaggggagtgagcacacagcctggatcccatggtgatcctgggccctacccaatcaccccttcccaactaaaccaggtggatgcactggccaggccccacccaatacagggtacagtagggctctctgctctgaaaatccccctctttctgctgatgtagcctcatgttataataataatagttggccaggcgcagtggctcacgcctgtaatcccagcactttgggaggccgaggcgggcggatcacgaggtcaggagatcaagaccatcctggctaacacgatgaacccctgcctctactaaaaacacaaaaaagtagccaggcgtggtggcaggcacctgtggtcccagctactccggaggctgagacaggagaatggcgcgaacccgggaggcggagcttgcagtgagccgagatggtgccactgcactccagcctgggcgacagaacgagactccgtctcaaaataataataataataataataatagttaaccattactaattgtgccaggcactgtttctaaatactttgt

SEQ ID NO: 2049 - DNA, 4001 bp, Homo sapiens
atctccccttcctcgggactgtaagccatagtatttggctatgagagcctgactcttatctctcctacctccttggacacccccactcaccaagtcagccagtggtgagaggtacatgctgatggtgaagacactgcagaagaggcccaactgctgaagccgggcctcagggttgggtaccaggagccaaaagtagccataacccaggagaaggacccctagcagggttgcagtctgtaggagcacaacacgctgcaggggagagagtacccttacttccagatgtgcactctgacttccctgctagagttaattcatcctgccttctccagtgctccaatggggaagccaagctgtctaggcctccagcactgcactgtcacagcttctttcccaccaccaacttgataggaaagtcttatccacccacaacactggagacttctgggggagataaatatgtgtttttttctgtgtgcttggcacacacagtaggagcttcataaatgcttgtgtgatttagcagggacgcagagctaatcatctcattctcacccacaggccctggctctgaaagaaatatcagagacaaaagccctttccccttagcttgttggctgaagcccagggcaggcagcataggcatctcaggctaggcagagctaccagccttgcctaaatgggggcaatgtgttcatctcagaaggctggcttcatagaggaaggggacctgcaaggctggagaggccttcctggaaaaggtggcagtgccagctgttacagtcttctaggaaatagtgtttgccctgccagcaaggcagggcgtgcagcagataggtgggtccaagggagggcctctaccttccgagggcagtaatgcagatatgccaagatatacagggtctgaagcgcagcacccactgtgttgacgacgatgaggatcccgtctcccttcaaagccccataactcagccagcccaggttgctgcagggtggaggggatggacatggctcaaagggttcagtgtgagaggaggacccaaagggtctttcactctttttttttttttgagacgtagtctcgctctgtcgcccaggctggagtgcggtggcacgatctcggctcactgcaagctccgcctcctgggttcacgccattctcctgcctcagcctcccgagtagctgggactacaggcgcccggcaccacgcccggctaattttttgtatttttagtagagacggggtttcaccgtgttagccaggatggtctggatctcctgacctcgtgatccgcccgtctcggcctcccaaagtgcagggattacaggcgtgagccaccgcgcccggccaaacctctttcactcttgctcctcctgccccgcccccacctccctctggtagcctttcccactaccgcagccgtcggcccctcacttgacttccgtggtgagaaagggcaggaactggacgttgtccacactccgggtcattcgcatgtgcctgaggtccgagctgtaatggggccccgaagggaggggtgggggtgggaagggagaagcagagtgctagagggggatgcccaatgcctgtcatcctttccggaccaccgcagaccccgccccctctcccccccgccagctatcctgccttctccttcaggcctagtgaccagcctcgcccttgtaccccggtcccctcgacccgatcccactttgatcccggttccggacgagccaggtgctgtggccacgtctctgtcccctctctctcctttcctgactgcctagtcctccccaacccagcccggccgcactctcacaggccggcggagaacatgccaagggtgaagaccacgcatgctccgtaaatgagcgagtccagaaagccgcccgcctccattacgactagagtcggatcccgcgcccagcgcccgccgcgagcctgcggttgccgggacctactgcagcccagacctgcggctctggagccccgccccgcgcactcggctccgcccccgcacgctcgggccgtccctccggaaactgcgccgaagccccaccctccctccgacgccgaaccggaactcgcgcccctctcctccgagcgccttcccagtaccctggtccagacctcttccatgtcccggtcagtccccttcctagggctccgcgggtgtgtccccgatacctgccgctgctcacactctgcctaccccttggatcatctagacgcccccagtctcaacgctcgtgttcccacaggcctgtgcgccttcggcggtggacctccaaacaaaagcttgctagtttaacaagacttcagcacgctttccatccagagctccacatcagaacctcagttgcccagggtttgggaagtttttttctggagtgtgctgccgaagctttttctcaaaataacacattaccaggaatcaccaagccttcctcttttgccctccctctcgggtcaactttacatgacgtggccaatccactgacgcctctatcactgacccccggtccaacccacttgttactgggaactttccctcccagcctcccacacgtctctgctagtgtggctgtggggcggggccgcatgcctcagctggcgttcccagcttccctgactcaccgaaacagcgtgagtacctgaatggtagtatgccaaagccctgcggtgacggagtgggagtggggtagaggtcggataggaagaacttccagagtggagtgcagctcagaacccgagagacagctgtcaggagcactccggtcctggacagccctcagaggaggaaacatcccacccttttggcctcgtgaggggcacacattctttggagagaaagaaattcaaacccagttgctactgttgtagcacagagagcctcgcacttagcagggactcaatggtcatatgttttaatatggagtggcagaaaagcatgtccgaaaaaacacattgctttattttgagacaaagaacattgtataaaaaaactccagttgtagaaatcaggacagacacacagcaacttatatacagatactatacacgtgggccctgccctttaggctacactctaggcagaatgtacacatgggcactgcccttacagctacactctaagaacaggttggcacagcccccctgctggcacagctctggggagtgctgccccaggatgggagagaatgcagtacctggctacaaacttctctgtggcagctccacagatgaggtcttgctgggagatgctgggtcagcccaagcatgctgcctctcctgtacctggcttccaagcaagaaactgtttcttgcttttccttcagtcagttcatctgggcatcctggctctctcctggagggggcatctttgacaagctttgcccatccacgtggccccttccagctcagctcccactgtgccttaagggaccatgcctgcacagcttgtttctttggcttaaaggcaggaatggtgggaaaggactgtctccacttctttctccatccctccgaggtgaaggtggggatggcactgtcgggctggttggcctccttccggttgaaaaccttaatactgacccgttttgaggctgctaggtgatagcttatgcctgtggtgggagtggttcccagggctgggggctctgaaagtggccccaagacaggtttggagtgcctgtccctctcttcagcctgtccctctttaaggccaggtgtggcatacaccttcacggggtttgcagcagcagaagtggaaggagcagcacagtccaggcaagtgggaagaggcgtggggcagcactgtgaccgatgctatgtagaacccgcacctctgggtcatctgcaaggtgagagggcaaaggccaccagtgtgagtggctccactatttgtactggctctcagcccaacaggattccctcagcctcagcctggtaaaggagccacctcctgtacccaacctcttcaagcagaccccttcctgt

SEQ ID NO: 2050 - DNA, 4001 bp, Homo sapiens
tttctgtgtgcttggcacacacagtaggagcttcataaatgcttgtgtgatttagcagggacgcagagctaatcatctcattctcacccacaggccctggctctgaaagaaatatcagagacaaaagccctttccccttagcttgttggctgaagcccagggcaggcagcataggcatctcaggctaggcagagctaccagccttgcctaaatgggggcaatgtgttcatctcagaaggctggcttcatagaggaaggggacctgcaaggctggagaggccttcctggaaaaggtggcagtgccagctgttacagtcttctaggaaatagtgtttgccctgccagcaaggcagggcgtgcagcagataggtgggtccaagggagggcctctaccttccgagggcagtaatgcagatatgccaagatatacagggtctgaagcgcagcacccactgtgttgacgacgatgaggatcccgtctcccttcaaagccccataactcagccagcccaggttgctgcagggtggaggggatggacatggctcaaagggttcagtgtgagaggaggacccaaagggtctttcactctttttttttttttgagacgtagtctcgctctgtcgcccaggctggagtgcggtggcacgatctcggctcactgcaagctccgcctcctgggttcacgccattctcctgcctcagcctcccgagtagctgggactacaggcgcccggcaccacgcccggctaattttttgtatttttagtagagacggggtttcaccgtgttagccaggatggtctggatctcctgacctcgtgatccgcccgtctcggcctcccaaagtgcagggattacaggcgtgagccaccgcgcccggccaaacctctttcactcttgctcctcctgccccgcccccacctccctctggtagcctttcccactaccgcagccgtcggcccctcacttgacttccgtggtgagaaagggcaggaactggacgttgtccacactccgggtcattcgcatgtgcctgaggtccgagctgtaatggggccccgaagggaggggtgggggtgggaagggagaagcagagtgctagagggggatgcccaatgcctgtcatcctttccggaccaccgcagaccccgccccctctcccccccgccagctatcctgccttctccttcaggcctagtgaccagcctcgcccttgtaccccggtcccctcgacccgatcccactttgatcccggttccggacgagccaggtgctgtggccacgtctctgtcccctctctctcctttcctgactgcctagtcctccccaacccagcccggccgcactctcacaggccggcggagaacatgccaagggtgaagaccacgcatgctccgtaaatgagcgagtccagaaagccgcccgcctccattacgactagagtcggatcccgcgcccagcgcccgccgcgagcctgcggttgccgggacctactgcagcccagacctgcggctctggagccccgccccgcgcactcggctccgcccccgcacgctcgggccgtccctccggaaactgcgccgaagccccaccctccctccgacgccgaaccggaactcgcgcccctctcctccgagcgccttcccagtaccctggtccagacctcttccatgtcccggtcagtccccttcctagggctccgcgggtgtgtccccgatacctgccgctgctcacactctgcctaccccttggatcatctagacgcccccagtctcaacgctcgtgttcccacaggcctgtgcgccttcggcggtggacctccaaacaaaagcttgctagtttaacaagacttcagcacgctttccatccagagctccacatcagaacctcagttgcccagggtttgggaagtttttttctggagtgtgctgccgaagctttttctcaaaataacacattaccaggaatcaccaagccttcctcttttgccctccctctcgggtcaactttacatgacgtggccaatccactgacgcctctatcactgacccccggtccaacccacttgttactgggaactttccctcccagcctcccacacgtctctgctagtgtggctgtggggcggggccgcatgcctcagctggcgttcccagcttccctgactcaccgaaacagcgtgagtacctgaatggtagtatgccaaagccctgcggtgacggagtgggagtggggtagaggtcggataggaagaacttccagagtggagtgcagctcagaacccgagagacagctgtcaggagcactccggtcctggacagccctcagaggaggaaacatcccacccttttggcctcgtgaggggcacacattctttggagagaaagaaattcaaacccagttgctactgttgtagcacagagagcctcgcacttagcagggactcaatggtcatatgttttaatatggagtggcagaaaagcatgtccgaaaaaacacattgctttattttgagacaaagaacattgtataaaaaaactccagttgtagaaatcaggacagacacacagcaacttatatacagatactatacacgtgggccctgccctttaggctacactctaggcagaatgtacacatgggcactgcccttacagctacactctaagaacaggttggcacagcccccctgctggcacagctctggggagtgctgccccaggatgggagagaatgcagtacctggctacaaacttctctgtggcagctccacagatgaggtcttgctgggagatgctgggtcagcccaagcatgctgcctctcctgtacctggcttccaagcaagaaactgtttcttgcttttccttcagtcagttcatctgggcatcctggctctctcctggagggggcatctttgacaagctttgcccatccacgtggccccttccagctcagctcccactgtgccttaagggaccatgcctgcacagcttgtttctttggcttaaaggcaggaatggtgggaaaggactgtctccacttctttctccatccctccgaggtgaaggtggggatggcactgtcgggctggttggcctccttccggttgaaaaccttaatactgacccgttttgaggctgctaggtgatagcttatgcctgtggtgggagtggttcccagggctgggggctctgaaagtggccccaagacaggtttggagtgcctgtccctctcttcagcctgtccctctttaaggccaggtgtggcatacaccttcacggggtttgcagcagcagaagtggaaggagcagcacagtccaggcaagtgggaagaggcgtggggcagcactgtgaccgatgctatgtagaacccgcacctctgggtcatctgcaaggtgagagggcaaaggccaccagtgtgagtggctccactatttgtactggctctcagcccaacaggattccctcagcctcagcctggtaaaggagccacctcctgtacccaacctcttcaagcagaccccttcctgtgccccaggcccagtttgctccagctacccacctgctgcaagtctcttctcctgtggattgtcatgggcctgaggactgtgagctgaaagacaagagtggtagtagatcaggtactgtatcaaagaggcagagggctgtaagtatgagtgggctgggctgcaagacttctataccatcctagatcactagaccgcacccagcatagagatggaggaaggaggcccacagggctctgacactcactgattttgccactgacagtcaccttcaacctcaagcagcggtcttcatgctggtggatgggtttggctgcaagataagcccacaggggttaaataagaaacctttgctggaagaaaatgtaagtccaaatgcccctcgccctgctttctcagctccctactcaatttcattcttctcttccctctaaccttgattcctaccctccttagtttttgctaacttcct

SEQ ID NO: 2051 - DNA, 4001 bp, Homo sapiens
tctctgaacctctgccctgccccctccccgcagatttccttcccctcggtgcaggcactgtggggacacagagggtgaaaactgaggcagaagagagctgcctgaggctggttccacagtttctaagcgatgtatcttggcagagtcactttctctgtgagcctcgccattcatctcccagggccagtgcgaagagcaaaggaggtaacggatgtcacgtgtgtgaagccattgattgtgcactcttgtccccttatccttccctccccaaagtgcgctttcagagtatgatttgttatcacctccttagatgtgtagtgctcaccctttctctgagctgatcccctccctgctcccagctgagctcccacactggaggcgggaggacagagagggctgcagtttgactgtgagactttgagccctgagtagagttatgggtactgttttggagtttcccttgccctgggttgaaatcagatcacgccactgagccccatccaggacctccctgtcttacaccagtaggtggtcagttagcagcctgttggaatattctctggagatacagggtgagggcagggcagtgggtagggaaggatgaacttgaagcagctattcagatgcaaaagccaacagttctctgactttcccctaagggaaaataatcagtcacgagggagtgataaatatgtgtggggccttgtgcttgttaagcttttgcttgtattttccttgtcagctctgatcctcttggaggccatacgagcaaaacagatccattttacagatgtgaaaatggaggcccaacattggaagcaatttgtccaaagtcacagaggagttggtgcttttctcggctggccacttccaggagccagtgaccatctgttagcccaattcttcctcacaccagcactagaaggcagggactgttcacccccctttatagatgaggaaactgaggctcagagagggtctctgacctggccacagcctaggaagtgaccatctgggacttgaatcacagcagagtctaaaggtgctcacacttctgtggaatgcgtggtgataatagcagccatttattgcctgctgatcgggcaccaggcaccgtgccaggtgctgcagtatgtcctgttgctgaatgatcacagcatagtccttattctcattgttcacctgagaaagctgataggcctcatatgttcccagggacatgaggctctcattgttgcagctgggacctgaactcaggtttccctgaccccaaagcctggcccctgcctctagcactgaggctcctgggaacaatggagaacagaggaaccttggaataagcctggcacacttccctgagagcacatgagccccttctcatttagaaatcaccttagccaagatgctaacgaatgcaggactgaggtagggccaggggtcaagagttctcagagttgggggccttggggtgggaagaaggaaggagtgaggctcagggcaaccagggatggttggggccaaaggcagcaggtgctcagagaggagtcaggagtcgggggcctggtctgcctctgactctctgtgtgacctcagaccagccacacccctctctgcccttctaaaaatgaggagatcaggagcctgattcctgaaggcccttccttctcagccacatggttctatgatctgcttctttctgcctagccctgccccagctccacagccccacccaagctgagagaccactactacctcccctgctagccccagcctcagggcccacttacccagatccccacagcaatgacgaagacaaagtagatgaccaccacgctgatgtcgtaggcgtgcagaccaactctggagtccagtgctatgtgtggagctgtctcagtcctgaccccgtcccctgaagctccaggccccattgctgccagctccttgctcatctgttagtgttggtcaacagcaggctggactttgaggcgctcctggcttcattcctttcctttaatgattaaactgccccaagcaccattagttggtgagaaaactctgagccctgctggcacatacagtcctgcctccttttctcccaactgccaccaccaacccctgcaggactccttccttcctcttccttgctgccactacgtgcacacacatacatgcatgtgtacacacaggcacacacatacacgcaatctccctaaccccagatgagcaggaggagaaaggagggggaggaggaagaggagaaaaggagcagaatattggaaccccagaggtgggaaggacttcagaaatcaaagtgttcaaactcctgtgtggtgggaaaaccaaggcccagggaagtaaaggtggagccgggactggagtccaattttcttaagagttcaatacaattgtcttttacctagtgagaggaagacaaggggaaggaggtgaggagtctactgtgaccctagcaaagtggccaccacctcatgtactcccattccaacctacctagatgttgctttctctttttatatagtgtaggaaactgaggctggggaagacatcatcatttattccaaggaactaggcagggccatctctgaaaaggcagagccagaattcacatcttctgatgcctgacccatacttcctattctgtactgtgacagatgaaatggttgtggtcaggaggccttccctgaaaaagatacagtgctccctgggtccagggaagaccatctctgggactcaggcagcctagatttcagtcccagctccacctctcactgaactacagatgcccttgggcaggttgctaaatgtctctgggcccgggtgtcctcatcagtgtgacctgtgccctgcctgcctcacaccaccaatgaggctaagatgtgctcctgagaacctctgcaaaccctgagctactgaatgttcttggggttaacacaaagaaaccaacatcgaccaccatctagccaaggggcccagatgccacgcacttagatatctgctcacatggtccttccaaagtagctgcatttggaatatttcagtcttacaaatattactctgcatgcatctgctgtagggcccagactggagcagcaggaaaacagatctcactggccctgtcccacaccccatccccagctctcactggccctgtcccacaccctatccccagcatcttataagtatcccaaggctgggtgtgaggaccagatcctcttttttccccttttggtggaaagaaaagtgagaggcagggtcctaggccttctctccccagttctcctatcccagaacatcaggcactggccaggctgagccccgaggagagggatattgatctgggagagaggtcagcatagtccccagctggacagggctctgtgggatctagcacctgttaggattagataccagaggaagagtccttcatatacacgtttaaaggcaagtttatcagacgaacagggatgcaggaggggcagcattagaaacatcaggaaaatgtgatggaccaggtgcccagtggtccctgggggtgagctggatacagggacagtggggaatgaggctggcagatctctgggtgttaatcagggagcagggaaggagtggtctgagcttaggcctctgagcacaccatagtgagggctctggatccggatgactcttccagagatgggaaaaggaatgtcgcagggagaagacagctgagtcttgtacttctttctatgctccccacaaggagccccctcacccagcccttggggtttgctatagtttggatgcttgtgttgcttccaaaattcatgttgaaactgaatccccaatgcaacagtactaagaggtagggcctttaggagtgattagcccgtgagggcttctccctcatgggtgggatcagtaccttataaaagggctaagggaactagccaggcccttttgcctttttaccttctgccatgtgaggacacagccacaaggtgccg

SEQ ID NO: 2052 - DNA, 4001 bp, Homo sapiens
tgcccacctctgcccaaaacacttgggctcaggccattcctgctcacgagtcctgctaaagaactccaatcaactcacaaacagctgacacacgactctgtgtgtgactcaggccaaacaaactcactccaatcagagctggtgggcaccatttgcctcctgcactgagtcaccctccaggctgagcttcagggattcgctgaaactcaaccacctacttagccacagatgttccattggagaaaaatccggcagtggagctaaagcctctgacggtcctcgtggatgagccatggccaaggacaatcaggtgtgacctcaaagctcttcctgcccaggtgatgggtccgcctcacagagccatgggataatgtaagcacagaacgagacacaagaactccccactgttaacctcaacacactctgaccttgttctccagacatcagtgagcgtgtccagcaaggccttaacagttaggcgctaactaaagttttggccgaatttttttggagccattacaggattgtctttgttcctgaagttcctgttaacaaggacaatgcccggaaaagaatcttcctcctcattaccacttccctgtctccccaacccacccccatctgcctcaagttcacagctgaattgcccaaaggtagctctggttagaaatctcgtaatccaaaaggcctgttaaagtatttcttaaaaaaaaaaaggaaagaggaatggcatcaaaaaatattttctaaagccaacttgacagggcctaggtcctgtaaggtgaatggccttgggatttctgaatttgatttctgacagggctgtctgggctttaaaaggaaacatcacgcttctttccaaggcagccgcgcccctggggagcggcccacccatagtactgcgagcatccagcatcgcttcagagcacggcgcacacaggcataaatgcagcagaggcctctcgacccgccaggacggcgccccctccagatgggcaccacacgcacgtcccctgtctcagccattccgttccccagatgcgcttcccacgagggaggaagggctctctgctagctccgaatccagcgaggaccagccccaggactgagaattaaatattcatctcgggcgtgacagttctgcttcgcttgccaatgttactgtcaaggtcacaggcctgaggccgagcggctggggctggggtctccagctgcgtaagaggctcccagtggaactgcgccctgggcgcgcagtttcaagccgcggatgggccggacaggccccctccggttctccgcgggcgcttgcctccgcagctaagcccaatttcctccggagttcttgggcccttctgagcaccagaagctgaagcccggtgtccaacccgtgcgtacgccgctggggaccccgatgcgcgaaggagagcgggccccggggctccgtcgccaggcaacggcggctggagcggcgagaggagcccgggacgagcgcagggtcgggcggatgcgggggcagcgccgcctcacaccttggtcctcagccctccctggctggggcggggccagaacagggaaagttgcagtggccggcccggtaaagccaggcggggcgcggccagcgactcacctgtcacgcgtgggtagtcgcgcagactcggcccgtgcactccggccgagcagctgcgatccccgacgggtcgcggacgcacagctcctcccccgggccacaggcccccggctggggctggggcgacccggagctgcgcgccggcgcacgcgactccgctcgctcctcactccctgcctcaccaccagtcccaacctggctcccgcccgccgcgcgctcggggctcaggggagcggcgcggggacccaggtcccacggcggagagagcgcgcgggattgcgaagactggggccgagtgccgccctccctgcgccctggcagcgccggctctgcggagcagaacggagctgggcggagcgctgcgcgcactgttccctcgctttccgaaaggccaccctggcggcggggcgccgtgacgcaggcttgactcacgcgcgggccggcgtcaatgcgaggctctcgggcagcgagcgaggctctgatggccgacgtaggcggagagggtgggcgtggggcgggagagggagttgcaagggggcttagcttcttgaggcccctggtcaggggatgcagaccctggagccctcgccagggcttctgccctcggagaggaatggggccccaatggttaaagccctcctggaccctgggcctcactttcttcttttcagactcacctcttttggccttctttaatgaactcaatctcaattcatgtggttatttcccctgccctagacatttccacctccgtgcttctgttccctttcctctagatgtccttccactcctccgtccttccatcctaccattctgcaaggccgttccctgtgcaggtcaactcttaggacatcactcatctgttgagcacctactgtatgccaggggctgcagaggctgaaaggatcacagacgtgagggaacctcctggagaggcagtgtgggttgacccaggtctttacagtacaaagcgaaaggattggagaaccgtacaagatgagtaaagtggggagacagtgacagggaaattctgactggtctctgagtaggcctcttggaagatcctggcctaaaggatggacagtcagaaggggagaaggatgacccctgtggagtggacagcatggcaagggcatagatgcaagagagtagaaacgtatgcgtggggtggggtggtggttgcctgagctggagcaggggtggggatgatgagaggtgaagttagacagggaggcaggagccatcctgccagggccttggggggctgttatgagagtctggatgaattatctctcttctagggaacactaagggggcctttggcatccaagggaggtgtttgggaggaatgggagatggaggttgtcttagtgaaaggtggtaagggccattgtcaagaactctgaagagtctgagattttacacttacaatctaagttaccctgccagtttcatggatgccatcagaagacaggaaactctgggccagacacaaaggactttaattactcatggcacagcaggctgcaagagcttcacattcagatcaccttcccttaactctgaagtcctatgggtgggacatgagactggaccacacacactgagaaactccaagcttaggaaacctcaatcttttataatgcgctgcaagcaaacttgcccgacatttgccttagacatatctttattatactggacagcaaacagaactgctctccactagagggagacgctatcgttggaggctgtttgctatgcaaccatcctctaaaagataatgggaacaaaaaagccatcagtgcctctgcccacaagacttgtgggaacacaataaacccatagagaattatctcctgatagaaaaattctttcaacaattatttagtgagcctaatggttactttacactgttccaggccctaaggagacagcaaaaaatgagacagataataatctctgcccttatagggtttacattctggtggaagcaaccagggaagcagatggggtggagtggcatggcaggaagtagcaagagacaggacagagatgaacaaatagaatgtgacaattgacgtggtatgggaggtgggaggaaggaacctatcagagataggcagtattaaggcaagagaacttacaggtggtgtggtcatggaaaggggaaggactttggagcctcatagatctaagttttcatcctgactgccatttactagagaccttgagctagtgacacaacctctctgaacttctgtttccgtgtctgtaaaatgaatggtacatacctcataaggttgttatgatgatcatgagatgattgttctaaaatatctgttattggccaggcacggtggctcacagctgcaat

SEQ ID NO: 2053 - DNA, 4001 bp, Homo sapiens
acccttgtctccacttccacctgtatgtatcctacccatcctcaaaacctatcccaatgctattatcttcatgaagccttcctaggtcctccccgttgctgtcagccttcctactgtacccccacgcttgccacacgtagcaattgaggcatgcttccttgtgcccaagtctggctccccactagatggagagttctaccagggcagaggcgtgattcttctgtgtccccagagccgggaactgagcaggtacagccgcagtcgccgcataggccaagtaaagggggcgttttctctgcggtccttggaaacacttgggcatgctcagtgtcgcccattagtccctagaaccagtcccctcacccactactctccaaccttctgatgctccctcactttggcagtctttaacctttcaggtttttctctttccccactcctcgccctgcagcctttatttcccaacggccgcaccctcacgctcctttcagcggagaaatagaccgcgctttgtgcggaagctgtcagcgagcaagcgtcccgtctcctttaagagtgatccgcgagggggtgtggcttgcggagagcaggcccgaaagggggtgcggctcctttaagtatccgccggcccgaggcgcggaggcctccggccggcgggcaggggcgcggtcggtctgggagcagcggcaccgcccgcagcgtcccggttcctcgaagtggggcgcgtccgctttaatcggggagagagatgtgggggcacgggcgttacatcagccgccacgtgtgggcctaagctggcgtggaggcggcggccccgcccccggcccctgcggtggaaaagtaccggggcgccgaggtccccgccccacggccccgcccccgggccggcaccggcccctcccggccctccgggcaagccccactctcccgcccggcccggccccgccgcctgctcgagatctgcagtggctgccgggtgcggagcgccggccgggggtgggctctccagggctgctaggcccctgccctcacctgcggccgcccggccccgccctaggtgtgccggtaatgagggttggggtggggagggcacggattcttcccagggtagcaacccccagagaactcccggctcgctcgcagtcccttcccaaagccgcggccagagcgcggacaaagagaggctgagtgcgccaggactctcccgcgcggcttcccgggtcccgcgggcgcacgggcactggaaccggcaccgggagggcagatagggaggcaggccggctggaggggccagataggcagccaggctggcgggcgctgagaggcgatggagcgagcgggagcccgcacgctgggtgcaggcacggccgactgtcgacccctgcaggcccccagagcgcagaaccactggctcctcggacggacagtgccacgctctggctccggcgctacccgcacagcctgcgcccgccgcccccgatcgaaccggcgtctggcgcccccccgccaccccacgcaggagctccccccacttccctctccctcccgcttcagctccttggtgacagcggtgacacccagacgcgcgcacctaccccgatctttgcggcgagacagacatcccggtgcgtgcacccacactcttacccacagatgcccgcatacatgcgcgatcacacacacacacacacacacacacacacacgcacacgctggtcctggggctcagccccgcggagccgccgaacactcagaccgacggcaggacagacggaggcgcgggccccagcgtcccttcccccagcccccttaccatgctgcagcccccggcccaggcgtgctgggtccgcaccgcggtgcgcccaggtggctttcttaaagggaaagttgcatcagcctcccgaggctctgtgccgcgccgagttcgcccgccccgccgcgccgctcgcagctcttccacagcctgttgtgttttggtttcggggaggcgggggctaagagtttggtgaaagtttgaagagtggagaaggcttgggagatctagccaagtccctcccctacccgaacggctcccctggccgtcctcccctctccatcccatcccctcctcccgtgccgacttctcaggctcctcctcccagggaataaaattacaagtctctccagctttcagatgattgatccccacgaacccctgggagtgagcgccacaaaggagtccccttctccgcccctgcctcgctgccctccagctggggcccttgagcaagcagatgtgggccccttcgggctaggctggaatgaagccagaaggcctggggcactatggggggctgaggctggagttagccctccaggcccctggccttctgcgcctgcgtttcccctagagagaagtcagagcaaattccattccctttggagcagagccgctagagactgtgggcattgctgggtaaggcctaggtcctactccttggaactggagggctcggggtagccctttctcaaatttccctcctggaccaccggcttggtcagctctacttttgaggtggtgttacaggggctgcagacaccaacctgggatccctcctccttccatggtgagacagacctgggttacaatctcagctaaaaaagagtctttgccaaaaggagcatggtgagcctcggtttcctcctctgtgaaacagagagaaggggctaaggaaatgcatgtgtgtgtatataaagcccattgctccaggctgcctctggggagtggtggctggcatttggaatgagcctcccacatttgcataccttgtgagagccaccacctttcatggagagtggccagttagttctgtcagaggaactggtttttgccccaacctgagtagggcatctgctcagggaaggggcccagcccacagaggcaatttctactttggaccctgagtcctcaccattttctggccaggaaacagtttaatttttttccttgggacagtcagcctccaagaagcgagtgcacacatgccaaactcacgtgaaaccaattgttgagtgagattccagtttattaatttatcagaggcactgaacaagataacaggcatcaagcccaggcattccctgaaatgcgagctctctcaggccacacgcggtccattccacaaaccttcctcagagccaaagtacaaagacagctctctgttgtctcctattcacattggactcctgatcagatctgggaagacaccttagtcttatcagcgagattattttcacttttactttgtccccaaacctagtaggtatagcatgtttgggatttttagtctcctacaagccaagtgcaggtgtttcttgcgtgagttgtgtgcacacacacctggatctaggcaacctgttgtgtctgtgcccccagacacctgagccccgattgtgtatttgtgtaggtacatctgtggaagactgattgtgtgcactgcagcaggtctgtgtagttatgtgtgtgctcaattcctgggactgggcagatggggtccaagccctctatatctctcctgccaggacgtaacttcctccataagttttttttaggatcttcctccttgcctcctcgctggggctcatcaaaagggataccaccccagggaaggcagatggaggatgtcgaagaggcccccaagtagaggaaggcggacaaggaagagtatgaaggggaaaaggcctccctccttctcccttccagcagtaggctggggtggggacaggcctagaagagggcactgagcgctaagaacactcagtgaagattccgagagttttcatggctcagggaatccatatgaagggaggcaggtgtagggtgctgcaagccagacttccaggatgccctcaggcctaggggcttggggcctgggctgttagaagagaggaggatgggtgctcaggggccagccctctgaggctccgtcagaaagaggaaggcttggggactaacctaggga

SEQ ID NO: 2054 - DNA, 4001 bp, Homo sapiens
ttgtgagcttccccctcctgctctgggtggacactgaggaatcctggagctgccctggatgggcgggcccctctgggacccagcaggctttgtgtttaggactctccagccccagggtttgctcatgggatgaagtcccatccaagacaaactttatggaggagaatgggcaagacctcacatcccagactgactttgagccaaatcagatcactggcaactttctctaagccccaatggggaatctagacagaacagccattacagtaaattgtggctgcctcagaagaccccacgacctccttccggccaggcacccctcagtttttgttctctcctatcagtgcagggcccagcctggcccacaggcagcacctaccctgcaatgacagaatcttctgtccttcacctacatggcactgagtaggggcagagagacccagctgcagctctgatctctggcctcagttacctggatatgggagagtctggggccggggtggaggggcagaacatgggaaaatctcccccgggccgagcagcccccagtggccattcatgcctcctgcctcaaggcaaacctcagagccatctctgggcacctctcaggactccaggtgccttcagagtccaggccttcatatagcagatgagagaggcaagaatacgccttgtgcttatccattgcagagccctgactggcagcaagggacctgccaatattgtgggctgcagacagatgactggcacccccaggcatgccgggctccactccaggccctggggtgagtgatggaggaccctgggtggaccctggccagctcctcgcttcccaccccagacaagcccaggagggaagactggaggcaatggtcatgtcctgtgctgcagcggctgggggcggcgtctaccctcactggctagcagcaggcaggcactctggaaagtggctttggttcttgaccctagcagtactgaggcttgagggcagccctgcgtactgttcctcccagacccatcccacatcgcctcagaggacattccctctcttgccttttgaaggtcaagtcaggatgtcctacaggggagaagtgtagctttcgagtctcctcaccctcgctgccatccgctgacatctccacccgtccccggcgtccagggatgaggacacaccggctcccagcccatgcgggcacttgccctggaccctggaaaatgttctgtggggtctctctcttcccagctgagactcttgccccatccccttcccccaccccttgccactgaaaccatgtaccacgttcccctgccccctcacccactcttcccataggagtaactgccgtggcacagacaatgaggctgtattgattagtacaattcctgggcacctccggcccgtctccccgggagctaggacaatgcagctttgatacacagagcagattctcagcaggtccttgggctgggggagccctcacacccccactctcctccccctcacccccaccacacagctaactcttcctacactcctttgcacagttgcaactttctgggtcactttggctggtgtctgtcttgcttgctggctgtgcctgcccctccctggcacagaccactcagcccctctccccatccgcagcccagcctctcagcctgcctggcaccaaggagggggctcaacttcctggaaggtgactgacctgttctggggaagagggggccacaggtccatgagccgcggccatcctggggcgagcgatcgcagcccgcgtgtctccgccgctcattcacacctctgccagctccagcgcgacactgacgcatcccctgcctctcccactgccgggctgggcagcgtcaattactttcacctcatctcctcccgaagctctgcctacccgctcccctggccctgcccctccggccagtccccatgcagcccagcacgggtgctccggagctggagtggggtgtgtggggtttgttgtgtttttcccttgttcccagcaagtaactggaacaacacacacacacacacacacacacacacacacacacacacagactggggcagagcaggcgagagggtggctcactccccccacggagctgaccagacgctgtctgagcccacaggcctagcactgggtgggctcctgctagggtagttgggtgtctgatgagtgacggggtctgccccattgggccctggatggtgaccggcaggaggatggaaggcacagtccacagggcaccaccagagcagctcaggctccacggaggggtgcgggctgggagaaaccaagccctagggctgtacctgacaccccccaccaaccagagatggggactcccaaactgccagggtgatggggcgtcttcctaggagaatgcaactgaccatgcaagaaagccctggcctagtgaaccacgctgtcagctgtctggacaaagatggcattagccaagggggcaagtcatcccagagtccagacaaagggggactgtggaataagaacccgtgaggatttgcaccgtgatgcccagaagctgaggtgctagtctgggagtgtgcgtggcgtgggctggtaggtccagtggtgtcgtcaccatgactatagtcaccactactgtagtgggatgccactcagacccatccagtccctttctctgaggccacacacactggccagtctcctgctgaccccaagatacctcagaccagtggctcggaaggtgggcatatgcattccggtgccaggaatgtgtcaggccctttggaaactggtcagtcagcagaaggcctggcttaccacaggacctcaggaaatatcagtcagatggacacgtgcatgaattctggtgtaagaacagctttcctgtgagtttggtgagtgtggcaaccccgtagggaacataaggagttttgtcaagcacaggatgacattaaaaatttaaaaacagggccaggtacggtggctcacgcctgtaatcccagcactttgggaggctgaggagggcagatcacaaggtcaggagtttgagaccaacctgaccaacatggtgagaccaaccccatctctactaaaaatacaaaattagctgggcgtggtggcacatgcctgtaatcccagctactcgggaggctgaggcgggagaatcgcttgaacccgggaggtggaggttgcagtgagccgagatcgcgccattgcattccagcctgggcagcaagagcaaaactctctctctaaaataataataataataataataataataataataataataaataaaaataaaaagacaggtggggcacagtggcttaggcctgtaatgccagtgctttgggaagccaaggcaggagggtcgcttgaggtcaggagttcatgaccagcctgggcaacatagtgagaccgtgtctctacaaaaaactggcaaggtgtggtggtgtgtacctatagtcccagctactcaggagactgaggagggagttttgcttgagcccagacgttggaagttgtagtgagctatgatcacaccactgcactccaaactgggtgacaaagtgagaccttgtttcaaaaaattaataaaaaataaattttaaaataagataaaaagtcacagcctttagagtttgacagtcctgggttcaaaccctagctttgtcagtttctcaccatatataaccttaggcaagtccattaacatgtcggatctcagtttctccatctctaaaacggggaaaccacccaccaatcattgaatctagtgagcattagtaataatggtaatagaaaatacatagtaagtgcttgctgtgggccaggcactgtcctggctcagcatacatgggacgcttgcttcacagacagcccatcaccctgtgggcactcacctagtatggtacaagttaacttcccatatcttaactcattgggtcctcccagctgtcccatgaggtaggtccattattatctccatgttggttt

SEQ ID NO: 2055 - DNA, 4001 bp, Homo sapiens
aaagtctcttcaggcctgaacatccctaggctcccccatctacctcatctacttgattgagcagcaggccagacagcaccctgagacacagccaggcagcgacctgggggtgagctggggtcagaccaagcctcaacctcctctactctccctccacttccaaaacagacttcagaaatttccagggccccttgtcccacagattctataaagtatggcattcctgggccggaaattgactcaggggctcctaactagcctggacaagcaaagctgacagataacattctggagatgaaggaaaggtgggaatatggggatcccctgtgttccaccacacttgtaagtttcctgtgcccaggtctccactatgcttaaactcctcaagcaggccaagtagaaatatactccatcctggaacacgctccagtgaagcctgtcataaattgcactggttgctgttgacagagcagaatgtgccactcgccagaagacactcctttctgtctcacacacagcggggtgcctggctcccctgggggtctggcccagccagaggagacttgccagtcgtggaagccttactgaagggacctaggatcagaggcatcccattctctaatcctgctctcttctgtgcacagtgctggctccaatcttgggaagcctcagatcacagatcagaagccacagaactggagcctgagaaggaccaaggtggcaggatggagactgcctactttatgggggtagttcagatccttactcctggacagcctcaaatggtgcgagatgaggcaagaagctcaccagtctggtggcggccgcagcatcggagcaaacgggacttacctatcttcatgaggcaggccagaaggatccagagggagatctcgaagggggtgcgcacgtgtgtgtagtcgatgcccaggactggaaaggccttgcgcggcttcatgccatgatcagtgacggaatgattaacagggcggctctctggggtgacctccggtggagcggtggtgacatccccaatcgagcgttctcgtggtggctctgagcttcgaatggtgctggcagttgggctgagctggaggccatggctcctgagaacaggcagcagccccaccaaagcaaccaccacgagtaaggaagggaagatccgatgtggagagaggccacagatgccagaccgcagaaccatggtgctgcttccagagccagcctcgaccttacccaaatgagagtaaaaccgggcacataggtagcaaagggtcagcaagtgggaagagagactggcgtagtctctaggaaaagttcatgttttagagaggcatttccatggaagcaattttctgggggtggagggaggctgggtttgcaatctggaactccaaagtggggaaagggggcaaggacccaggaacgaccacgaaaggagaccaaaaggtctggaactccgggcctgggaagggggaggacggatgtgggaaactgagccctagggatagaggaaggggcaggatagggatagtgcaaaggaaaggaagaaggaaggctgggacctttggctgaggaaagtgactgaggagctgggactctgggctgtgggctaaaggaaggggtagggagcctgagctaaaggaaggggaccgaagggggtgagagccagtccaggaaaaggagagagggggctgggagcccaggctgagaaggagtgaaaccgggaagcggccgggagcttctccacccagagaggggcaggggtccaggcgcgccgggctgagattccggggaaatggaaagaggcggaaggcaggcggcctggcgggaaggcgcctcggcgcgggctgggggcggctcgcggtgggccagcagcaacacgcccctcctcgcggccctggcgcgacgcggcgctccgccccggcccagctgcagctcctcctggtccagctccagaactaaccctagccccggccccggcggcagcagactgaagcctagctgagcccggcgctgtcacttataggcaccagcgagcagccggtgcggcgggctagagagaccgtcggcacccgcccagcgcagcggcccctgtcgccgagggaaagaagtatcgcgtaggaagaggaaggagagtcagagatgacaaaaaaaaaaaaaaaaaaaagtcctgaatatacagagaacctcactaacgcgagtaaaatgccgactacttacaaaacgatttcacgtccacatctgcagtctcataagggctttcgaataatcctgtgaagaatgtattattagtttatgtatttagttaccgtgtgaccttgagcaagttacttaacctgtttcacaactttctcatctgttaagtagagacagtaatagtgactatgtcagagggatgatgtaatgactgagacaatccgtgtaaactatttggaatgcaccctggcacattattacaattccacttttacagatgaggaaacaggtgaagagagtcccctggctactatgcaagtagttgtattgcttactagggctgccgtaacaaagtatcaccccaaactgggtggctgcaacaacagaaattgattgtctcacagttctggaggctggaggtcggatctaggtgttggcagggttggtttcagctgagagctatgagggagaatctgtcccatgcctttctcctaccttccagtggtttgttaggactatctggtattccatggagttctcctggtgtctctgtctctgcgtccagattccccgcccacactttatttttatttttattttttttgagatagagtctggctcttgttgcccaggctggagtgcggtggcgccatctcagctcaatgcaacctctgcctcctggattcaagcgattctcctgcctcagcctccagagtagctgggattactggcacccaccaccacgtccagctaatttttgtatttttagtagagatggggtttcaccatgttggtcaggctggtctcgaactcctgacctcaggtgatccacccgcctcggcctcccaaagtgctgggattacaggggtaagccacaacccccagccagatttcccctttttataaggacaccagtcattggattagaaatccaacgtaattacctcatcttaacctgaacatcttcaaagactgcatcctaattagtccatcttcataggcactgggcattaggacttcaacttcttttgccgggacacaattcaacccacaacagtggcatgctttaagtagtggaacttaaatttgaacctatagtttggttgaaattggtgaggttcaagggatcatggctgtacaatggaatcactggaaagcttttttaaaataccattgtctaggccgggcgtagtggctgacgcctgtaatcccagcactttgggaggccgaggcgggcggatcacgaggtcaggagatcgagaccacggtgaaacccggtctctactaaaaatacaaaaaattagccgggcgcagtggcgggcgcctgtagtcccagctactcgggaggctgaggcaggagaatggcgtgaacccggaaggcggagcttgcagtgagcggagatcgcgccacagcactcccgcctgggcgacagaacgagactccgtctcaaaaaaaaaaaaaaaaaaaaaaaattagccgggcgtggtggcacatgcctgtaatcccagctagtcaggaggctgaggcaagagaatcacttgaacccaggaggcggaggttgcagtaagtcaagattgcaccactgtactccagcctgggcaacagagcgagactctgtctcaaaaaaaaataaataaataaaaataaataccattgtctgataaaattagctgtgcttggtagtcctagctgcttgggaggctgaggcaggagtatcatttgaacctaggagtttgagactacagtgaactatgatccaccacagcactctagcctgggcaacaaagggagaccctgtcaa

SEQ ID NO: 2056 - DNA, 4001 bp, Homo sapiens
ccttcttggggttggggtgggttatttatcttccctgaagagagattacaccaaaagccataataaaatggacaaaatgaatgacatcaattatgtaaatcatgaattgtatgcctgggctctatttgtgtgtttgctcgcattgtcctcccctcatctcagatattttggtcaggttaggtctggccaggcaggcagtgtacagctcttcctcctccttgtgagcagagaatcttgacgacaactttatagttatacttaacacactgcatagtaattatgtgtttgccaatctctcccatgagagggcttcttgaagttaagttattcttcttacatgtctaccacactaccatgctcagcaaatgtcactgaatacaggaatatagaatagacactacttataattaaatgaagcgagattgacagtattcactcatgtcttatcgtttcaatgggccccttcttttgatgttatgtagttgtgatggctttctgcattgacaaaaggttcacagggcagaggaaagatgagtttcaaaaacaaccacctacctcccaaaacaacaatgaagcatacaagcgttgtgaaatgtttctcttcaacaaggtagtcagctggctgcccgcagagtaaatcaggtctgttactttcattttgtgcccagaagtaagaactcatttttgctgctgcttttccccagacctaacttgatggagtggtttggttattattgacactttcacttctgcatgctaacctgtatagcatgcaaaaagaacatgagacctaccaagatccaattcatccataccatttctacctaagattgtgccacactcagatctgaacatgtctcttcttgtcacagggcacacattaatacctcttgtcctaccccttgctccaagaacattttataggaacactaacagcagtgttagtgtttactccctgtactgttacatgtatatgggagagggggtgcattgataggtgcacttaccattgtaatgatatagtaatgtgcttgctttccccattggacagtgagtttctcaaaggccagggcccgaactttccttaaggctgtgcacatagcatgtggcacgagataggctgtccaaaaatatttgatgggctgaactatttgagggggaaggagcatggataaatgttatgctcccccttctctgttggtataaatcattctggaattccattttaccactccagccctaatatatctttttcttctctcagcacccttccaataaaagatggcaaatgggaaacaaagtcaaagttgagtcacaccagttaaggttgggggtgaggataagggtgaataacctgaaaataaaggaaaagaccaaggtttgatcatatgatgcctttgagtgaattagaaaaaggcccccttcctcagagcaatgaagcctgtcaacaaggcacatggcttggcatgtgactaccaggctggatttcagccccagtatctcacctcagctggtgctctgtgtaggatgtaacctgtgcaaatctatgcagtggtcctgagaaagatttgttctgttttatttttccttgcagctagccttaatctaaaaatcctagaggttcctcaagtatctccaataatatttaaggcttacctttggtcctttgttttgcaggtctacaggtcacaatgattctggtgtgaagcagaggatgggccagaaagagattcaaaatgctacatcttcaaatcacttcacctgtccctccagtagcccttcaggtccttggcatcttcaactcctgctatcctcacatgtaatgaccctcaaattaagttctacaaattacccagatcagagatatgttccttaaagattaagctgctttaaagttgaaattgagatgaaggctctcaaaatcccaaagaacaatgcacagttatgcgtctgtttgccagggacagtactaccaactgatatcacaccaaaatccatttccatgcctacttctcattggtttcttgccagcctgctttcgttctgattggctgcctacattatccccacccccaatccagaagaagccaagtgatctagttcttgggaagctttcattttttaacactcaagttacgtaagtacccacaactgttttaactgattttttttttttttgctgacattgtagaatgaattcatgaattttacaagtataatcaaagacaaccaaaaatttttacttttcccttcaaaagctaagtgtagtgtagctcccctgtagtctaagttagagaagaatactaacagcgtgtttttccttctgtgctcagcaagccttatctgtacttgctagtttcacattccttgaggctcagggagttcctgtttcacctccctagcgcagctgcaaagttacaaggttaatacagaaacatggtttcccagggatgtggaacacgtagcatagataaatgtaaaagactgatcaactgcctttgttctcgctcttgtaagtacgcttcctgcatcacgtagctcctggccactgactgcttaaaaggtggctgctttctttgtccagggctcagactttcctggacgctagtcctactgagccaggtgatcaccttttaataaagacctttcctgaactcactctgttcggtctctcccatctttgattgtcccaaaacaacataatagctgaaatagtcaaagatattaatgtagacagaatctccttctatatttttgatatatactctatatttcttatgccaacaccatctggctcagccctaaccctcttcaacacagtcttgtctcctctctaattctttttcagtcatactgtttcattttatttttctacctctccttccttttcaatgtttctcactcccattttcctaactcctatccatcattggtttccagtcctcaatttgaagaaacaatgttacccattcttcatgggaggacaaatgcatcccaaattccatgatgcctaacttatatacttcttgcctcaaatataattactaaaaacaaatacagtataaatattaaacaaatgaacaataatcatcaattggtgggttactttcaaggaagagttgttttgtgacaaattctactctctcattcctataccacattcaccaaggttgctgcacatcatcttcttgagggcaccaaggagaacatcacagcagtaagattacaccttcactatgtatcaagaaacctctggcaagtgagtctcaattcctacttcagactaaacacaattctaatcaacagctctatgactgtgacaagcaacattggtgcccacatactagctcctaaaatattctttatgacttccttttttgtacaaactgatgtggttcttttaagccactgagctcatccctactataatgccaaggactatgttaaaaagtaattggcttattcacaggccctctcctaagagacccattccttactcttccctcttctgcctttacttaactcacctcattaccaagttcactaccctcccgttcggatcttcaccttatctatactggctgtcaccttgattcctctcaaaattaagtttgactctctccttagtcaaactgatctcagcactactcagtttgagtaatgcccttccaggttctgcctagttcccatcctactgctgtcccctcaggctcactcggttcacctaagccctgcagctaagactcctgtaggttgaatttaagtttcgaagttcagattccccatggcctttagaaaaatcctcatacttcaggaaaagttggagaaaatccataaagtcagttagcttacacatagttctgaaagctaaagaaagcaataactaaaatatagaggtgatcaaattttttatcctttcccatggagctttttttttaaaaaaaagcaataataaagttatatttcaccattttttataaatccagctgaaggagattctg

SEQ ID NO: 2057 - DNA, 4001 bp, Homo sapiens
agccaccttgcagctcggtgggtggctgtccagctctggccacagatgcagggcttcctgggggcctggctgggcctctcatccctgccttactcttggcacagagggggtgttcatgtttgtcaattgaacaaatgagttgggccaaggagaaaatcggggcccctgtgtcttctagggtctcccaggcccagaggctggaatgtaaaaggacctaaggagaggaggtcccctcgtggcctttcttcacacaaacgtcgggcttgagcttgaggcaaactgtttttcccagagaaagctggcagtaccagccgcaagccatggtcatttgagtggcagcccccaagtttgcagatttgtccctgcttccccagagacacccctccatccccactctgcaggccactcccactcagaggctctcccttggggtgaggctttggagcttgcttgggaaaagtcccacttacctctctgtggctgaagggcccttgggcctcactcaatagcaggtccttcccacgggctgccagctccttgaggattaggtgctcctccagggccgtctgcaggcgccaggggagggaggccagggtgtccctgtggacagtcacctgcaccagtgcataggccttccgcggccgcctcaccacttcaatgtgctcccgcgccaccggcatctccagccgctccagggtgtctcgcagcaggcaggcaagcaccggcactgagaactgggggttcagatggcccacatagagagtgtgcgccgagggagcctcctcgaggtcagagtactccgtcagggactgctctgcgggtagctccggcagggactcctcaccccaggactccatgaagggctctgacacctgtgtttgcactgatctcttcatgggggtcatgggaaggctctccctgggaaggggttccaggattcctcactgctggctgcttctcccagggtctgtgttctcagtgtggcttaagggctcccagaggactcagggagtgtcccggctcctgggaggtacacagattggcagagactgggcagggccagagagagggagggcagagggcaagcaggaaagggcctgccacccacctgaggcctaggatgagaaagcagagtcacgtggactgagcaagacacagggcctgtgggaagacgggatctgcccaaaaagtggcagaagggaccagaactcaggtctctgagagctccaccatttcagtggccccaggggtcctgtcttccctccccaacccacaggctaggggcctcctaggtaccctcagggtttcctgcctaccagttcactcctgcctccaggcaacagagaaaacctttacacagggcctcctggagaggaggccttaacccaggactctgaggactggctggtggccccattgcagcttctctgcctgctctaaaaccccatgtgaggccatcgggggctctgaaactaggcagcgctggggcagaggcttttagagcagaggatctcacgctttttggcacactgatgaaagctatggcctctcagaaaaatggcctttgcatataaacataacttaaggtggctcctagaccctaagaactagtctagactgagtcctccatttttggtccagagagcagaggtcaacagggcagaacgagggttagagttggggccctagtgcccccgccccaagtccagggagcctctgtcctgagctgtgcacatatgtgcacacaccagcccctctactgctccccacacacccagcctgcatcttctcaaatggaatccttgaggcagttggcctgggggcattcaggtcaaacaggaagaggaggagaggagaggcctatgaccttcatgtcctggtggctcccgcgggagcatgggaggtgcctgccctgagctcccatagcctcccgacccctggccggtagctctcagggaacttggaggcttggcacagggacggccagaaccagggttataggaagtgggcggggcctgcacagctacctctgtgatctcatgaggttcaacaatgccttcttggccagccacaggcaggctgggtgcgggaaatcaaacaggaaaactcagctccctgtgggtcccaccacacactggaagcagacccagcggcccacccaccatgcagcttggctgtgggacacacttccccacttagtgatgtctcttcaggccccagttcccatgcaggtcacctcttgccacctctttcagcgctgctgcctaaagcctccacctccctctttagtcagtcaccaatcccaggctctactgagtactgacagggcccagctgctcccaagatggagcaggaggcacatggtaggctccagggctccccctgacgccaggcccttctctgtgctggagacagaggctgctgtccagaagagccctgaaaaataggtcaggcgtagctatctatctctttgggaagatgaggttgttacctgctgttggagaaaccaagacgtgggtgacacacagtctttatcagcacaggactgaccagtgctcatcattctgcagaaggctggcagcgcttgcccacactgcttctggaagccccaattgggggcagtaaggatggtgccacagttagatgcttcaactaagaaagctgtttgacagcgtagagaagctgccttccttgaaagcagcctttctgaagatgttaccaaatgtttgtttcctagggggtgaggcagtagtttgggtagagcactcaagaaaagaggctatggtgtgcggggaagagaggggcgcaggcctcaactggtggcagtgcgaggctctggggagagtgcattcggtgccctctccttgcccgcccgggcagcagccaggttgggctcggctttgtgtccacagctcttagggttagagaatgacggctccaagctccccctgcctcaccccctctccctcaagcctttcttgcctctgtcatccatgaggtgccctcacagcaactgaggctatagctgttttgagatggccaactcaagtcgtgttgaactgtgcagaaatagctgtccgggagaagcaccttgacagacgaaacacctgaacatgaccagaggcgttctccctacttacctagaggccttgctattgggtggctgttctgcatgaaatttcccaaattgacttgagtgcagcaactttccccactcttcctggcagtctctttaagccactgcatcacatatttctctggcgcctttaacagccttctgtgagctgaatcagttctacttctttttggagatgggggtaaaaattgtctttcatggtaagcactaaacacatttatgaaccatcttttaaatacataaatataagataacaaggttatttacggtgtctctggctctctagtattaggtaatagtattagaaagtataggtgctctgcaggcagcttggagtggtgggttcccagtggggggataagcagccccgttaaccctcttgctggatgtctgtgacctcactgacaaacctcatcttgaactgaaggaaaaaaccctagaatttaagcctctttatgaatgtgaggtggggcccaaagatgaggggcagagagctgagccgctgtggatggcctcttttcatgttatctggacagtgtccactgggtggcccacatggccacaatccctgaacccacagcaggcatgccatcccctcttccccacagctcccacttcacaatctgctgtttgcccaggaaggccagtcaaggggcagagggatagggaagaggaatgagcccagccaggtgcaggagagaacaaggatgatcaagaagagcgaactctggggagcagagttacaaacatagctttccaggtcctgggacccacatcactccagcctcccttggtctcaagccctcccctagcgtgctgcctccagcctgtagatccccacctggctctgacagggcccagcccc

SEQ ID NO: 2058 - DNA, 4001 bp, Homo sapiens
atacactcctaaaataaaccaaatcttccaatagacctaacagaagatgtaacaagaatcaagaagctaacctactcaacataaattgattctaaaatactttttaaaatgaattattgctaatgcaaaaattcaggaaagaagtctaggaatttgttttcctaatggcacattccatttatctgttggtagaggtcactaaaatacattactaggtgtctatgtatccctcccctgttctccttttataaccttattcttcaaaaataaaaggtaattaagtgaaagcatcaattaaatatgtccttcctttctcaaaatagataaatacgaatataactgaatctttgttttatagtatatgcccactacgctgtacggcaaacaaccatggcaaatccactgcattatgaacaaaagtaaattgtcgcccccaaaatataactatccatttcgacccaaccaaagggaaaataattttcccaatcctccaattatatgccaaaagaattagaaaatacaggaaaaaaagattcatagaagcttgtataaatgtcaagtgccaacatttcactaataaccaagatttcctattgtactgacttttaattgtatcaaatcatgaatcttctagggcacagaaaacaaagactaaatggttctgccaatttacaatgatcatatttcacctttagaagtgtaatcgccatggaagcaatgaattcatcgaattcatctttctctctccactgattaaacggatcctgcactacaggcataatcggctagtttctgccaccactcatacataggcctccaacgcactctacaagccagggctacactgcctagaaatccgcactgtgtcactgcataaggcagtttcccactgcacacatccagaagaataaagtcacctaagcactcttgtcagatcttagcaaggctgcaaaatgacaggagttgctaaccaaatagcaggaagcaaaaatcaccacctttaaaaatcatttaagcagttttcctttccgccatctcacttccctcctcctcctcctcgtcattctctctctctctctctcacacacacacacacacacacacacacacgcacgcacgcacgcacgcaatgcagttcatccccagctttgcaagtgacatgctgggagctctctctggacagccggcccagaactcattcagagccctcaaatacagacattctcacctgaacacgccaggcaacttccacccgcaccatcacctccaccctccccgacacacacagactcgccctcgcaagctctacccataccaatcccccagctgcagaaagcccagtaggctcactgcaagcgcagcacgcgttaccacttataagccgagttgggcggcctaagcttcagaaaccgcctcttcacgcagcccacccccaccaccccggcgcggctggacccctggcccgccaggtgggatgcgctacctttagactggcaatctgcacaaaacttgttatcctcctccagcagcaggttggccaggacagcctggtaccgatccacgtccttcaccgacttgcctgtcatggccagggtgccggcgggggcagagggcgacgcgccctcctcgcccccagagacccctgcctcagtccggggttgaggactcccggtcccccgcccaggggcacctcctgagcggggagagccctctcctccggccccgccggacgccccttcccgggtcgggggcgtccgtcccccactccgcagcccctcggcgcggcgccccttggcgggcttagggacaggcccgcctccaagagaggctgcggggccagagaccctcagcccaggcaaaggcggaccacgagcctcctgggtgccggacgcagatgaccctctggccggcctgtctgctggccttgcgtcccgcgcctcggtttccctggcagctgccgtcagctccgctaccacctccaccgcctacttccggcagctcttcctccccacctccaccctgcccagctcgcgcatgcgccccgcccccaccgcgccgcactgggctcttccttcagctccgcctctcgggaaccaatccgtggagaagcggggggcgggccttgggtgggggcggagggaaggggtgggcacgccccctgcgtgtccttggaagagaatgaatggagcctggtagaaagggagtggagggaatggaagaaagtgaaggaagacaacaactaacatttactgagctcttactatgcgctaggcactgtgttaagcgctttgcatgaactatcccaacataatcctcacaacgaccctatgatcatccttatgtaacctgagggttgttgataccccaaagtcctccagcttgttttttccaacagccaaatataagagtccaagcccctaacccaggatataggaacgtcaccccctccccacattttcagaggactctggtcacctctcacttggaatacctgctcccactaatactcattagctctcctctgtgactcctgcctttttggatattgtttggcctggtgcccagacagtttgtttcttcttccatttcttaaattctcacaaaacagcgagttttttgtggcagacttttactgaacgttatttgggaagggtgggggacagtgattaaagcatagcacacaacaggcaactccttaaaaatgattattaaacatcatcatccaaagccaccgttgctacagataatttctcattggctgtccttttccttagggatccacctgccatctggcttgtgttttcattcactcattcattcattcattcactgagcacgatgttactgagaaatttctaagtatcaggcactgtactaggggagagggaaacagcatgatccgatttgtggttttaaaaggtcactctggctgccatggaaataattaatcagggaagatagtaagcagatgctaagagttatctaaactctggtgaaaccctctcctccatttctttactttctcccaagaccaggatcccctcaaagctttcatctcatcagaggaaaactaaacatttctattactttattaatcacaacaattaaattttctggctaagcctcttcccttctagccatgcctaggggacttgacttttaaaaacacacaagttcattggggtgtttttcctcagaaaacccatccaagtaggtattaccataaccatttttcagttgaaatagacagtcaagattaactagttactgggtgtggtggcacatacctgtagtcctagctactcaggatgccagagccagagcatcacttgagcccaggagttggaatccagcctgggcaacacagtaagaaccacccctccaacccccaatgtaccccgttaccctgtctcaaacaacaacaacaacaacaaaacccagttaattgcggtgagtggtgattgtaccttagttcaagccctccccatcttcatctcctcactctgcaaatagccttcctgccttagtctaaatctggttaaattaatccttcaccgtgctctctagagggagcttttaaatgccaattctgatggactcacacttcctgcttaaaaaatcctttagtggctctccattgcctatggcagtgtttctcaaattgttcccacctagtgagagatctcatggctttgtggttaagcacacagactctggggcaagaatgcttaagtttaaatcttcagcttttaccacctattatctgtgtgactttgagcaggttacttagcctcttggtgcctcagttatttcatctatagaatgggaatgatgataacattaatagtacctatttcacaagattattatgaggcttagctgagataatgcctgtaatataattagaacagcccttggtagatagtgaatgatagacaattagcgctcttcactaaatatttctggcgttttgccttctgagcacatggtaggattttatt

SEQ ID NO: 2059 - DNA, 4001 bp, Homo sapiens
cccagcagtggaaggtaactagtgtatacttaggtgatgtttctgggaataaagaactatcaatcagtcatcctgtatcattattatcaattcaattccccaggtgacttcaggagggaaagaatgagatcctagtttggactttgttggctttgaaaaggacattctgccaacatatgtcctgataatgtcatcaccccattcaaagctatgtcactggaccccccaccatcaactgaactccaaacttctaagtatggcttaaattctcctgtgatctgggtctttaattctcattactcctcttctcacttctatacaccaagagtgacatcacttcctcttaaaactgtgtatatagatgccacttgtcatgttcctgactcacagaggaatctgagagagtgaatactacccacagagacgcacaggcctttttctgatttggggatgggatacagacagagggactcttgggtgtggtgagtctctgttccaactagaggacctcctgactgccacaaaaatcaatgtacacatatatcaaaacaccacattgtatactgtaaacatatacaattttcattgtcaattacatcgtcgtaaaaaagaattctttccagttggtcctgggaaagctatgcagtgctcttggtggtagtgtctgagagctgagacaaggcccaagtctttgggggtttccctaggagattctggtatgtgctgctatgattgtttttatagtaaagagccaacatattttaaggagggagaaagagctagccaagagattttctgccagtattgaagaaccttgtaaagtcagtgagatgagactgattgcataagccaatgaagcccccagttgcttccgttagaggccagtcccttgatgctacaaacactgaataagataaaacttaaaaatctgaacaggtccacctcttcctttgaggacaatagacttcttcaaaaaagagcaaaagtggatccccgtaagttttcatttcatggagtgaactgatgatggctaaccttcaagacatggttacttgaagattcatcaaaatccttccaatccctagtgattggcgccccaaacacctaaacacaccgcataagaggagaacaacttctgagggaaatggtagatggtgtgattgaaacacttatcttaagaaagcttagaactgtcctcccaagaaaccataggatggaagcaaagagttctggaactaaaggaaaaaattcttgaaaacaagcatatgaatgaactcagttgcaaatgataaagagagccagctaaaaatctatgactgaaactcctggagaagatagatttccttgctctctttagagccaattacatggataatggcaacttggaattggaaaaaagggtgaatcagaaaatggagaccatttagattattgtcagaagttaatttgaagaaactcattgattctgttcacgcaaatactccttaaaaaggttagaagtggccgggcgcggtgcctcacgccttaatcccagcactttgggatgctaaggccggtggatcacctgaggtcaggggttcaagaccagcctggccaacatgctgaaaccccatctctactaaaaatacaaaaattagccaggcattgtggctcacgcctgtaatactaactattcaggaggctgaggcaggggaatcgcttgaacctgggaggtggaggttgcagtgagccaagattgagccactgtactccagcctgggcgacagagcaagactctgtcacaaaaaaaaaaaaaaaaaaaaaagttagaagaactacttacactttgttgatcaacttacagtctctcacaaatagctttacagggcctatttcctctatttgcaaaacatctttttgtgcaaatcttgctctgcccactttccccatgaagccttttctccttcctattccaactcccacggcgctctgctgcctctcctgctgcactcactcatttgtggttgttctgttgttgggttttttgtttgttcttctaagatagggtttgttgctttgttgcccaagctagagtgcagtgcagcctcaatctcctatgctcaagcaatcctcccacctcagcttcttgagtagctgggactacaggcatgtgctaccacgcctggccagcttttatttttgagagctcctttaggtaacaacaacaataaaattatactaatttagtatactttttttttttttgagatggattcacgctctgtcacccaggctggagtgcagtggtgtgatcttggctcactgcaacctccgcctcccgggttcaagctattcccctgcctcagcttcccgaatacctgggactacaggtgcatgccaccacgcctggctaattttttgtgtctttagtagagacagcggggtttcaccatgttagtcaggatggtctcgatctcctgacctagtgatgcacctgcctcggcctcccaacgtgctgcgattacaggcatgagccactgagcccggcctaatttagtatactttttaaaaacctagtatgactattttgcttatgtggatttaagttttagattgcttattacagaaaatcacagaaaggtaatttaaataccctaaatagaaagtcaaggaaaagggtgtccttaatgctccttgtctcctggttagcctatgatatttcagctccagccaatttcctttacacaaagaccctgcttaaagcatttatgaataagctggaagagtggtggatgagacatggcttctctgaataggggagggaggacacaaaaaatagctgctttcattgagggcaggaaagagattatttcattaggagccaaacagtgagactatctcagtacaaacaattgtttggcttgaagactccatgtgggtaattactccagcaaaggctcagctggaatggaacacggagcctgccaggacctaaggatagggactgacacaggcttaagtgtctgaatcatggctttggaatcccagagcatcccagcaaagatgctcacagaacacactctaccccaatcagcgagaagcaccattctgcacccgaccaagtgcagaatgtgaatttaaaacagatgagaaaatctgggggtactgggagcaaattcaaagttattaaacctaaactgatattttatagcaaatgtagcaagtccaaagattagatttcttgggcaatctaatgcatttcaatcaccacttcaatggctaacaataggctgggtggagttggtgtgcagggagggactgctgagctaatagctgggcaaatcatttcaaagtcagccaggtggacctgatatttcaaaacttgatactataattaaaccaatttcctagtgacctcacttcaggtaatataagcaaacttggttctcaagttactgtcttcatctcctggggacattcagttctttacatttttaggttacttcagtttaacttcctctttgcaacaaccagtatctactcatatatttaaaaacaaaaacaaaacaaaacaaaacaaaaaactaaagctgcaaagtgagcctgcccactgcgggagggaaagggcctatgtttagaagaagctactaaaaagggtgatatggtcattgtccaatgagattgctcttcatcctccatccctaggatagattcctcaccccaccactttgacgaggaatttttttcccctaggaagctgaagggataactatcataatactagattctggatgcacaagacccagtcccgatccataactcacaatcccagggccttcctaggttgctatctgatagcctttgtgagtgaatgctttcatacatttcaatcattaccctgaccaaggctaatagcaggctggtgggtgtaggcgtgtagggactgctgcgctaacagctgggcaatcatttcaaagttggccaggtggactcaacatttgaaaacttgacatggtcattaa

SEQ ID NO: 2060 - DNA, 4001 bp, Homo sapiens
taggtgcagtggcacatgtctgtagtcccagctattcaggaggctgaggttggaggatcacttgagcccaggagtttgaggccagcctgggcaacatattgacaccctatctcaaaaaaacaaaagaactaagtaaatcctttgaccccacttgtaagaattcatcagggaaaaaacaggtcaagtacacaaagaaatacgttaagaatgttcattattacatctttatgaaaattagaaacattaataggttacattaaggaattatggtatcaccatttaacggggaaaaattttggagcctctatttcatataaaagtatctccatgatatagtaattttaaaaatccagtattaaaagagtacacatgaaacaattccattttttttaaaatatgaataaatgagctcggtgtggtgatatgcctctgtagtcctagctacttgggaggctgagcgggagtactgcttgagcccaaggattcaaaggctgcaatgagctatgattgcaccatggcacttcatcctagggaacagagtgagaccttgtcaaaaaataaataaataaataaatgtacgcgtatgcacagaaaaaaaatctagaagactatatgtaaattattactatatcgggataatgggataatgaaacatctattttcttctctatatatcctctctgaattgtttgcaatgagctttctattaattttgcaatgggaaaaaccagtacagatatcgtaaaaacaaaacaacgtaagcatccagggctccttactggctgcagggtaagttgaaactccttaacataatatataaagtctgttgagagccttgtactttacacatgctgaggaagtcataattgtgaaatatgcagcacactcaaatctctttgactacaccattctttctacctggaatggctttctccctcattccctgcttgacaaacttaaaaatccagttcatctgtgatgccctccaatggaataaaccctaactttctctattgctaatagcccagggtatgctttgttcttctaatacttaatatcttgttcgagttgcttacaggtctctcttgtcctaaatagactatgagctctggaaggcaatgaccatgttccttcatcatttatcacaaacacttgacacaatgctagcaaacagaagatggtacacaataaatgtgtgttaaatgaattcgtcaataagcaacataaatgtatatatttttcctgttttgcaaaatgaagggagaagttttcaaatgccttaaaggatagctgtaacacagaaaacggattaggttactttggaaaggcttcaaaagcagaactggcaccaaggagtagaagttgattttagcacactctagagaaaaattttctaacaattaaggttgtgtaaaaaccaatgcagcatatccagaaattgtaaaatctcagttagtgcagtgttcaaacagaggtttggtaatcagttctcagggatggtagagaaatgatccccatgtggtgaattgggtgaacaatgagccctacagttctttctactactacagtcctactactacagtagatgatttgcagtaatttttaggtcccttcctgcttaccgttcaatggttctgaaaacgtaaaatgaaacaaacaatctatgaagatgttaggtcttgaggaacctaaaacacggaatcaaatttggttcatggagcctataccaggcactgaaaactggttaaatgcaacatacatataaggaaaaacctaaatcaacaaactcagattttataagagattaattctacgtgacataacttgtcattaactctgacccaaaatttggaagtcaaagtaaaaaaagcagcagtatttgttttaagaacaaatctagtgccagttacctcagttccactcattatatccctccattctctgattcactgaaaaggaagaatacacagaaacaccagtgggatcttggaaaaattgtgtagggctgctgagaggtatgtttacctctatgttttcatccacacaaaagagagttcatcaagttccttattccaaaataacaataaacagtaactttgaacttctgtaagtacaaacattttaaggaaccatgagaccaaaataaaggcttatgcaatcaacctctgctttcagaacacttgcaagacaagtccctttccatctgggccatcttgcaagaatgttgtttccgtttgtcaaaaagaaacactgtccacatttgtactgttgaaaaaagagcataagttaagcttaaaaatgtctgagacaaagaaaattaaaacatgtctgagactggttagagaataaaggtaaatcctacaccaagaaatttaaaattagaaaatcagaggtggaaaggactttagaaatcctcttaggtccagcctctcactgaatgcaccctccttctaggggtgatcacctggcttgtccaatgctgagtcagttacgtaccatttcaaaaggtagttggtttgtctattagacggcacccactattagagaggccttccttatacggagtcccattaatctctcttcctaccattttgatatcctggtgctgctttttactccccccatacttatataatatatcaaagtatgaaagataaagatggaggtttggagattctagcagaagaaagcagccacttatatactcaaccaaaatacaagcccgctgaaccaatttaatccaggagctcaatgatagaacagacatagcaattagacagactgctgtgattaccaatggagatgaagcaaagcaacattatcttcctaccaggtaaccggaaaaaggaggttaagggaggtagaacactgctaagtactcactaatgaaatgattagtcaatctatgtctaaaactaattcagcagttaacttaaaatggcttttctcaaaaaacattaaagcctgtaacacaaagaaatcaacaggaaagcagactgaggtctactaggagaaaggaaggaggcattcttcatctttctcatgttatttaactggcccttcttatctacacagctaaagatacgaattatctaaattacagcactaatttcctgtgtgactttagacaagtcaatataccttaaccagattatctcaaacatatctcttctaaaagatagtaactgtatctcaaaaattcattaaactactctggaaaggtaaatttggctccacattaatcttactgccctgttttattattattattattattattttgtagaggtgaggtcttgctatgttgcccaggctggttttgaactcttgggctcaagtgatcttcccaccttggcctcccaaagtactgggattacaggcatgagccactgggcctggccattggtttattattaacaggtagggacttactgtgactcttccttgttgtctctcccagcagtggaaggtaactagtgtatacttaggtgatgtttctgggaataaagaactatcaatcagtcatcctgtatcattattatcaattcaattccccaggtgacttcaggagggaaagaatgagatcctagtttggactttgttggctttgaaaaggacattctgccaacatatgtcctgataatgtcatcaccccattcaaagctatgtcactggaccccccaccatcaactgaactccaaacttctaagtatggcttaaattctcctgtgatctgggtctttaattctcattactcctcttctcacttctatacaccaagagtgacatcacttcctcttaaaactgtgtatatagatgccacttgtcatgttcctgactcacagaggaatctgagagagtgaatactacccacagagacgcacaggcctttttctgatttggggatgggatacagacagagggactcttgggtgtggtgagtctctgttccaactagaggacctcctgactgccacaaaaatcaatgtacacatatatca

SEQ ID NO: 2061 - DNA, 4001 bp, Homo sapiens
tctgatagttgtccaaatgatcattatgacaaccaaaattagaaaacagcaggggaaaaagagtgagagggcttggaggggtggaatgggataggtaattcataaattggataaacagaggcctcaacaaatgcctatttgtcataatctaaagatgactgacccattgtcatctcatttttaatacaatgaccaagtccctgaagccacctggtaaaatgtaaaacgaacttctgaaaagaaattgaggatccaggattctaccatcaacagtagttaataaagtttacaagccagcagttactagttctcattaagaattaactgatatttcataacctgatccccagtaagcttattaataaaaagcaacggaaatttcgggctgggcatggtggctcacacctgtaatcccagcactttggaaggctgaggcgggtggatcacctgaggtcaggagttcaagaccagcctggccaacatggtgaaaccctgtctctactaaaaatacaaaaatcagctgggcatggtggcgggcgcctgtaatcccaggtactcgggaggctgaggcaggagaatcacttgaacccgggaggcagaggttgcagtgagccgagattgcaccattgcactccagcctgggcgacaaagcgaaactgtctcaaaaaataaaaataaaaaataaaataaataaaaagcaatggaaatttggaggaagaagtagtgaatcagcctctctcttccatgtgctgtattttattggaatatgagtaagtataagggtaatatgagaaatgggggggggggttctagtcaccaaaatggcatctgactctccaaatgcagcaatgctcactccagtgggttgcttcactgtgactcaagatctgtcaaatgaggacataagggaatttgaataaagccaagatacactcctaaaataaaccaaatcttccaatagacctaacagaagatgtaacaagaatcaagaagctaacctactcaacataaattgattctaaaatactttttaaaatgaattattgctaatgcaaaaattcaggaaagaagtctaggaatttgttttcctaatggcacattccatttatctgttggtagaggtcactaaaatacattactaggtgtctatgtatccctcccctgttctccttttataaccttattcttcaaaaataaaaggtaattaagtgaaagcatcaattaaatatgtccttcctttctcaaaatagataaatacgaatataactgaatctttgttttatagtatatgcccactacgctgtacggcaaacaaccatggcaaatccactgcattatgaacaaaagtaaattgtcgcccccaaaatataactatccatttcgacccaaccaaagggaaaataattttcccaatcctccaattatatgccaaaagaattagaaaatacaggaaaaaaagattcatagaagcttgtataaatgtcaagtgccaacatttcactaataaccaagatttcctattgtactgacttttaattgtatcaaatcatgaatcttctagggcacagaaaacaaagactaaatggttctgccaatttacaatgatcatatttcacctttagaagtgtaatcgccatggaagcaatgaattcatcgaattcatctttctctctccactgattaaacggatcctgcactacaggcataatcggctagtttctgccaccactcatacataggcctccaacgcactctacaagccagggctacactgcctagaaatccgcactgtgtcactgcataaggcagtttcccactgcacacatccagaagaataaagtcacctaagcactcttgtcagatcttagcaaggctgcaaaatgacaggagttgctaaccaaatagcaggaagcaaaaatcaccacctttaaaaatcatttaagcagttttcctttccgccatctcacttccctcctcctcctcctcgtcattctctctctctctctctcacacacacacacacacacacacacacacgcacgcacgcacgcacgcaatgcagttcatccccagctttgcaagtgacatgctgggagctctctctggacagccggcccagaactcattcagagccctcaaatacagacattctcacctgaacacgccaggcaacttccacccgcaccatcacctccaccctccccgacacacacagactcgccctcgcaagctctacccataccaatcccccagctgcagaaagcccagtaggctcactgcaagcgcagcacgcgttaccacttataagccgagttgggcggcctaagcttcagaaaccgcctcttcacgcagcccacccccaccaccccggcgcggctggacccctggcccgccaggtgggatgcgctacctttagactggcaatctgcacaaaacttgttatcctcctccagcagcaggttggccaggacagcctggtaccgatccacgtccttcaccgacttgcctgtcatggccagggtgccggcgggggcagagggcgacgcgccctcctcgcccccagagacccctgcctcagtccggggttgaggactcccggtcccccgcccaggggcacctcctgagcggggagagccctctcctccggccccgccggacgccccttcccgggtcgggggcgtccgtcccccactccgcagcccctcggcgcggcgccccttggcgggcttagggacaggcccgcctccaagagaggctgcggggccagagaccctcagcccaggcaaaggcggaccacgagcctcctgggtgccggacgcagatgaccctctggccggcctgtctgctggccttgcgtcccgcgcctcggtttccctggcagctgccgtcagctccgctaccacctccaccgcctacttccggcagctcttcctccccacctccaccctgcccagctcgcgcatgcgccccgcccccaccgcgccgcactgggctcttccttcagctccgcctctcgggaaccaatccgtggagaagcggggggcgggccttgggtgggggcggagggaaggggtgggcacgccccctgcgtgtccttggaagagaatgaatggagcctggtagaaagggagtggagggaatggaagaaagtgaaggaagacaacaactaacatttactgagctcttactatgcgctaggcactgtgttaagcgctttgcatgaactatcccaacataatcctcacaacgaccctatgatcatccttatgtaacctgagggttgttgataccccaaagtcctccagcttgttttttccaacagccaaatataagagtccaagcccctaacccaggatataggaacgtcaccccctccccacattttcagaggactctggtcacctctcacttggaatacctgctcccactaatactcattagctctcctctgtgactcctgcctttttggatattgtttggcctggtgcccagacagtttgtttcttcttccatttcttaaattctcacaaaacagcgagttttttgtggcagacttttactgaacgttatttgggaagggtgggggacagtgattaaagcatagcacacaacaggcaactccttaaaaatgattattaaacatcatcatccaaagccaccgttgctacagataatttctcattggctgtccttttccttagggatccacctgccatctggcttgtgttttcattcactcattcattcattcattcactgagcacgatgttactgagaaatttctaagtatcaggcactgtactaggggagagggaaacagcatgatccgatttgtggttttaaaaggtcactctggctgccatggaaataattaatcagggaagatagtaagcagatgctaagagttatctaaactctggtgaaaccctctcctccatttctttactttctcccaagaccaggatcccctcaaagctttcatctcatcagaggaaaactaa

SEQ ID NO: 2062 - DNA, 4001 bp, Homo sapiens
gtggtgaatttgggtgtgccggggtatgcagggagcccagtatctgtccgtatctccttgttgtttgaatctgctcccttagaggtcagacctaagactaggttttgagagggacgagggaggagtgagccccttctgtttttattttctgttgttcctctctgtgtttatttttgccttttgctatttttttttcctctctgcctctctatcattctctggtcttcattctgtctctacctttctgtcttttgtctctggtttacctttctctactctgaaggtcagtgccctgaattgaccaaagtgcagagtctcatcaccacttggaagtccagtttgttagtgtccatctttacaagtccagactgagctgtttctacagaagcaattctcattccagtgatcagaggtgcagaggcatcagaggcacctggagcccaggtccaggggcttgcctcaccagtcccaccaatgtccccactccaagcatgtcccccatagtgagatcctgggaataggtcctgaatgtggaggttgtgcaatatcagagaaggacagcaggttggaaaccagtcttgttgactgtagcatagggagggcaacatcaagtccttctgcaacctcacccccatggatgcaggtcctgcccctctgagccagtgctgtctccactgtcttccttctgcctggtgaatagtatctatatcctccactttcagaaccctggctcctgtccaacaaacctgcctcctggacccctctgcctcctgcaagagtttcttcttaagattctctccttggccgggcacaatggctcacacctgttgtcccagcgctttgggaggctgggacgggtgaatcacttgaggtcaggagtttgagaccagcctggccaacatggcaaaactccatctctactgaaaatacaaaaattagctgggtgtggtggcgtgcacctgtaataccagctacttgggaagctgaggcaggagaatcacttgaatccgggaggtagaagttacagtgagccgagacctcaccactgcactccagcctgggtgacagagtgagactccatctcaataaataaataaaaagaaacaaacaaataaataaatattctctccaagctccatttcccttccttcccaaccatgctgtgcacagcctgcctcaggaaatctgcctaatcatgtcaaacacttgtggtgcaaggccagggccatcttcctagctcttattgctctattcagagaggattgatacagagcccaaaccaccaggagggctctggcaaggcaccttctccctctgcccacaggcccagcctcatgtccaaacactgttccctcaggcaccagactggctcagagcagacacctgctgaattttctcacctctttccaggtctttgaatgtgctctttcccagcttaaaccacccttcctgggtctctgtccccacatgctcactgaatatcgttcaaacctgaagtctctgcttacacatcactcctcgaggaaaacttccttaacccaaaacctccatctccctgaaaggctttcttggatcccctgtacttcccattacatttttatagtggttattattttcccaattgtctcacttttgtggtctgttagttccataaacacaggcattctcactatccccacccccagtggctcccatgtcttcctcttaaatagaagcaggagctttttcctgaaagataggatgaatcctggaatcctctcatccaacacactgaatggcattgcatgggtctcagtaggtaaatacgtaatgaactaatgaacacatgaaaaagccatggagagaggacccaaaagacaatgtttctctgtgttacctggtctggccacacacacaattcacaatttccatgcttgacttctcatgactgattccagtaggtattattgatcttcctcagcagcctagtgagtccatgactatcagaagccaaagccttctgaaccagatgggttcccttccctgctaatgccaagattctaagcctctatgacaccataattctctccacaagactctatgcctagctcactcactggcgccccctgcctgctggagagtctgtctctttggtttctttcctgaaagataaaaagaaagctccctagctaacccataagcatgcaataacctaaaacacaaatctgtattgattgtctcctatctaccaggctctgtcctaaaaagtgaagtgtagctcaatgggatgtagttcccattctcaaagatctaattcaatatggaggcaagtcaatagccaacaataccatgtgataataatgatggtaggataagcacaggggtcaggtttgggggtcagatatgcttcctggagggagtgatatttaagctgagacttggaaattggaaataggaagttggacataggggtgtgtctgggaggacattttcagatccagaaatgtgaaagtataggctatttggtggaaaagctcagtgtggctggagcagagtggggagtaaggagaagggggagattcacctacctaggtaggtaaggctgtgttggtgaggacctttatgccataagaaaaagagtttggactttatcctgaggacaatgggaaccactgaaaggttttaaacaggggagaaactgggatgccttaggggccaggaccctattttattcactttgatattcccagtgtctggctgagcaattggcacataaaagattctgaaactgaatcaattgaatagtgaattgactaaaataatgataagagagaagcatttcattatgtttactctttccttttcttcctgtagcatggcctctttgaggacagtgactaggaaattctgttcttctgggaagcatgcctgccataaacatttgtaggacaccaggcaagagcacaaacagaggcttctgacccctgtggttcacccctggttctcttcctactccctggcttcatcttgtgtcacgagggacctcgggcgtgcatgagtgtaaatatcctagtccataccgtccatgttcttttcatacatggatctctcaaactgcccctctcttggtcattgagacctagaagtgagcacagtattggctgtttgagtcttcaagaggatagacacataaaggtgatctcagggccagttgacagagatttctggggtcctggatagctggagtgagagagacagcagctctgggcctgtaccctggacctattgaatcatcctatgggggtgggtcatggctggaggagagccagagaaggactctttaaagtctgaagtccaggacagaaccacctcggccaaagggtagcactcttgggaagtatgtgaattgtgcttttcattctataatagcctattcaagtatttctcttttacttgtcttcttcaggtcttcatgcttatagttatctctaaaatttattctcagtaaaatgtctactcttattcacatctcccaaagtctctaacattgtagttgggaccaaagccttaatctataagaattaagttctttctaggaagagtacggagagggagagagaggtagagtgagagagagaggtggaaatggccaacaaatctatgaagaaatgcttattcataactaaaggaatgcaaaccagaagatcaatgagacactggcttttctatgacagtctggcaacaaatatgaaattttgatcacattagttgttaatgaatatgttgagaaacaggtattttcatattctgttaatgagatttcattttacaatcatgtaataggatagtatatagctaataaaaacagagtccagttgtagatgatgctatgaaaaattctcccaactatgtaatcaaagaaagcaatccagtaaacaatatgttagtatattccttttcttataaaaagaatgtatatacggagatatatacaaaataagataaacatatatgttagtata

SEQ ID NO: 2063 - DNA, 4001 bp, Homo sapiens
ctagccgtgtgtttcattcactattgtactctcgggcctagcaaaaacaaaaatgtttttaaaaacaaataactaatgaattggcctaattaattaattggtgcttccaggctcctttctcctgctgccctttcttctgacttaaaatatttcagaatttcatatccgtaaacagctaggtgtgagagttccccaaatttctgaagctcagagtgacaagtccatagtctaacaacacatttatcttgagcagagaaatcagactttcctcctagttccttccactgatcaccactgctataataaattataaaaacagtgattggctgcctcaaatttctaccctgctcaaagccaacaacacaattacaggcagatacccatgtgcacacaggtaagccacacaggcaaacacatcagcttaggttagtcctgtgaatgtagtggtttaagaaagaactacatttgatgacaactggaaggatgaccagagccatccccaaaagctggagacaaggaatattgcagacactgcccacgctctgtctgacaggcagcactgacactcggcagcatgataaggcacacgtgccacccccagccaactcctcacccgcctggggactgcttggggcagcccatagtgggagccctggggccgctagattgaatcacttttctatttttggagcagcctatactcccctctgcctctggcttacaaagccagagaaggcaggatgcctactcaaagagaaaaagacaacatgctcttgactctttcaccgccaaaatgtggccaaggctctgagggtcgtcttctcatgcaaatatccgtgttctataaagcctgagctaaatgaaaaccccaaactctactctgtagtagaaggcacaaaactcagtttccacgcttcatcctattttgacccagttgcggagcccatgttccagttgacctacccaacaaattctccacctttgatgggaagagctcattcgggcctgttgccaacagagggctgaagggctgaagatgtgacttgtggagcgtgggtggcattatggaaatcagaaaccaggaacggaagttgcctggcaagagactacagtcatgaggctgggaggaaggcaggactcaggagtccccaggtgcccggaattgcctcccaaatcccaagaacgctctggacacaaaagtcgttcgtgacccttccaggccaagactttctcattcggactcctcaaaattagagccgtatgggactttagagcacatccaattcaaatcgttctttttaaggataaggaaactgaggcccaaggtcacaccgtgagagagtggcaaaggatggacctgaacctagctccacggacttcagtccaagactcttccttgtaaatcccccaggattccaagcaccgttcccttccgggtttttctacacctgtgaccccaccttcacctacccaacccttccagccttcaattcccaccctattaccccaactccaccaagcttagtgcccgccccaagaaagctcactgcagaggggattcctccacgtgcttccctccaaacctcccacctacccaattcctcctttcagttccatcccgagttactacgggaccccgccccgcctccaaaattgcaccctccttcctcacccgcacctcaccccgacacccgggccccgcccgcccgggaggccccgcccctcgccgtctccccacttccctcggtggctgctctcacgccctggcccctctcaccggtaaagccgcttagtgtggaggacttttgcttcgggctcgctgctctcccctgtgggggggccttggctcatggtgcccgggtccgggggcagctcccggtcacaggcccctgccacccaccactaccgccaacactgccgtctccggccgtagccgcagccgccgccgccaccggccctgctcggccgccatcgctgtgaggcggctgcccgcgacagctcctcctccgcctgccaaatctcgcgatggcagccgcacagttgcggaccagtggcctgctgctaccaaatctcgcgaaactcgttttccctcccgggaagttgccagaactaactctgggcagcatggcgtctttccggcttctccaaacccttgcgaaaaactttattggcaaagctatcagagaacggacagtgtacccactgaggcggccaaagcttaactggatcagggcaggtgagcttacagctaggagcgtgactgctttgtcctacaatggtcatttggtccatccttctgcccctttcccgcctccccgtttgagccaagcctctttcagattactggttagagtgactccagctttcccttttcccccataatttaaacaaacaaaaagtgcatgtgaaagtttccttggaaagggccgagcatcacataggagtaaagccccggaagaaatgacttgtacaagcgtctcggcccttcagctcccctcccaaagatttccagcttgcatatctatctcttacgagccagtaacatttattgaactgccatcttccagccacagtgcaagattctagacacacagaggtgagcaagctagacactatccctgccctcccaaagctcaaatgattttagggataaggactcatagaaatgagaagctagtccctaacgtttctatctcctaatcctcacattggaaatcagggcaggtgggcttacagctaggagcgtgactgctttgtcttgttttagcttaaaacctaagttaaaaagcaagggtggtttgttttgttgttgttgtttttgcctgtgtatgaattgtaatgagaacataaattgcccttctaccactatgctcctggctgcagccacccaccttctttctgttcctgaaacagcctaagtctttcccatccattggtctttcacttgctgttcctctgtctgtaacactcatactcctgatttcccatcaggtttcagctcaaatattaccttaccaaagaggtctttcctattaaaattgtctaattgatttagttgctaggcttcttcattatgttaccccaatagaacataagcttctcaagggcagagacctcaactgtcatcttgttctcttctgtgtctgcctagctaataattggtgtccagtaagtatttactgaatgaataagtgtacaaattccatttctgggtatcccagcctactccgagcaccctttgttgcacaaatccacttttctccctctgctttcctgagctgggagttcttacgcattccaggtgcctagaatgtgaacttacccctttgcccagctgcatcccaactttcagaaaggatgacatcctcctctgatgcttttttttgtcggcagattcagcagggcggggcctgcccctttaagctgggccccacctgctctggtcagacaggttttgagacacaggtaaagggagggagacagagagaaatacttgcagagccagcaggtagctgggcagctccttcccggacggacggatggacagacgctggggaccctccactccatatggaaagtaagaggatgtcatgggtccaaactgcaaggtttggagtgcccttgagataaaggaagggaatcagtcccatccagaagcaatgagatggagggcagcagggaggagagaaagacaggagagaaggcatagaaaacagccatgatcagacctaaatatcagaatagcagacccaggccctgcagagatggatgaggtgggctagtgaggagtttgggaactgaccaagtaccagtgaaggaagagggtgcctggaactgccagctctttgggtcagatcagttggcaaatcactggtctcacttggaatgcaggagggttccaagcagggatgtgtagggatgggacagtggagaggaagcttctctgtctacagcaagatcctcagtgggaaagaaacttggcaaagttctagacacctctt

SEQ ID NO: 2064 - DNA, 4001 bp, Homo sapiens
aggctggtcttgaactcctgacctcaggtgatcctcccgcctaggcctcccaaagtgctgggattacaggcgtgagcccccgtgcccggcaacgtttggtatctttcatggtacttacactctgtgctgtttaatttacttgcctaacagatactcaactgcaaattccttaagactaatcagcaccctgatggtttccatctctctatagcacctacaacagatctttgtcatagctatatttatttgaaatattaaacaacaaagggatatctaagatgaaaaaaaggacctcaaattacagacatcattccaactgtcctgtggtcactgggcatatatgttgtgttaaaatcaagcattcaagcattgttcaaatatctcatcattctcttctctccctattatgcttaataaaactttactactttaaaaattataatggccaccctatgtatcaggtaactacacacctcttgcaatatacatatagggatccacacacgtcaatactttcatgtcactaaacagctaaagtgacttttccactcatttcagacttccacctcatccaactccctcctccgcaaggtatgaaacaattttttaaaaaacatctttccataaggcctccctttcttagttctgctcctgaaagacaaaaaggaccaattttaaagtcttccccttttctaagcagtagtcactccccagttaatttcaggatctaacaaccttacttttctctatcaagatttttgacccactttacctctgcctccaagctcttactcagcttccatggaacctttcagctgacacaaaagctggtgtccttccattcaatatgttctcgccatcaggtactaagttcaacctatctacatcttcatcctgaaatgtgcatcaatcgccgcgccccccaccccagacacacatctcgcacacacacacactattcccatgtgtcactctacctctgacatacaagttccttacaccactcttaatgaatacacacgactctcagaatggtatcttccgactacactgattctaacccagtttcttctgaaaaacccaaccttgtccacagtgcctccctctttcctcacttccccatctattccccttcacgcctccccacaccgccaactaactacagatgacattattcctcaatactcccaacccgagaatgaagaacaagctccagtttcctgcggtctccctctccccctgtctgccctccgcggttcccccgccccaacaccccaggtgtgcagacttcctccccgtcctctactcatgcatcgctccaaccaatcccacgccacaccacgagtcccctgccacggggatcagactcctccacacccacctccactcggggtcgccgccgcctccccggacgtttctctccacccctcgctagcaaacccgagaccaagggcgcgcgcgcacattctcacgcttccccaacctccctcctcgcaccgggacgagccggcttcgccagagctcagcccgggcggtaggggctaggcacccatacccgttccgccccctcccgcagatccccttgcagtctccgccgacctgcccggcgaggagaggacgcagcaactcccccgccaccccggacttacctcggtgtctgttgctccatgccccaacctgcggcccgctccccctacgtaccagcccggcctcggcactcaccggaggtactgcgcgctctgcaggctcatcctccgccgccgccgccgcgtcttcccgcgaagcctccgtgggtctctcaggctcctcggagcggccccgcggcaccgcgggtgctggcggccgccgccatcttcctctcctccggctcctcctcgctcggcaggggggtgggggtgaatgaggcgagggggagggagtggggaaagctgctctcgctgctgctctggcccgtggggcgcagggacactccgacccgggggggagggggagggaggaggggcgggggaaagaggagaagcagaggaagtcggcgaccgggcgagggagggggtccctctcgcgagatttcagcagcgcctgtccctcagtgatttccgcctctctgtagcgctcccttttgggatcaacgagctgtgtggcgcctgtgcggcttctgagagaccggctggtggcgcttggcggcttcctgccaatccacccttctcctcccgcgcaagggggcaatcccaatcccaccaccgggaacacccaggccaaaagaacgggagttacactcaaagtcttcccccttcttatcactcctgccgatttccctcttcctttttgcacgcctccactcttccccaccggaaacgccgccccttcctcctacagttcctcccagcagtccctcaacgcctgtcttccctcgcgcgtagagagtgactcgaaggaccccctctcctcttcgctgcagcccctccccatgcacgctgggagactcttggaggggataaggtggggcccggagaggaagagaagacaatcggattggataggcagctgccatggcaactggaggctgtggttatattgtcatagtaaccgatgtgtgcggacagggtcaccctccccttggccaatggattcccaggaaaccacccagggttccccgttggcttcccttccatctaaaggcctcccccaagttaggaatcgatatagttctccccggtggtgaagtccacttcctcctcccttcccacttcccacagcaactggggggacaccccgaggcattcaccatgggcttttccacccgcctgcgagcgggaaccacctccgtagtttcctctcagagccgggcgtggagagggctgggcctgcgaagaggatgcatggcctggaggctggcgggcggcgggctggagtcgggagggcgaggcgacagcgccaagcggcgaggaagggcaaggggtttccccacaactgccttgggctctgggaggcgggatcccgcctggacggggtccctgagggaggagagcggcacacgacagccgcgatgccttccctgccgacggggatagccgacttctggcgagtcgacccctcccccaaatccaccccacccgcgtactccctcctgacctagctgtcgcgagcctgccgcgaggaggccagggtgagggtgggaacacatcctagaaggctaacacgtggttttctatcatttaagccggggacaagccggaaggctgactagcgccatcactctgataggcaccccgcagtggggatcctgcttgattattaaaggcagacctccaagttcctccctgctctgcaacctttctcttctcacgggtctgcagtgttttaaaagtcgtcattctgtgtcgttgagttagagaggaaaacatcggataaaagaggatcaagaagaacgaaccctagatacatctgtctggtgaaaggagtctaggaaaagaagtttcattcttagaacaaatctttttggatatttattatgtgtgttttgtgtcaggtttcgggccaaaaagctgaaataaagaacgaagtcaataataatatgaagtgtatgagaaatagctggaaaattcatcatccatgacttgaagaaattgacgttttacaagttatattttcggttcgtattgtggagtcacttaaggagctatcccaaagtactttaggatatgtaactatataaaaccttccaagaatgcagccctcataggatagttaaaataaggattttaatgggctattttgatttggtttggtctggtttggctacctgattcctgctgtctttttctacgccaggtgaagaggcactttcaagatccttctctgagacctgcaccaataagactataccaatgttcagttgaaacatcaggtataagtttagcggaaacgaaagtacaacctgctttgaaataaattccaaggacagattgtcattaacgaaatagaaagtggactatgcccct

SEQ ID NO: 2065 - DNA, 4001 bp, Homo sapiens
ctgtgtgggttgcagcccctcccccacccacacctctaggagggctggggcttggggggcatgatgcactgagcacggggccggggtggattcaaggccttggggaggccctacagagacaggagggtcgtagggctgggtggctgcccagagcaggaggggcccggccccaaggccagctccctgctgggctccaactcctgcagacctgggactcatctttgcatctcggcactcagctcggtgcctggcagcccaagtgcccagaggggcgaggagaccacggggactgagcaggaactccaagcactagcacagctgcccggccggcctgagccagcccggactctaagcacctcctttaccctctggcctctgtttcgacctcctatttacctaagggggtgtgggggtggaggagttggagggggcacgagaagttgacaacccacccaggctgtgggactggggtcagctctctggtctgctgggcccccagtgtcccctctcagcatctggcccccaggagtggggtcctcgggcaggcaatggcaggcccctcacttctaggagctgaggctttgctgggccccctccagcggggaaggctgaccttcctcccaggtcatcggcacagaggcctaaaggcacagcagccactcccctgcaagaagccagctcagaaactcaggccccaggcagttctgagactcccggcacttccatgtctgccttcccccaaagcccagagaggcagaaggagctgtctcaaagccataaagtgtgccttcggtgggagccctggctcagtgcagcctggcactcaggcccggagaggcccagcctctactggagtatgggtgctgttttcccggagcatgtggagcggtcagctgcctacccgaggttcacgccctcttgcctggtgtgcagaatcccattctggtcccagcagcaatgtgccagccccaggtaacagccatgacccgggtaagacaagcttaataccaccacccctgctttcccaagtcacccagctggggtccaggagccagggtgcagcaggggatgggagagtttgcttctgtgaaagcagcagcagccacctccttcttccagactcgacgtgatggctggagctgctggagctgcagcagccgccttgcaacccgacatccacgcagcattagtctcgggagtgctgaggctccaagtccacagcagcagcccaccatgggcctcccggtgggaggggtcaagcccagtgtgttcaactctgggatcatgggttcctgtcttgctgacgtagaacacgttgttcccaagtcaccccggtgcacagccaccagagccggcccttgaggctggcctccctcacttgctcagtaaacgtctctccacactcatgtgatggtcacaggtgtggcggcaggaacccatcagggactcccctccaggccctgggaggctcccggatcctggcacctcctgggggcttgtgagtgcaggaaggccctaggtacacaggcgcccctccatagacctcttcaccccacagcgcctcagggccccacacttacccggagaaccttgcctgagggctggggcctctgggccaggttgcggtcagggcctggccagcggcccgcacctcccagcggggcaggtcgtgggctgaggtgcggcagacgcctcgagcctaaaaaaataaaggtgaccggagaagccgatcttgctaagggccgggaagggaaagtggctggtgtcgggggtccccagcagccacaaggagccgggcaaggagccgggcgggcagttccggccctggccccgcaccgcgggttaggccggtgggggtcagtccagggcacgcccccacccccgccagttctcagccagcgaggccgcgcacagtcgcacctgcccactgcggccgcaccgggaagccgcagcccggaccccgcgcgcctcacctgtgtccccgcgtctctgggctccgcaggggccgggcctgggcagggggcgagggcgggggcggggccacgcggggaagggctggagccagcagcggggaggtgtctggtccggaaggtggcggggctagagtggtgggcggggccatgcggggaaggtctggggccagtagcggggaggcgcctggtccagaaggggccgggggcggggcgagagggggcggggcgagaggggggcggggccatgcggggaagggctagggccgcagcggggaggcgcctggtccagaaggggctgggggcggggcgagtggggccgggagacgcctcgtccggaaggggccggggctctaggccgcccagccccggggccaggaggtgcaggggggccgggcagggtctgcagagggctgcactttctgcccccagacggctcgcccttggggcctccagggtccccgacctccttcacccctgctggagcccctccgacgccacgagcctcccagccccgcggggacccggctgcagcgccgacgagactgcgggaggctctgggcgcgtctgggcctgaatgctgggttcggggacccggccgcggggaccgtcctcctccggggcttgaggggcgtggcgcccgcacgtggcccacgctcggtgctcgcggcgggaagggaagcaggtgtgggtggggagcagagaagggtaatggggagagtcccttccgaaggtgttcaggcgcccagagcctcagaggcgccggggaagcgtcggggaccacagacaccgttcccgtgcgtaaagctttccttccaggagcggggggatgggaacagagccccccaccctcaccatcttccagaggggtcctccagcaagagagtgccccagccaggagagcccccagggcagaaggtcacagaccccttctgctcaggcgtgaggtctgtgctgagtgctgggcggacaccccggctcaggcctctggcagcctggtgccgcaaggggacctgttaggagctaggggcacaggctggtgtgctgactccctgtgagtgagctttggaatggggagtgtccttgtagctcaaggtcgcagaggagagtaggcccccgcgtggatcccagagaagaaaaaggtgggacagtgccaacaccggggtttaattctgagtctgagagcaggacgcatggtgggggcgggtggttctggagctgggccccggcctctgctgggctgaccgtatttgggggcctggctgggcctacttggaggtccccttcttggatttgctggtcaggaaggcctctgactgttgcagggggggcactttgacgcctttctgcttcagctgattatagtagtcgcttctctctgagataattctctacacaagaaacacagccgtcgaggtggccttcccagttcctcaccttggccttgaggccggtctgcacagtccgtgccagctgcccgggacgccaccctctcctcctcctccagagaggcttgctgcagcaggggtgtgctggtgaatacttacaaccggctctccagggggagaaaaaacaaacaaccctcggctttgtggcgttgccagtttctgtggtgggaatattcccacagtggctgattttcagccacggaagtgaagtcacagaatgcggagccgggggcaggtgcacaccaccagcccgcagaagcctgcactaagccccctcttcagccctcttagagttgtgaggagccccagactcctagagatctttgaggtcgtcacatctgtccctcaagtcccttctgtcctgtacagagggaatgttgtccccacctctcttccattctcctctctgggccgttgctggttcatgtcaggctatggcaagcaagcaaaggtgctcttccctggctactgtgcggtgggaataactccctccatcctctgtcttccctcttctcttcctctttctctccccttcctcctcccctcccccagacaacagtaccaaggccgcagagacctctct

SEQ ID NO: 2066 - DNA, 4001 bp, Homo sapiens
gcagtggcagcagctgtgtcctcagcctgtgtgggttgcagcccctcccccacccacacctctaggagggctggggcttggggggcatgatgcactgagcacggggccggggtggattcaaggccttggggaggccctacagagacaggagggtcgtagggctgggtggctgcccagagcaggaggggcccggccccaaggccagctccctgctgggctccaactcctgcagacctgggactcatctttgcatctcggcactcagctcggtgcctggcagcccaagtgcccagaggggcgaggagaccacggggactgagcaggaactccaagcactagcacagctgcccggccggcctgagccagcccggactctaagcacctcctttaccctctggcctctgtttcgacctcctatttacctaagggggtgtgggggtggaggagttggagggggcacgagaagttgacaacccacccaggctgtgggactggggtcagctctctggtctgctgggcccccagtgtcccctctcagcatctggcccccaggagtggggtcctcgggcaggcaatggcaggcccctcacttctaggagctgaggctttgctgggccccctccagcggggaaggctgaccttcctcccaggtcatcggcacagaggcctaaaggcacagcagccactcccctgcaagaagccagctcagaaactcaggccccaggcagttctgagactcccggcacttccatgtctgccttcccccaaagcccagagaggcagaaggagctgtctcaaagccataaagtgtgccttcggtgggagccctggctcagtgcagcctggcactcaggcccggagaggcccagcctctactggagtatgggtgctgttttcccggagcatgtggagcggtcagctgcctacccgaggttcacgccctcttgcctggtgtgcagaatcccattctggtcccagcagcaatgtgccagccccaggtaacagccatgacccgggtaagacaagcttaataccaccacccctgctttcccaagtcacccagctggggtccaggagccagggtgcagcaggggatgggagagtttgcttctgtgaaagcagcagcagccacctccttcttccagactcgacgtgatggctggagctgctggagctgcagcagccgccttgcaacccgacatccacgcagcattagtctcgggagtgctgaggctccaagtccacagcagcagcccaccatgggcctcccggtgggaggggtcaagcccagtgtgttcaactctgggatcatgggttcctgtcttgctgacgtagaacacgttgttcccaagtcaccccggtgcacagccaccagagccggcccttgaggctggcctccctcacttgctcagtaaacgtctctccacactcatgtgatggtcacaggtgtggcggcaggaacccatcagggactcccctccaggccctgggaggctcccggatcctggcacctcctgggggcttgtgagtgcaggaaggccctaggtacacaggcgcccctccatagacctcttcaccccacagcgcctcagggccccacacttacccggagaaccttgcctgagggctggggcctctgggccaggttgcggtcagggcctggccagcggcccgcacctcccagcggggcaggtcgtgggctgaggtgcggcagacgcctcgagcctaaaaaaataaaggtgaccggagaagccgatcttgctaagggccgggaagggaaagtggctggtgtcgggggtccccagcagccacaaggagccgggcaaggagccgggcgggcagttccggccctggccccgcaccgcgggttaggccggtgggggtcagtccagggcacgcccccacccccgccagttctcagccagcgaggccgcgcacagtcgcacctgcccactgcggccgcaccgggaagccgcagcccggaccccgcgcgcctcacctgtgtccccgcgtctctgggctccgcaggggccgggcctgggcagggggcgagggcgggggcggggccacgcggggaagggctggagccagcagcggggaggtgtctggtccggaaggtggcggggctagagtggtgggcggggccatgcggggaaggtctggggccagtagcggggaggcgcctggtccagaaggggccgggggcggggcgagagggggcggggcgagaggggggcggggccatgcggggaagggctagggccgcagcggggaggcgcctggtccagaaggggctgggggcggggcgagtggggccgggagacgcctcgtccggaaggggccggggctctaggccgcccagccccggggccaggaggtgcaggggggccgggcagggtctgcagagggctgcactttctgcccccagacggctcgcccttggggcctccagggtccccgacctccttcacccctgctggagcccctccgacgccacgagcctcccagccccgcggggacccggctgcagcgccgacgagactgcgggaggctctgggcgcgtctgggcctgaatgctgggttcggggacccggccgcggggaccgtcctcctccggggcttgaggggcgtggcgcccgcacgtggcccacgctcggtgctcgcggcgggaagggaagcaggtgtgggtggggagcagagaagggtaatggggagagtcccttccgaaggtgttcaggcgcccagagcctcagaggcgccggggaagcgtcggggaccacagacaccgttcccgtgcgtaaagctttccttccaggagcggggggatgggaacagagccccccaccctcaccatcttccagaggggtcctccagcaagagagtgccccagccaggagagcccccagggcagaaggtcacagaccccttctgctcaggcgtgaggtctgtgctgagtgctgggcggacaccccggctcaggcctctggcagcctggtgccgcaaggggacctgttaggagctaggggcacaggctggtgtgctgactccctgtgagtgagctttggaatggggagtgtccttgtagctcaaggtcgcagaggagagtaggcccccgcgtggatcccagagaagaaaaaggtgggacagtgccaacaccggggtttaattctgagtctgagagcaggacgcatggtgggggcgggtggttctggagctgggccccggcctctgctgggctgaccgtatttgggggcctggctgggcctacttggaggtccccttcttggatttgctggtcaggaaggcctctgactgttgcagggggggcactttgacgcctttctgcttcagctgattatagtagtcgcttctctctgagataattctctacacaagaaacacagccgtcgaggtggccttcccagttcctcaccttggccttgaggccggtctgcacagtccgtgccagctgcccgggacgccaccctctcctcctcctccagagaggcttgctgcagcaggggtgtgctggtgaatacttacaaccggctctccagggggagaaaaaacaaacaaccctcggctttgtggcgttgccagtttctgtggtgggaatattcccacagtggctgattttcagccacggaagtgaagtcacagaatgcggagccgggggcaggtgcacaccaccagcccgcagaagcctgcactaagccccctcttcagccctcttagagttgtgaggagccccagactcctagagatctttgaggtcgtcacatctgtccctcaagtcccttctgtcctgtacagagggaatgttgtccccacctctcttccattctcctctctgggccgttgctggttcatgtcaggctatggcaagcaagcaaaggtgctcttccctggctactgtgcggtgggaataactccctccatcctctgtcttccctcttctcttcctctttctctccccttcctcctcccctcccccagacaac

SEQ ID NO: 2067 - DNA, 4001 bp, Homo sapiens
aaggcagcggtccccaatctatatttggcaccagggaccagtttcgtggaagacaatttttccacagatgggggttggagagggatggtttcgggatgaaactgttccagctcagatcatcaggcattagattctcataaggggcacacaacgtagatccctcacatgcgcagttcacaatagagtttgcactcctgtgagaatctaatgccgctgctgatctatcagaaggtggagctcaggcggtaatgcttgccagcttgcccaccgctcacctcctgctgtgcagcccagtttctaatgggctgaagaccaccactggtctgtggcccagggggttaaggacccctgcaataaggcagcatcatgaaatttaaaaaaaaaaaaaaaattgcagcatctccaagactcccccgcttattgtctcagcaccaggcactatgatgacaatttacacactaatcatcatttgatcctcataacacctctatgatgtaggaattattagcccagactcttgtgaaggccacaaaggctcacagacattatgttaacttatccaagatcactagaagtgatagagccactgattttgaacccaggcctctccaatttcaaagcctacactctttctagtgggaagaacacactgcagaggtatacggtttctgtccaaaccctggacttagggagagcttcctacagttttttcccatcagcctggcatttcattacctagaagagctttccttttcccaaactctgagattgtactcagggatttatgaaattcagagacatagtaatagttaaaagaggcacctctgaagaatcccaaacctaatacttctccattttacttccacctttaaagcaagtcctctgtataagtaaatgcttccctaaatagcaactgtccgttcagatttccaaacctgtcttaaaacatatcgcgcatgagttcacaactatctctcacatgcagcataaagtctctcgctaccgtcctgctcacattctaatcattcccaaataagtcaattcattcctttattcgacacttataaccacttactctgtgtcaggcacgatgctggcttaccctgtctgcgtttctcaagacactttaagctccaaaaggctaagaaccgtgtctgtctggcccaattatgccctatccatccaggcacctctcctaccctgcctggcagagtgcccaaaaaaggtctgctgaacgaatgaatgacagcccaaactccctagtgtaaaatcacaacatcctccacccactctcccccaaaaggtggcaggagcataacagatgcctttgctgattacaaaaacctaaagactccatcatagtcgtccccaggcagggtatcacaatgaaagaggcaaaagtgtctgaaaaacactgtgacgcatatttccagcccggcatggaggacgtctgccaaaagcatccggtaaaggtcaactgggctgctgggaaacctgccccagtgcgagggcccggaggcccaacgaggccagaagccgtagtcccaaattcaagaactactaacaaggacacaggaggcctgagaaggcggaagaattagccctgacagtcactagagcgcagtccaggaatgggagcgcaagtaaggcgaaggtccatccaaatggctacccttctcccttctgtgagtctcccggtcccctgtccctagcccacctcattcatggcctcatcaacgtccgtcctcattgaggtgccgagaagccctgtctgcggagggctacctgggctcccagacttggcaccagaacacccgccagagaggggagctggcagatctggccgggaccggggtggaccctagcgatcactcctcccgtaactcagaggttactggcctgggctgacccgacctgctcgccgggaccgcgcgctcacctgcggcccagcccacactccccagtgcggcccccgctctccgcccgctcgccgggagcacggaagtcgccgcacccagcggcccgcgggaccttgccctgtgaccctgcccactggccgccggctctctcggagcgcagggattggctgaacttcagccaaaggacggaaggaagctaggcgtccgcaactgggccccactgcgctgaaatggacgtcgcgccctctgttggccgggaggtttctcagtgatgtcgccacgtgttttctgcgtggaaaaagtgaaagatcatccagtcatttttttcaactgatgtttattaggcgtcttctaagacctaggtctgggcacgcaaaaacaaaagacatgatccctgacctcaagaagctcttcttagaagagtatattttagtgctttaagacctcttgggatccgggctagctttctagtgaccttgggaacattattaacctgtctgagcctcccttccccttctgtgtagaggtaataacacccatttcgcaaggatggtgtgagggttggaagagataatatttgtaaagtactgtggcaggcacacagccagcagggaaataaatgtggctattgttagtgtaaaaataattcaaatatagtaaaacctaagtcttacatgacctcttgggtacaagtattcacttcctcctctgtgtccccactgtaccctatacagacatcaattttatcatatacagaaaagtcccaaagctcaagcttgttaatgctcccacaaggcccttcccaccctcatcccactaatctcagcctgcatatttattttgctcgcacatactaaacccggcagaccacactgtttcacacctcagtgccttattgatgctttttcatctaccttcccaccttttttgttgttgttgttcaatttcactcttgttgcctgggctggagtgcaatggcgtgatctcggctcaccgcaacctccgcctcccaggttcaagtgattcccctgcctcagcctcctgagtagctgggatcacaggcatgcaccaccacgcccggctaattttgtatttttaatagagaaggggtttctccatgttggggaagctggtctcgaactcccgacctcaggtgatctgcccgcatcggcctcccaaagtgctgggattacaggcgtgagccactgcgcctggccgcttttttttttttttttaacaggactctcgctctgttgcccaggctagagtgcagtggcacaatcatagctcactgcagcctcaacctcctgggctcaagtgatcctcccacttcagccttccgagtagctgggaccacagatgcacaccaccaggcctggctaatttttgtactttttgtagagactgggtttcaccatgttgctagggctggtctcgaactcctgagctcaagcaatccgcccgcctcagcctcccaaagtgctgggattacaggcatgagccaccgtgcctggccatgtagtgcccttcccacctttctttactatgccagattgtgctctggcacaattttcaagcttaagggtcacctccagaggaagcctcatacatagactgcttatcacattagacacccttcctctattatctcaaacagctcaaagctaagctctggcagtgaagatggagaaaagggaacagtattgtaggggccaaggttcactgaaaatcaactgacaaaaggcagattaataggagaaaagacatacaaaattttattttaacgtgcatagcacggggcggggaggcgagggggtgggaagggaagggtcacaggagaatgattacccaataacccaatggggtacagaagcgtatacactctttttcataggggaaggggagagatggagaatatagacaattcttctgagggcagcaagtgattcttagggcgaaaaaatggacagaaattaacttgtaaatgattctctttagaatttgaatgagcccgagaaacaggcatcatcttgtgaaaaatccatccaggcgtagttgccttcctcagtcttcttttctgag

SEQ ID NO: 2068 - DNA, 4001 bp, Homo sapiens
atcaagccactgcactccagcctgggcggcagaacgaaactccgtctcaagaaaaaaaaaaaaatcctatcttcaaccaaacccataccttcatatttacataaaaagctcctgaaaatatcacaaatcattatacatactctggataccgcagaacctgaagattttctgtgaaaaatcactgtacaagcccggggggtggggtggggtggggtggggcggggagcggagtggaatggcctcagggcctcctgaattgaagtagggcaataccaaagtaatgtaaaaacacacaaattggatcactctaatggccaattccatctcaaatgattattaccattatcaattatcaaagatcattcacagttataataacacagctaccatttattgagcacttacatgccaggccttgggctaggtgcttcatatacactcactctcttaatcctcatgtccaccacgtgaggtagatacataacccactatcagagggttaagagacttgcccaaaagtatccactaaaagatctttctgtttatgcccctgtaggtatttctccaacactactatctctgatctaaagtgaacaatcgaaacctcaccaaggataagatgattctccccctctctctttggttccaattctctttgaaggaatcccaatgttctctagacgtaacactataaggcagcggtccccaatctatatttggcaccagggaccagtttcgtggaagacaatttttccacagatgggggttggagagggatggtttcgggatgaaactgttccagctcagatcatcaggcattagattctcataaggggcacacaacgtagatccctcacatgcgcagttcacaatagagtttgcactcctgtgagaatctaatgccgctgctgatctatcagaaggtggagctcaggcggtaatgcttgccagcttgcccaccgctcacctcctgctgtgcagcccagtttctaatgggctgaagaccaccactggtctgtggcccagggggttaaggacccctgcaataaggcagcatcatgaaatttaaaaaaaaaaaaaaaattgcagcatctccaagactcccccgcttattgtctcagcaccaggcactatgatgacaatttacacactaatcatcatttgatcctcataacacctctatgatgtaggaattattagcccagactcttgtgaaggccacaaaggctcacagacattatgttaacttatccaagatcactagaagtgatagagccactgattttgaacccaggcctctccaatttcaaagcctacactctttctagtgggaagaacacactgcagaggtatacggtttctgtccaaaccctggacttagggagagcttcctacagttttttcccatcagcctggcatttcattacctagaagagctttccttttcccaaactctgagattgtactcagggatttatgaaattcagagacatagtaatagttaaaagaggcacctctgaagaatcccaaacctaatacttctccattttacttccacctttaaagcaagtcctctgtataagtaaatgcttccctaaatagcaactgtccgttcagatttccaaacctgtcttaaaacatatcgcgcatgagttcacaactatctctcacatgcagcataaagtctctcgctaccgtcctgctcacattctaatcattcccaaataagtcaattcattcctttattcgacacttataaccacttactctgtgtcaggcacgatgctggcttaccctgtctgcgtttctcaagacactttaagctccaaaaggctaagaaccgtgtctgtctggcccaattatgccctatccatccaggcacctctcctaccctgcctggcagagtgcccaaaaaaggtctgctgaacgaatgaatgacagcccaaactccctagtgtaaaatcacaacatcctccacccactctcccccaaaaggtggcaggagcataacagatgcctttgctgattacaaaaacctaaagactccatcatagtcgtccccaggcagggtatcacaatgaaagaggcaaaagtgtctgaaaaacactgtgacgcatatttccagcccggcatggaggacgtctgccaaaagcatccggtaaaggtcaactgggctgctgggaaacctgccccagtgcgagggcccggaggcccaacgaggccagaagccgtagtcccaaattcaagaactactaacaaggacacaggaggcctgagaaggcggaagaattagccctgacagtcactagagcgcagtccaggaatgggagcgcaagtaaggcgaaggtccatccaaatggctacccttctcccttctgtgagtctcccggtcccctgtccctagcccacctcattcatggcctcatcaacgtccgtcctcattgaggtgccgagaagccctgtctgcggagggctacctgggctcccagacttggcaccagaacacccgccagagaggggagctggcagatctggccgggaccggggtggaccctagcgatcactcctcccgtaactcagaggttactggcctgggctgacccgacctgctcgccgggaccgcgcgctcacctgcggcccagcccacactccccagtgcggcccccgctctccgcccgctcgccgggagcacggaagtcgccgcacccagcggcccgcgggaccttgccctgtgaccctgcccactggccgccggctctctcggagcgcagggattggctgaacttcagccaaaggacggaaggaagctaggcgtccgcaactgggccccactgcgctgaaatggacgtcgcgccctctgttggccgggaggtttctcagtgatgtcgccacgtgttttctgcgtggaaaaagtgaaagatcatccagtcatttttttcaactgatgtttattaggcgtcttctaagacctaggtctgggcacgcaaaaacaaaagacatgatccctgacctcaagaagctcttcttagaagagtatattttagtgctttaagacctcttgggatccgggctagctttctagtgaccttgggaacattattaacctgtctgagcctcccttccccttctgtgtagaggtaataacacccatttcgcaaggatggtgtgagggttggaagagataatatttgtaaagtactgtggcaggcacacagccagcagggaaataaatgtggctattgttagtgtaaaaataattcaaatatagtaaaacctaagtcttacatgacctcttgggtacaagtattcacttcctcctctgtgtccccactgtaccctatacagacatcaattttatcatatacagaaaagtcccaaagctcaagcttgttaatgctcccacaaggcccttcccaccctcatcccactaatctcagcctgcatatttattttgctcgcacatactaaacccggcagaccacactgtttcacacctcagtgccttattgatgctttttcatctaccttcccaccttttttgttgttgttgttcaatttcactcttgttgcctgggctggagtgcaatggcgtgatctcggctcaccgcaacctccgcctcccaggttcaagtgattcccctgcctcagcctcctgagtagctgggatcacaggcatgcaccaccacgcccggctaattttgtatttttaatagagaaggggtttctccatgttggggaagctggtctcgaactcccgacctcaggtgatctgcccgcatcggcctcccaaagtgctgggattacaggcgtgagccactgcgcctggccgcttttttttttttttttaacaggactctcgctctgttgcccaggctagagtgcagtggcacaatcatagctcactgcagcctcaacctcctgggctcaagtgatcctcccacttcagccttccgagtagctgggaccacagatgcacaccaccaggcctggctaatttttgt

SEQ ID NO: 2069 - DNA, 4001 bp, Homo sapiens
gagggatggtttcgggatgaaactgttccagctcagatcatcaggcattagattctcataaggggcacacaacgtagatccctcacatgcgcagttcacaatagagtttgcactcctgtgagaatctaatgccgctgctgatctatcagaaggtggagctcaggcggtaatgcttgccagcttgcccaccgctcacctcctgctgtgcagcccagtttctaatgggctgaagaccaccactggtctgtggcccagggggttaaggacccctgcaataaggcagcatcatgaaatttaaaaaaaaaaaaaaaattgcagcatctccaagactcccccgcttattgtctcagcaccaggcactatgatgacaatttacacactaatcatcatttgatcctcataacacctctatgatgtaggaattattagcccagactcttgtgaaggccacaaaggctcacagacattatgttaacttatccaagatcactagaagtgatagagccactgattttgaacccaggcctctccaatttcaaagcctacactctttctagtgggaagaacacactgcagaggtatacggtttctgtccaaaccctggacttagggagagcttcctacagttttttcccatcagcctggcatttcattacctagaagagctttccttttcccaaactctgagattgtactcagggatttatgaaattcagagacatagtaatagttaaaagaggcacctctgaagaatcccaaacctaatacttctccattttacttccacctttaaagcaagtcctctgtataagtaaatgcttccctaaatagcaactgtccgttcagatttccaaacctgtcttaaaacatatcgcgcatgagttcacaactatctctcacatgcagcataaagtctctcgctaccgtcctgctcacattctaatcattcccaaataagtcaattcattcctttattcgacacttataaccacttactctgtgtcaggcacgatgctggcttaccctgtctgcgtttctcaagacactttaagctccaaaaggctaagaaccgtgtctgtctggcccaattatgccctatccatccaggcacctctcctaccctgcctggcagagtgcccaaaaaaggtctgctgaacgaatgaatgacagcccaaactccctagtgtaaaatcacaacatcctccacccactctcccccaaaaggtggcaggagcataacagatgcctttgctgattacaaaaacctaaagactccatcatagtcgtccccaggcagggtatcacaatgaaagaggcaaaagtgtctgaaaaacactgtgacgcatatttccagcccggcatggaggacgtctgccaaaagcatccggtaaaggtcaactgggctgctgggaaacctgccccagtgcgagggcccggaggcccaacgaggccagaagccgtagtcccaaattcaagaactactaacaaggacacaggaggcctgagaaggcggaagaattagccctgacagtcactagagcgcagtccaggaatgggagcgcaagtaaggcgaaggtccatccaaatggctacccttctcccttctgtgagtctcccggtcccctgtccctagcccacctcattcatggcctcatcaacgtccgtcctcattgaggtgccgagaagccctgtctgcggagggctacctgggctcccagacttggcaccagaacacccgccagagaggggagctggcagatctggccgggaccggggtggaccctagcgatcactcctcccgtaactcagaggttactggcctgggctgacccgacctgctcgccgggaccgcgcgctcacctgcggcccagcccacactccccagtgcggcccccgctctccgcccgctcgccgggagcacggaagtcgccgcacccagcggcccgcgggaccttgccctgtgaccctgcccactggccgccggctctctcggagcgcagggattggctgaacttcagccaaaggacggaaggaagctaggcgtccgcaactgggccccactgcgctgaaatggacgtcgcgccctctgttggccgggaggtttctcagtgatgtcgccacgtgttttctgcgtggaaaaagtgaaagatcatccagtcatttttttcaactgatgtttattaggcgtcttctaagacctaggtctgggcacgcaaaaacaaaagacatgatccctgacctcaagaagctcttcttagaagagtatattttagtgctttaagacctcttgggatccgggctagctttctagtgaccttgggaacattattaacctgtctgagcctcccttccccttctgtgtagaggtaataacacccatttcgcaaggatggtgtgagggttggaagagataatatttgtaaagtactgtggcaggcacacagccagcagggaaataaatgtggctattgttagtgtaaaaataattcaaatatagtaaaacctaagtcttacatgacctcttgggtacaagtattcacttcctcctctgtgtccccactgtaccctatacagacatcaattttatcatatacagaaaagtcccaaagctcaagcttgttaatgctcccacaaggcccttcccaccctcatcccactaatctcagcctgcatatttattttgctcgcacatactaaacccggcagaccacactgtttcacacctcagtgccttattgatgctttttcatctaccttcccaccttttttgttgttgttgttcaatttcactcttgttgcctgggctggagtgcaatggcgtgatctcggctcaccgcaacctccgcctcccaggttcaagtgattcccctgcctcagcctcctgagtagctgggatcacaggcatgcaccaccacgcccggctaattttgtatttttaatagagaaggggtttctccatgttggggaagctggtctcgaactcccgacctcaggtgatctgcccgcatcggcctcccaaagtgctgggattacaggcgtgagccactgcgcctggccgcttttttttttttttttaacaggactctcgctctgttgcccaggctagagtgcagtggcacaatcatagctcactgcagcctcaacctcctgggctcaagtgatcctcccacttcagccttccgagtagctgggaccacagatgcacaccaccaggcctggctaatttttgtactttttgtagagactgggtttcaccatgttgctagggctggtctcgaactcctgagctcaagcaatccgcccgcctcagcctcccaaagtgctgggattacaggcatgagccaccgtgcctggccatgtagtgcccttcccacctttctttactatgccagattgtgctctggcacaattttcaagcttaagggtcacctccagaggaagcctcatacatagactgcttatcacattagacacccttcctctattatctcaaacagctcaaagctaagctctggcagtgaagatggagaaaagggaacagtattgtaggggccaaggttcactgaaaatcaactgacaaaaggcagattaataggagaaaagacatacaaaattttattttaacgtgcatagcacggggcggggaggcgagggggtgggaagggaagggtcacaggagaatgattacccaataacccaatggggtacagaagcgtatacactctttttcataggggaaggggagagatggagaatatagacaattcttctgagggcagcaagtgattcttagggcgaaaaaatggacagaaattaacttgtaaatgattctctttagaatttgaatgagcccgagaaacaggcatcatcttgtgaaaaatccatccaggcgtagttgccttcctcagtcttcttttctgagctagatgagatttcggagaggggaggaaggcaattttgtttcttttggaaagacgttttctcgatcagattaggaaatt

SEQ ID NO: 2070 - DNA, 4001 bp, Homo sapiens
gctggagtgcagtggtgcaatctcggctcactgcaagctccacctcccgggtttaccccattctcctgcttcagcctcccaagtagctgggacgacaggtgctcatcaccacgcctggctaattttttgtacttttagtagagtatttttagtttcaccgtattagccaggattgtctcaatctcctgacctcgtgatccgcccgcctcggcctcccaaagtgctgggattacaggcgtgagccaccgcatccggcccggaattccttttaaatttactttaaaaggaatacattccagcaagtttggagaaaagagaaaaaaatagtacctctaaaccccaccatcccaagaggacatgaagcatagtacagccaggcacaggctttgtcctgccatttcccagctgggagatcttcagcaagtgcaatgtcccctctgagactcatttgcctcatctgcaaaatgggtataatgatattagcacctacttcagaggggctataaagagaatttttttctttcattttcttttttttttttgagatggtctcattcccgtcacccaggctggggtgcagtggcacaatcacagctcactgcagcctcaacctcccaggctcaggtaattctcccagctgagtctcccaagtagctggcactacaggcacccactaccacacccagctaatttttggtatttttagtagagtcagggttttgctatgttgcccaggctggtctcaaactcctggactcaagcaatccaccctcctcagcctcccaaagtgctgggattacagatgttagccactgcgtctggcctcaagggtccttttaaacatacagaagtcagaatagattacacctgtgcctagaaccctccaatgacatcccatttcaccctgagcaaaagcctgcgtccttcctatctacaggcacgtggaaagaaaaatgtctgagtcctcaagagagtcttcgaggctatccatgatttggcacctgccccaccccaccatctgccaacctcacccccacttgtcctgcccaccctgcttcagccacgcgggcttccttgctgttcctcatgcacatctcctgtgtgtccacctcagaccccgtgcactgtcctctcttcctgtaatgttctggacacccatgtggctcccccactcactgcctcaaggctccacttgagtgtcacctgatttgacagctcttctctggacgtcttgtaagtaccccctccccacaacccgccttccctgttctactttattttccccataacacttatcatctcctccaatgctgcgtactttacttgttcgtgtggtttgtttttttctccccagatgaaggaattcttcattgagacggggactttcttttcttctctgatatatccctggctcctagaataacgtatggtacaggaaaggacctcatttgttgaatgagtccacgaatctttcctgccacctcctacctctactaattagctagctctcacgtacccagacctcttcgcaatgtcggtgtccctccctggccagctggcgcctccacttaaaatcttcagcctcaaacagcacttgctaaggcccactagctctccccacctgcctccctgcctagctcctgccttgctatctttagaagcaccttcaagctggctgcgagcagcttcccgcagccccagagttcacagtacaaaacaaaggcatagcagacattcccagtgctgtacctggttcagccctggcacctccccagttagccaggaaaatcagccaggcgagcagcctcatcctcggggctcacttccccagagccgtgggattctcaggcactgttgttgttctcaccacaggcttcctaagtagttttctgtggccacgtgcctgagcagaactccttgtcctgttacaggtgttccaagtcctccaaggcgtctggatcctctggctcttcctcctttgcccagcagggtatgatctgggctggcccgaggaggcaggcataccggacccttaagtggaagccacacctctcctgccagtgcagcccctgcccccaagagggaggggcaaacaacagaattgccggtcagcacatcaggtgtattggcaagccccggaaagggggatctaattcagactgaggaatgtgagagggcttctaggagggggtgacacgtttaatcctttcttaacattgtattatggaaacagtcaaacagaaacaggagagagaatggtgtaatgaacccccaagtaccttcctccagcttcagtaattatgaacttatggccactcttatttcatctatactcacttttgattattttatgtatttaaacaacttttttttttttttgagacggagtctcattctgtcacccaggctgtagtgcagtggcaccatctcagctcactgcaagctctgcctcccggattcacaccattctcctgcctcagcctcccgagtagctgggactacaggcgcccgccaccacgcccggctatttttttgtatttttagtagagacggggtttcactgtgttagccaggatggtctcgatctcctgaccttgtgatccacccgtctcggcctcccaaagtgctgggattacaggcatgagccaccgcgcccggccctatttaaacaacttttaaaattttttattattttaacttttatttatttatgtatttttttagagaagtgtctcaggctgggtgcagtggctcatgtctgtaatcccagcactttggtaggctaaggcaggaggatcgcttgagcccaggagtttgaggccatcctgagcaacatagtgaaacaccatctctacaaaaaataaaaaaattagctgggcatggtaatacatgtctatagtccagctacttgggaggctgaggcaggaggatcccttgagcctgggaggtagaagttgcagtaagccaagattgcatcattgcattccagcctgggtgatagagcaagactctgtctcaaaaaaaaaaaaaaaaaaaaaaaagaagggggttgtctcactctgccacccaggctagagtgcagtggcaagataataatagctcactgcagcctcgagctcctggactcaagctatcttcctatcttcctgcttcaacctctggaatagctggaactataggcactcgctacctcacctggctttttttttttttttttttagaaacagcatctcactacattactcaggctggtcccaaactcctggcttcaagtgatcctcccacctcagcctcccaaagcactgggctgacaggtgtgagctatcatacctggccctcactgtatgatgttaaattccagtgatcatatcatcttgaacgtaaacagtatttatctctaaaaggtaaggattctctttttctttctttctttttttttttttttttgagatggagtttcactcttgttgcccaggctggagtgcaatggcaggatctcggctcaccgcaaaatcggcctcccgggttcaagtgattatcctgtctctgcctcccgagtagctggtattacaggcatgcgccaccacacctggctaattttgtatttttagtagagatggggtttctccatattggtcaggctggtctcaaactcccaacctcaggtgatctgcccaacttggcctcccaaagtgctgggattacaggcgtgagccactgcacccggctaggactctctttttctaacacattatcagatctaaaaaaaaaaatagtaattccaccaggcgtggtggctcacacctgtaatcccagctacttgggaggctgaggcaggagaatcacttgaacccgggaggcggagcttgcagtgagccgagatagtgccactgcactctagcctgggcgacagagcgagactccacctcaaaaaaaaaaagaaagaaaaagaaaaacagtaattccttacttccaccaggcagatatgtggtcagtttccc

SEQ ID NO: 2071 - DNA, 4001 bp, Homo sapiens
tctgaccatccattaatgttctaaggttgggggtatgcgtagtagatacaattaggagacttaaagctaaagagaagcatctctcagttcttctcatcccttctaaatccagagggatttgatctttcattcactgggggccagggctggcaactacccatataaagtaagcacctactatgtgcctggcatccatggtcttaggcgatggcttccaggaattgccaggatccctgatggaggctccttctgtgctgcctgacctgctttgctcctgccactgcagacacccacgctgctgcagactccgagccacagcaaggctcagaagatcaagggaccagtcacagcagcctttttaactttgggaaaacccaatgctcacttcactcaaacgttgcaaagtggtgccatgaccctttagctcttggctcaccaattcaaagagccacatcacatacagcccttaagctgcccacggcatgattccgtgtctagttcctttccaggtccccccaagcggaagacagttctggcagggagtctgggcaagattactacaatatttagcctttgtcccttcttttgctacgtcttattgtagaatgaggcacacaggtctgagagattgagtatgctggacttgagacctgtactcaaaaggtccctgcaggaccgcaggtcagcttaatccagcccaggaatctccatttcaaagatgaagaaactgaggttcaaagaaagcaaatcatggtctctactcagagtactggaaggcctgatataaacttaaccccaatgccatgcctcctgccttagtaaatttactgagcacctaaccagtgagaaataggcagaagtgaataaggccagatttcactcccttcactactggtgtgaatggataaaggtaactccactttctctctgggctttagttttctcatccattaagtgaaagacaagactgaattggtgatttctaatgtgcctttaagctctgaaactctcataagagttgaggatataattatgtgttggtgtgtgcaaatgtatatgcatcatatatacaaacacagacacatatatacatatggtatcttacaattaaataccattagcaaccacacatcttgcccaatcccttcctgcgaccatgttttcctaatcccaaaccgaaactggacactgcaactcatcgtcgcagcacctcagaatccagggggtgtggtcagtgcccactggcgtccctccaaacacccatgtaagcgtactttaacatgtaagcgtactttacaagacatatactaagtcattaaattccttggaagaaacggccaatctgaggcagggctggactgtgggtaacagaacacaccgcaggaagcataagttaaaggtgacagcccgtggctgcccaaatttggggctccgctgccaatgcaccgggagggcagtgagtgcccaggcttggaacaagcctggctcggagcccacatttgagggcaggaacctgcacgcccgggtttgcgcatccagcgtgagcaactctgaaaacgtgcagtgcagggcgtgcagcggggcaccggtcctgtttcctctcgcacgtggcgcctggcgtggggctgcagcgcggggccgcagcgcggggcctcctcccctccccgccccccaccccgccccaagggccggcgctaggaccccgcgagccgcacgcacttcctggcgccgccgtccaagcctcccgctcggcgcccccggctcccgcccgccgccgccgccgccgccgccctacctggtgaagcagtactcgcagtggttgccccgctcgttgaccgtgagcacgtaggcataggccgggcaggagaacagcaagtcccccacctggaagggctgcagagcccgcagcccccggcctttgcccgggctgcagaagcgctccaggccgccgaggccctcggccctcatggtggcggcggggcgcggccgccggctgtgcccgagctgcggctcccggcgagctgttattggagacgcgtcacctagagctgcggggggcggggtgggagccgcccggcggacgcggcggcggctccccgctccccggaagggagggcggccccgcccgggcctcgcgcgcccccgcggggagggggacgggcccggcggccccgcctagcgccgcgaccctcggcggccgccccgcgcgcgctccgggccgtttccggtgtggccgcgacaaagagccgcagcccctgtggcttctgcgaggaggcgtgaggcgtgtgcgcctccgcggcgtctccacggagcgagcgggacgcgccctcctcctcggtgggagggaggggggtcacctgcggggaccaggtatccgagggccacccctagacagtcagcctggcccgaaggatgaccagcccccggtaaatagaagggggcgaagccagctccgaaaccttacgttcgctgtcccttgtaaagaccctagaggcagtgatcggggaacgccaaggagaaagcggcagaggggaaaccacagtagagaagtttggtgtgcagagggttgaagtgtgcttttccaaggttagaggtttttaaaccttgtggctttaatgggaacgtagtttgccctctgctcctctagtggaattacatggacggaagaggaaatgcattggccggcccagctcaccgagtctctgaggcatgctgcgaacgttgcagaggaagccagagagaaccttgccttcaaggaatttaggctgttgggggataatgcgatgctgtggccagtgtccaggacactgcgctagagtttgcagtagttttaatatgcttgaccacccacgaactgtgatcttagaaaagtcacttgggttaggagtcaaaggatttaaagcccacaaagcctgaaacgtaaatcctatacacatgcacgctattacttttcatatgagaaaggaaaatataatccgtgttccacatgattatgtaaagactggaattgatgtacatgcagtaaagactaaaattgtgacgagatcatttagcagaaaccactacttcaaaataggacctcaaacagttacctgtgtaagttcaggactggttgagcaaagggaaaggattaatatgattggagatgtaaaatcagtggaatttttggcatttcagtaaaatgtctttatcagctgggtgtggtggctcagccctgtaatcccaacactgtgggaggccaaggtgggaggatcatttgagcccaggaattggagagttggagaccagcttgggcaacataaagaccccgtctctatgggaaattaaccacctctcaagtggtgctgaggtgggaggatagcttgagcctgggaagtcaaggttgcagtgagctgtggtgactccattatactccagcctgggtgacagagcaggaccttgtctcaaaagaaaacaaaaaagcccttattagtggcaaactaaataagcctctaacccgtcttcaagtaaaggaagttatgatagtattttcatttatgcattttaagaaacttcgactgactatggccagcaactgggatagaaagatggacatcagccggctgtggtggctcacgcctgtaatcccagcactttgggaggccgaggtaggcggatcacctgaggtcgagagttcaagaccagcctgaccaacatggagaaacctcatctctactaaaaatacaaaattagccaggtgtggtggtgcatgcctgtaatcccagctactcgggaggctgaggcaggagaatcgcttgaacctgggaggtggaggttgctgtgagccaaaatcgcaccattgcactccagcctgcgcaagaagagcgaaactctgtctcaaaaaaaaaaaaaaaaaaaaagtggacaaaatgtagtcctaggtccttgcatttggcacattcaagtttgataataccattagttattgagtattgttgaccaggcatcgtgctccatcatta

SEQ ID NO: 2072 - DNA, 4001 bp, Homo sapiens
actcactgaggactttgaataaaagccagtatcacaaagaagaatggttgagagaatcactctccagcaacagtgagtttcccaaggagcagcagcagcagcagcaccagggtccagtgtctatggtgttcgtggtacctactgcagaatccaatattatcaggcgacagaagtgatatacaccccagatcccagccccagctacttttgcagtgcaatcctaacttggttcagccgatgcccagtcaagtcttggcagactttaaagcaacactgagaactcccccaaaactctttcattaaattccttttttgcttaaatccccagttactgcaaacaggaaaaatgaatgagactaatgaaatagtatggtaaatcaacaagcatcccacccacaaagggtttgtgtagcttattttggaaatgcacaattccgtgtgtcacaagactcaacttcagctctaatgattcaattgccaatttgtcaccatttattcattccaaaacttttctgttccaagaactatcttgaaaggaacgaattgttttcaaccacacagtttacaaaaacttcaagatgctgctctctcccgaacagatgttttcgctgttatcattacttcagaaagcaacagacaaaattattatttggtagctctaaaatgcaaagtcatattcctgaattatgaatcaaatgagaacaaagtaagaacaatggtcaaattacagatacgagttttgcacttaccgtcccacctccacccacctaaatctcagactggcaggtctgaaaagcggccatgcacaaaatcatcgcactcatctcaaaatagaactcttcttcctcgcacacagaagctcaataatatttgttgactgaatgcagttcctattattcatgtatgttacacatttccataaattgctttcacatagcactttacaccggcacagcgcgtccaggcttccaaaacaccttcacgtgaatccctgcatctagaatggtggttaagagttagacatgcctgcacagccattaaatggcacagcacacgggggacccgtgtctgatgctcccacagcacattaattgcccctctatttcagcccttctggtacactgtaattctctctctcacttgatcagctctttgaggaggtcccgttcctcttcgtatccccaggccacacacaacccagaccacagaggtgcaccgtagacatcaagattcttccacctgctgcaagcctgatgctttaccggcggggcctctgcaggggagcctgatttatactcatcccagctcccacccagccccacgcccgccacgtgtgatttccacagccgcaccaaggaagactgtccagcacacagacttttcgtctcccagcaaaattatccccggcacaacgcttccccctcaagtctgcccaatggctttcccatttccaccgcagcccaggttggggggcagtggctgagcctgggccccctcccagccccgctgcggcaacctaggggggtgtccgggcggggcctgtcagcagcgacccgcccccgggcacacgcgcgtcaggggcagcaccgccaagctgcctgtgcagccccatccagcaggagtcccgcggctgccggccgcccgacgcccccccctccccagcaccccacacagctcgcgactcaggtaggcgagggcgctccttacgcacccgagaaggcagcggtcgcagacgacgccacgactccccttgcacaccgtgtacgccaagggatccgagcggaagagtagctctccggggcgcagcggggtcacggcgcgcagcccgtttcccctcttggcggttgcgaacttttccaccttcagcggctccatcctcccgcagctccggcacctcagacggctacccgcgtccagcagcgggcgtctcacgggctgccgggacccgcgcgcctgcgccctgcgcgcacacgtacgcccgaggggcggggcgggcgcggtggggcaagagcatgcgcagatggagtctggagggacggctggagtggagtgtgtgggacctgaaggtggtcgtaaggctccgcgtgcggctcgtgcccatggcgactgcgcagaagacaggcggggttttttttctccctctaacattgtattacgatcattttaacgcatacggaacagttgaaaacagtgcagtgaacacctatatacctccgcctaaatcagacaacctagcactttgccatttctgctcgtcactctctccccacctgtagctatgtatacacgtattgtcgttaaactatttcaaagttgcaggcatcatgacatcacaactagtactttgcactgtaacttttttttgttttaggacggagtcttgctctgtcgcccaggctggagtgcagtggcgagatctcggctcactgcaacctctgacctccgggttcaagcgattctcctgcctcagcctccatagtagctgggactacaggcatgtgcaatcctcccgcctgggcctcctgactagatgggactataggctcacgccaccatgcctggctaatgctttttactttcctccagagacagtctacctatgtcgcccaggctagtcgcaaactcctggcctcaagtgaacctgaacctcctgcctcgacctctcgaattgctggaattacaggtgtgagccaccacacccagcttaattttcttttttgtttttggggtttgttttgttttgttttgttttttgagacggagtctcattctcgcccaggctggaatgcagtggtacgatattggctcactgcaacctctgcctcccgggttcaagcgattctcctgcctcagcctcttgagtagctgggactacaggcgcctgccaccacgcccggctaatttttgtatttttagtagagacgaggtttcaccgtgttagccaggatggtctcgatctaaccttgtgatccgcccgcctcggcctctcaaagtgctgggattacaggcgtgagccaccgcgcccagcccacccggcctaaatttcttagtttggacaaacgtgccatggtaatgcaaaatgtcattattaagggcagctggatggaaggtgtaggagtacactatagtgcctttcaatttttctgtgtatctaaagtcatttcaaaagtaaacatttattttaaaacatgaaggtggttatgcttccatgagtgtaaagtacaaaaggcaggctcgtggtgctgtcagaagtcagaacactggtttcagggctgggggtgttgggaggggctgggcatggttggctttgtgatctgggggctggtgtgttccatctgtgaatatcttttaagctgtgcacttaccagggatgtaagtcatatcttaataaattttcataagtttgacaaaaaataaaatgaggatgggaagcttgtttgggttgtggggcctcgggtgcttatccagccatgagctgtgtcccagatgcttctagaagcctggagggagctgagaacattccaagtcgaggtggcagagccaaggccctgaggtgggagcgcaatgctgcacatccccagctgtgaatggggtgtcctggtcagaagcagtgctgtgtgcactgcagggccggcaaatccacgtccacattgtggcttggtgcagtgaaagccaatctcagccccctccacagtgtgattagcctgccagcaggtggccagctggtcctcctgggaaatggtgccaacccagagactgggtgcaagtgtctcatccacggaggggcgctcagcagtggtgtcagcctggtgagcctcggtaagggcacgtgcaggatgctgagcctcttccgttcccatgcccgtctcaaggccacttgctccgtgggcccatccagcaagcatggtggccaggaaagaagccggctccattcacagggcgtgctgttttgctcacctcaggaccaagagcatcctccatagtgattctctttggtggga

SEQ ID NO: 2073 - DNA, 4001 bp, Homo sapiens
tttaactactccattatttttaatcctcacaacaatcccattattagtccatgtactaacaaggaaattgacccagagttgaggtaaatagtcccaggtcataaagctagttcatagaactagatctagaaccctggcctccagcactaaaaattacataaataaataaataatctttgctcacttatttttttaaagaccagtgaactatgctcagcccaggctagactcaaactattgggctcaagtgatcctcctgcctcagcctcccaagtagccaggactacaggcacacaccatcatgcccggctttcaccattttttcactcttttggttcagtttaagatttcatttagagaaaaaaggttttataccatttaaaataaaaacattgagcaccactagtctatatagtttatttatctattgccactcaaactctgatgtcatttttatggtgttctggttgcactgtttaattctgttagttaactttccgtatgttatgccttgaactgcatacatgtacgtagaaactcccacacgtaagtacactagactggaagttcttagagaacttatattctttgtattaggttggtgcaaaaggaactgtgggttttgccattaaaagtaattaatatctcctatgttgcatacagtacaatgcattcacaaataaattttttgagaaataaacttgatttaactgttcaaataaatttttatcctggggtaaatagttttagtttaaactatgctactggtaataataaacaatccttaagaacatcatatgagacagcagttctgcccaacccactcccaatttcttacccatgcggtgtcactaatcaatttataggttggaacaagaaaaaagttttacattacagaactaataaagcatactttccctgcagagggaccactactgtgacttaaaggttctaattaagtttttttctttgaagcttagtattcaaatctgcattcttacttgattagtattcaccaccattatttttatgcagatcacatgaaaaatgaaccctatgtgccagaataacttgcaagaaattactattcatcagcatgaatcaacaagcccacaattagaacagtgtccactgggaaaagtaaaaaaaaaaaaaaaaaacttttactaaggtcatataaaatgaaagtaaagggggaaaataaagaattcatttttgcattgaaaatcatacaaacgttttcagcagaaaattactatgactattattggggctcagaaaatgatatcctgaagtatggtgctttcatatgctgggcacttccgaattttaaaaaaacagaagaccttagaagctgcctcagaaccaaggactctgtaaccttctcctgtatctctccaactcccaaagcacagagaggggctctctctggaatttccttatcagactaaggaaactttttccttaagaaatacaattctcttaaacctcctccccagaaatctcattaaattaccaggaaagattaacctgagaagaaaagaatctataataagtcattgccaagaccagacagactgttcgtctgttcttcagagggcagctttgagacattacccgagagacttcaactgcataatacaacaacctctgttcaccctacagttcctccctcaacttcccataacttgtgggtcccattcagtttccaaagagaaccatttacaaactactgtctgctccttggatccattaaactctcctaaaatcactatcccccaaaattgcctatattcccccatctccctgactgctagaaagagagtgccatttaagctgtggctatctggcctttctgttacagcccaacaggttcttcttacctgctgcccagaaaagccaatacacggagaacagtaggggtgttgcagcagagaaagagtttaattactgcaaggcagctgagcagaaggaggggaggtatctctcaaatccacctcctcgaaagcttggagcccagggtttttaaggataatttggcaagctgagggccagggaatgtatgctactgattggttggagatgaaatcactggagtgttggaactgtcttcacgtgctgagtcagtttctaggtgggggtcacaggacgagttgagtctgttccttggtatgagtcatggtccagatggcatcagtcagtttaccagaatgcaaaggtctgaaaaatatctcaaaaacccatcttagggtttacagtggtgatgttatctcaaatcttgtgacctccagcagtaaccaagctagggaacaatggctggttatctcttcttcactgtgcttattacttagcagaattcaggcccttatcataattctaatcttattgactttcattagttttacaaatgcagtttcagttcccaagcaagaaggggaccagtttcaggaagggactattatcatccttgctttaaagttaaactgtaaactaaactcctttttagttagcttgacctacacccaggaatgagcagatagtcagcttctggggtcagaagcaagataaagtcagctgtgttggatttctctaaccatcataaccttagcaaggtggtttcagttctctgagtctcatatactgtgtggcccctgtgcttctgcacattaatacatttatatgcctcttcccctgttaatcagtctaatgtcaggtcatttcagcactttcaaatttcagagccagagggggaggaaaaattatcttcacacctatactctctaagaccaaaaagcaacagacattctgccacatgctacaagacggataaaccgacaaatattatatggttccacttataagaaacatgaagagaaagtagagtaaaggttcccttgtccccctctgccacagagggagtggcttgcttcttcagcgccctgctgctcaaacctctagggggagcatacagatgggcacgttgtggggctcggaccccatggcagtgtctagaggtgtatgtttacagctcctgaagccccagtgggcatgtgttacaaggtgctcttttaatctagccgtctgtaggcagcttgtgttagtcagctcaattagacccccttccttatcacaaggacaaagggatttctatatcctggggtttcttgctttggtgaactggaagaatcagatcacatgtaggcttggagaataagtgcaaggttttattgagtaaagtagctctcagcagatgggggagccagaagggaaatggttttctcccggagtcgggcgctcggtgacctgggctctcctccaaccgtcccagccaaactccacgtcgttctgctggccgacggcctcccagcgtgctggcatctgttgctgtgctcttctgcctgcgtgctcccctttgtcaggcctctgagcccaaggtaagccatcatatcccccgtgacctgcacgtatacatccagatggcctgaagcaactgaagaactacaaaacaactgaaaatagccagttcctgccttaaccgatgacattgcaccattgtgatttgttccctccccaccctaagtgatcaattgactttgtgacaataccccctccccgcccttgcgataatggactttgtgatattcctccgcccttgagaatgtaatatcctttgtaatatcctccccacacttgagaatgtactttgtaagatccaccccccactagcaaaaattgctcctaactccaccgcctatctctataagaactatagataagttcttatagggataaacctataagataaacctataagaactaatgataatcccaccaccctttgctgactctcttttcagacttagcccgcctgcacccaggtgattaaaaagctttattgctcacacaaagcctgtttggtggtctcttcacatggacacgtgtgacaccctccacgtcctcccgatgtccggccacttgtcttcttccaccaatgtgttcct

SEQ ID NO: 2074 - DNA, 4001 bp, Homo sapiens
aagaaaacggccttggccctgagccaaattcctgaaaccttcctataaactccataacccacaccccttccaagagacatacctagggaggacatcccttttcccttactgcccgtctcgaggactaccgcagcccactctatatgaaagttcccctaacaaaacctctaggcagggcctggcgcagtggctcacacctgtaatcccagcacttagggaggccaaggcagaaggattgcttgagcccaaacgttcaacaccggcttgggcaacacagagaccctgtctctacaaaaaaaaaaaaaaaaaacaaaaacaaaaaaacaaaactaagctgggcatagtggctcatgcctgtagtcccagctacttgggaggctgaagcagaattaaagaattcatcaagcccaggaggtggaagctgcagtaagctgtgatggtgccactgcatactgtctcaaaaaaaaaaaaaaaaaaaaaaaaaaaaaaaaaaactgctctgggcttaccatgcatttagcacttctttctttggtatcccaactggtcccacctgaggatagtgtggggaactcccttgccgccacttttggggtaactccagttgcaagtttggcaaaacactcctcatgtcactactccgatgtcctcccacttcagccctgctcatgtgtacacagccccaaatccctacccacactcccaccacaccttcatttcacaccctccctcattccccaccatcttctccagacacccgtcatcccctggggccccttgccatgccctccaggtcccctgtgggccccattcgcccatctaggttaccctgccccctccagccctcccaccattttcctccaggtccccaccatcctctctagatcccatgtcccctccaggtgccactgatccctccaggaacccactgtccccatcccttccaagtgctaccgtcccctccaaatccccactgtcccctccaggtcctcaatgtccccatctcctccaagtgccaccgtcctctccaggtccccaccgtcctctccaggtccccactgtacccatcccctccagatcccaccgtcctctccaggtccccactgtccccatcccctccaggtcccaccgtcccctccagatcccgtctccatcccctccaagtgccaccgtcctctccaggtccccaccatctcctccaggaccctaccatctccgctagatcccaccatcccagggccccccagctctccctctgggtcccaccgttctctccgggtcccatcatccctgggcgcccccgcaccgccgcactcccgcccccagaaccgcctctgtccccgcccctctcccagcgcagcccgcataccccccaccccccggggatgcgggaaggagggctcgggctgtgtcagccacagcgcgcggactgagccgagggcggacgctacggcttggcttgggccgggcgcccaacagaccaacaccgtcgctcacctgagggacgccagacgagtcccagagccgaccgcggcgcctcggccgctcggcgcctgcgcagtgaagaccgcggcgagccgcgcgcatgcgtgcaggcccggagccccaggcgctggcggggcagaaacgcggcgccctgcgtcttctggttccgaggctggtcctcaccgtttccgctccggcggaagtgaggaggagggtccttcgacccgtgctgagctggatggaccgcgagacgcgcgccctcgccgacagccacttccgaggcctgggggtcgatgtccccggcgtcggccaggctccgggccgggtagccttcgtctcggagccgggcgccttctcctacgccgactttgtgcggggcttcttgctgcccaacctgccctgcgtgttttccagcgccttcacgcagggctggggcagccggcggcgctgggtgacgcccgcggggaggcccgacttcgaccacctgctacggacctacggtggggcggcggccgcagaccccgggcggggaggaaaggccggcgggacccaggcccgggaggcccccgcctagagaggggcaccagggagggtgagggaggccaggcgcgtggcccctggagagttcctctgcagacggtttggagtgaggacggggcccagggagatggcatggaccgtgcctttcatttcaggagacgtggttgtaccagttgcaaactgtggggtccaggaatacaactcgaaccccaaagagcacatgactctcagagactacatcacctactggaaagagtacatacaggcgggctactcctctcccaggggctgtctctacctcaaagactggcacttgtgcaggtaatggggcttgggacgcaccgaggcgctgccttccctagcgctgcgtgaacccagaggcctttctgatgaaggtggcccctgggtgcacaacggagctatttttccccgtgaggcactttaatcagtttaaaagaaactggattgtcttccgcatggctgcaagtgttgttctttgggaggtcaatatggttttttttcctttttttttgagagagatctcctcagcctccctagtacctgggattacaggaaggcgtctccactcccggctttttttttttttttttttttttttaaagagactaggtttcaccatgttgcccaggctggtcttgaactcctgagctcaggtgatgcatccacctcagcatctcaaagcactgggattataggcatgatcagtactttctaataagcagaaccattgtagtcagactgccccgccccctcccccgccagcagcgtctggctcagaggagggtctggggctctttgggggctgcagccatctggaagctccactggagccgattggtctcagttgccccactcgtgctgccctagtctcctcgtgcctcacgtgctgtcggtggtgcccttgcgccctcctcacagggactttccggtggaggacgttttcaccctgcctgtgtacttctcgtccgactggctgaatgagttctgggatgcactggatgtggatgactaccgctttgtctacgcggggcctgcgggcagctggtgaggccacggatgtgggagtggaacccgaaggggcctggtgacagaacggactgggaggcccagggtggcaggaggggggctgcttggcacaggcctcacagtgggtgccatcccttgagaccaaggggccacccctccttcagttggaccaggcctctggggtgccaagcaaagcccataccagcccctacaggcatgaaccaggcgctcttgctgccgcaggtccccgttccatgctgacatcttccgctccttcagctggtctgtcaatgtctgtgggaggaagaagtggctcctcttccccccagggcaggaagaggccctgcgggaccgccacggcaacctgccctacgacgtgacctccccagcactctgcgacacacacctgcacccacggaaccagcttgctggcccacccttggagatcacgcaggaagcgggcgagatggtgtttgtgcccagtggctggcaccaccaggtgcacaacctggtaatgtgctgcttctcctgccccctatcaggggccttcctgcaggaagacggcagcaccacctccccactctcccagccagagctgggctggaatggggtggctcatgggtgaggctgaccccttcacaaggtggtgtcgctgaggcctagcctctgtttcacccactgccggtccctgggtctacttgctctgggttcactgtggcctgaggtggtccgagcccgccacccacttccctgctgagcaagccctgctgggagacaggagggccctcttggctgcagagggctggaccccacagtgggttcctggcgcaggagatgtgggttggtcagggggcacctgccatgggctcaggcctgcctgcactgtgccccttccaggatgacaccatctccatcaaccacaactgggt

SEQ ID NO: 2075 - DNA, 4001 bp, Homo sapiens
tttcccgagacggagtttcgctcttgttgcccaggctgaagtgcaatggtgcgatctcagctcaccgcaacctccgtcccccgggctcaagtgattcttctgtctcagcctcccaagtagctgggattacaggcatgcgctaccacgcccagctaattttgtatttttagtagagacggggtttctctatgttggtcaggctggtctccaactcccaacctcaggtgacctgtccacctcggcctcccaaactgctgggattacaggcaagagccaccgcgcccagccgatcctgtctttttatttaaaaaaaaaaaaaaaaaggccaggcaggccgggtgcagtggctcacgcctgtaatcccagcgttttgggaggcccaggcaggtggatcactcgcatgcaggagtttgggaccagcctgggtaacatggtgaaaccctgtctctagaaaaaatacaaaaattagctggacatggtggtgcatgcctgtagtcccagctacttgggaggctgaggtggatggatcgcttgagcctgggaggtagaggctgcagtgagcctttatcatgccactgcactccatcctgggtgatagaccttgtatcataaaaataaatagccaggtgtggtggttcactcctgtagtctcagcacttcgggtggccaaggtgggaagctcacttgagcccaggagttccagaccagcctgggcaacatggagaaaccctacttctacaaaaaaatacaaaaattagctgggcgttgtgcacgcttgtagtcctagttactcgggaggcggaggcagaattgcttgagcccagggggcggaggttgcagcgagctgagattgagccaccgcactccagcctgggtgacagagggagactgtcacacacacacacacaagaatgtaaatggcagcaactgaatagtgagaatgagacgaattttcctaggtatttttcaagtactgggagaagtgaatttccctttccccaaagaattttaaaattacagtggctttcactgtgttgaggacttacaaaaaagggcaaagaatcactgttggtaagatattcttttacctgagcattctgtagaatgttgttaaccaagacaacgcgtcgccgggcattaagtagcttcttaacataggggtcaagatccagggccaccttctgatcctcatttatgcggcacagttctggggatggaagtaaggtgcagctaagatctaacggcttatctcttgttctgagggaaagcaggctggtaatgggatggaaaacacttgcacccaaacgggccacagccattagagatttaagacatccctgaaaggaggagtcctttggcagccctgatgccctggaagcaagtgacagaaactcagcccaggggttggcaaaaacctaaggtcctgaaagtgggctgaagaattccgggtacacagggatgctcactcacctgtggctaggttgtcaatttgttcccggagctctacctggctctctctgcaaagaggtacaaggcctacaaggtcaggcagttaccggagctcaggaaacgaactcccctacgtatttaccaagtactgagagaagccggcctccgctgaaccctccacctgcggccttcccgcctgtcctccccgcctcgaatcagtttcctaaatttatgcccactcccagccagaacactttcttggccccgcccctacaaagccagagagacaggccccgcccccaacttccctcccgggcacctgacggcgtgtacgtgagagtcgagctgctgcacagcgggtcgcaggaactccagcagcccttcggcgaaaaggtcgcggcctgtgggccccgccaccggggtccctgcccccgatacagcggcggaaccagcccccgccatcacgaattgtcctgaagcccgaaacctgccgcgagggccgccgggaaccggagccgcgccgcactgccccgccccgtgagggggcgcccgggaaatgctgtctccaccaagacaccggggtttctgggaaatggagtctagcgcgaaccgggcggggaggagggccaggccgtaggagtagaggccttgtggctggtcttgaaaatctccaaagttcaggttgtagaaaggaaccagtttttggagtggatacttttcgttttctttaaaggtgaaaataaacgcgaatacctgcagttgtccatagccttcccatgttaactttatgagatagccgggcatggtggcgggcacccagctacttgggagactgaggcaggagaaccgcttgaacccgggaggcggagattgcagtgagccgagatcgcgccactgcactccagtctgggcaacagagagactccgcctcaaaaaaaaaaaaaaaaaaaaaaaaagcaacccaaaccaaacaaaaacaaaccaaaaacaaaaacactttatgagaaagccacattatattcatagtatcgttttctatttctaaagagtttattgtggttggttgtttttaagacaaggtctctctctgtcgcctaggctggagtgcagtgccaccgtcttggctcactgtagccttcacctcctggggtcaagaggtcctcctgcttcagtctcccaagtagcagggaccacaggtgttagccaccatgcctgactaatttttcattttctgtagagaagaggtctcactatgtttgttgcccagactggtctcgaactcctgggctcaggtgatcctcccaactcagcctcctaaagtgctgggattacagacgtgagccaccacgcctggtctatttctaaagagtatatttttaatggcattaaatatgtaaaaaactgcatgtatccgaatttcattcctttttaaggctgaataatataaacatgcaggcagggcatggtggctcactcctgtaatcccagcactttgggaggctgaggcgggaggatcacctgagcccaggagttcgagatcagtctgggcaacaaacctagtgagactctgtctctacaggaaataaaaaattagccaggcggccaggcgcagtggctcacgcctgtaatcccagcactttgggaggccgaggcgggtggatcacgaggtcaggacatcgagaccacggtgaaaccccatctctactaaaaatacaaacaattagccgggcgcagtggcggactcctgtagtcccagctactcgggaggctgaggcaggagaatggcgtgaacccgggaggcagagcttgcagtgagccctgatcgcgccactgcactccagcctgggcgacagagcgagactccatctcaaaaaaaaaaaaaaaaaaaaaaattagccaggcatggtggctcacagctgtggtccccgctacttgggaggctgaagtaggaggaccttgagcctaggaagttgaggctacagtgagccaagatcgtggcactgcatgcacttcagcctgggtgacagggtgagaccctgtctcaaaaaataaaaattaaaaaaaatttttttttgagaccgagtcttgctctgtcacccaggctggagtgcagtggtgcaatctcgctcactgcaagctccgcctcccgggttcatgccattctcctgcttcagcctcccgagtagctgggactacaggcgcccaccaccacgcccggctaattttttgtatttttagtagagatggggtttcaccacgttagccgggatggtctcgatctcctgacctcgtgatccacccgcctcggccttccaaagtgctaggattacaggcatgagccaccgcgcccggccataaaaataaattttaaagtttccttagttcacttatttttcctttcatttttagagacaaggtctcactctgttgctgaggctggagtgcagtgatgttatcatagctcactgtaacctcaaacttctgggctcgagccatcctcctgcctcagcctcctaagtaactgggactacagtcacctgcccccatgcctg

SEQ ID NO: 2076 - DNA, 4001 bp, Homo sapiens
tctgttatgaatagatgttaccactgggagaaaccaggaagagtatatctccctgaattatttctgacaactgcatgtgaaccaataataatctcaaaataaaaagtttaatttaagcaaacaagcagaaaaaataaatacagccagttttcagaaaagcccatcggaggtacaagtagagatgtaggcgagcgtacgtgcacatgtgtgcacacacacaacacacacacacattcctctttagctgtgataggaaaaggctctcaatttggacccatcaaaacaccccaatccacttacctgcttcactttgactgttgagtggtgaggacttcggtttctcttactgcgaggagacttgcttcttctccctgaggccttgtttttctttttgggtggggacctattcagagcatggtacacaggattttatcgcaatttcccttcccccataaaaattagcttccagtatcaggcttacctactaacacaaacaccgcatttgtgaaggtctctgccggtcacattaaaggagtcacgaggttcactttcctagccctaacatctcccttgcattccatactcacatagacaactgtctactgaaccttctcacttaggtaacataactcttaattcccaacccttcaaaaacctttcctctcctactccttgccatctcgctgattggcatcaccatccgtaagtcacccttgactctttatccttcactaccaacacccctaccatcaataacaatccctccatcctgtggttctacttcctccctgtgccatctcattcctaccacccaccttcttgaccactataatccaccgacactggctttttcccatttcaatcataattcattctacttcaggttctttgcagatgttgtttcctctgcctggatctttaagaggttggatcattcttatcagtcaggtctgggctcaaatggcacctctttagagagtcctcctccctcttctctccaatctctcactatcacattactgttttaatctatcaataatacttgttactaactgaaactattttgtttatttttttatcatgtctcagggttagagcatagccaatttggcatcggtgaagatcatctaactgaatcacccttgcagccccaatacctagggcagtctttaacacttaataggcactcagtaaaactatggtgaatgaatgcataaataaatgagtctagcaagaagtaactttttttttttccccagtttctgttaggtagctcgcttagacctcgatgtgaaaacctttctggcaggtaaccggaaagacaacgcccacactccatttgtgggagggatggggaaaatctcaatccaatttaacagattatcagtgctatctgttgggccacactcttcgaagtgctaggaacacaagaatgaaggagtgggatcctgccggttagtcattaggcgttgaacaccgagctataatgcaagtgacagagcaagcataacacaagcacgactggatcactctcaacagcccctcaggattaagtccgggctgctgcgcccaccattcaaaacctgtttcggacgctagccctgcccgcctttctgaatgagcccaacccaatgtccatcctggactgctcccccacttaccggctaactcctcgggctcggttcccgcggtggcccgagcgggccggctcgctggtcggcggagacgggctaccaccggagtggtccggacggcggtgggcgggaggtgcgacttctgggctgagacgctcctgcttcaccaccacccccgccggcagcaccacgtccccgtcccggtgtcttcgccggctccctcgctcccgttcgctcttcaccgccttcattctgtgattttggctgggcgaaagaaaacagatcagttgagctcctctagctggaggaaatgacgagtttaactcctggacttccgcttccggggtgcccaggctcccagaaatcctcgcggcaaaggttaaacacgtgactactccctagtgggtgtggccgcagcgacaggcttgggtggcgggagtttcaagtttcaaaaacaaacttctggctgggagtggtggctcacgcctgtaatcccagaactttgggaggccgaggctgacggatcactgaggtcaggagttagagaacagcctggccaacatggcaaaaccccgtctctactaaaaatacaaaaattagccgggtgtggtggcgcgcacctgcaatcccagttactcgggaggctgaggcaaatgaatcacttgaactggaggcgcaggttgcagtgagcagggatctcaccactgcactccagcctgggcaacagagcgagatgtctcaaaaacaaacaacaacaaaaactgggaaaaagcaaacctctcaaggctgtttgttgccacattattagtaattacaaaacgtggaaacaatgtaaataccagcagtagggaagttagccaaattaatgggtgttatgtggccattagtaaaccatttacaaactttaaaaaccctgacttgttaacgataaagcaggatacaaaattgtgtgcaaactataattacatttacatttggaaatagaagggaggaagaaatggaaatgcaatcagagatgataacccatgggcaaatcattagcttttcaaatcattagcttttcctcttctatttcctgaactttctgcaatgctgttggggctcagaaaccaaaaccccaaaatacggctcactgacaagctgaactgaagaagcctcaatgttcctttccagtgcccatcatctctcccaaagcacaggtctttatctgcctaagatccagactaccaaaaggaataattgtttctttcttctccacccaagaatgtaatcacacctgaccagagacccttatactgtcaaaagtagctatttacagccgagcacggtggctgcagcctgtaattccggcgctttgggaggccaaggcaggaaaatcgcttgaagccaggagtttgagaccaaactgcctaacatagcaagactgtctctacaaaaaaattaaatttggcaggggctagtggctcgtgcctgtggtcccagcagagacaggaggatcgcttgagcccaggagttggaggctgcagtgagccgtgatggcaccactgcactccagccagggctacagagtgagaccctgtcttcaaaaaaaccaaaccaaaacaaaaaaaaaaacacaaaaaactatttacaaatttatctctgttcccttattcattcattctgcctagtaatccctgaacagaattcctccttctcccaccctcacaaacctgttttaccaggagggtatataagcttctgaacccttttcggggtgggtaatcatactgtgattctccccgtgtatacattttaaatacatttgtatgccttttctccaattaatctgccttttgtgaattgatttttgagcgaatcttcagggggcaaaggggaggtttcccattggctcctactttgtcatttctccatttaattagaaaaatacttcaggctgggcgcggtggctcacgcctgtaatcccagcactttgggaggccgaggcaggcggaccacgaggtcaggagttcgagaccagcctggccaacgtggtgaaaccccgtctctactaaaaatacaaaatttagccgggcatgggggcacgcgcctgtagtcccagctactcagaaggctgaagcaggagaatcgtttgaacccgggaggcggaggttgcagtgagccgagatcacgccactgcacttcagcctgggcaacagagagagactccgtctcaatttaaaaatcaaaacaagccctttcttgcggtgacgacctacccacgagaacatgcctctcgcaaaggatctccttcatccctccccagaagaggagaagaggaaacacaagaagaaacgcctggtgcagagccccaattcctacttcatg

SEQ ID NO: 2077 - DNA, 4001 bp, Homo sapiens
caggcatggtggcgggcgcctgtaattccagccactcaggaggctgaggcaggagaatcgcttgaacccgggtggcggaggttgcggtgcaccgagattgcgccactccactccagcctgggtgacaagagcaaaattccatcttaaaaaaaaaaaaaagaagttacgtgctaggcactgggcaaacagcaatgaacaaaataaacaatggagctcgctgttccagtgggaaagggggaagggagaagggaaggtgagagaaaacaagcaaactatatatgtggtgtcatgtgctatagagcaaaagaagggatggggatggtggctcatgcctgtaatctcagcattttgggaggccaaggtgtgcggattgcttgagctcaggagtgaaatcctgtctctacaaaaaaatacaattagttagatgtggtggtgtgtgtctgtggtcccagctactcaggaggctgaggcaggaggatcacttgagcccaggtggtggaggctgtactgagccagtggtcaacacagagagattgtctaaaaacaaaaaaacaaaaaaagagagagagagaagcaatgtgggttccacagtatgtggtactgcaatttaaaatagggtggtcaggaaaatcctcactgaaaaaattacatttgggcaaatattcgcaggagctgaatagtaaaccatgtaaacatttgtgaagagcaatcccacagagaggacagcaaatgcaaaggtcctgaagcagaggcttggaagagagagtaactgaagccaggtgagcaataagaaattggtcagagaggtaaagggaaagagggcaaataattacaagaattttggtttttactctggatgaagtacaaagccaccagaaagttttctgcagagtgtaatgtgatctgatgtttagaaggattcctttggttattggcttggtaacaggtgctgatacaaaggtagaaagtggaagaccagttagggtcccactacaaaaatgccagatgagataataatggcttaggccatgaggcaatgatggagatggtagaagtagcaattctagacctattttgaggacggtgccagcaggatttattgaggagatgtgaggacactcgtatttcctcgtctgagcctaaacaggacattagaagtgtgatcactatttctatcttacaaaaaatgtagttaggagcatggtttctcagttcgaaatctgcttctatcacgtacttggtaagtctgtttttccatctgcaaaatgggttaataacgttcctaacaggctgctaccaagatcaatggaaatttcatatacgaaacactttagtacaagagtcaatgaatgttagctgctatttagttgttaataatactagtgcagagaaataaagggaaaagcaacttgcccaaagtcccaaaacgagccaacacaaatcatttcccttttttcttccctccctcattcattcattctacacactcttcggaatttttgttctatgccagatccatgttagagtcaggatgcttaaacccgggtcagggttttgagcccaaggtcctcaactctaattctaatgctatctcagggcagtcgagaggctgaaaacgggcgccaaacgggggaacacgtacgcagcattcgcaggctatggggagcttttacagtgtttatgtgctttaactctgcgtagaaactctcgttctgcccccgcaatgcgggaaagggtcagggatcaccagatacagcgctctgaggggaggaagatgagctgagggccaaaggccgcctgcttcttcacttaccgcttgcagcaaggctcccggcgtcgcctgctgctgcccggctcctgggccagaccccgctcccaacagcaactcatgccgctgccgcttgactggaaccagcggcaactctgggcccttacgcttctgctgttctatcatggcggcaaccggtctcttcagcgccgccactgaccgcgctgccgctctcaggcgccacgcaattggttccaaattagtccttcctccacaacttccagcttggaagaaccaatcggctttcaatatttccatttgcaccgccctcggatagtctcttgttattgggcatatctttctgacgtcatgagagtgcgataccaggattggtggacggagctggcgaccgccctaggcgcgctgggtcttgtgggtggaaacgcgctggctgactggggtcggcgtttagttcagcgcagcgactcggggacctggagctgacgcctagtacgtatgaggaagaacggggtgggtggctgcctgagtctggaggcgacgcctcggttgtgcagtctgaacctgcccttctcagctgagggtgctgacagcaaggggtgggaggcgggccccgagtccccagctgtggtaagtagtagcctgggctccctttcggggcaggagcggagccttggggtctctggcggcaagacccagcccctgcggctcccttcttcaagagcgcccatcgtggccagtcctgtgccgggcattcccagggagaaaggcctgcgtcccagcctcctccggtgccccatttggccgaggaggctgacttgtttctgccactgattttgcagtttttgatcagggcctactgtatgcccccctgagagagacagtgatgaaggaaatgtccgactccttctccagagcacagtcttgttgagaaatttgagactcatgcccatgaacgtggtcattgcctcagtcgtcctgctgatattcatttagcagcgcgttgggggtatgttgtgaaccgggcacggtccctactctcagggcgtttaactctggtggggaaaacgttaaacaatgacctcactaatacatggaaatgcctcctactgctgcctgatgctatgagtgcctgaaataagcaggaaggtttttcagaggaaaagatgcctgcgctggtagctgcaggaagtgttgtaattaattaggtgaagaagtgaaggcagaaccttccatagagaactacttgttcagagccctgaggcacttgggaggaaaatgactaaaagcacaaagagccagtgtggctggtacaaagagaatgaagggagtatggtacaagatgaagctgtacgtgatagcggtcagaccttgcaggaatttgtagcttttattttaaaacggatgagataccactgagccgtcttcccccagtggggtgtggtggaggaggggacttgatccctcaggctcagtggtgtgaacagacgggggttggggaagccctagtcgatgtatgtggaccacttgggatatgcagtaatcctggtcagagatgtcagtgaggactgagatatgggtggaactgcagagaattggacagattctagaggtatataggaggtaaaatgggtgggacttggtgatgggttgattttagggagtgaagagaggaatcaaaggtaactcctaggtttctggcttatgtagttgaatagatggtggtaccattcactcactatcacggaatccctcaagctggatagggaacactagaagatgattagagaccagtttttttttgttttttttttttttttgagacaggttcttgctctgtcgcccaggctggagtgtggtggtgcaaccttggctcactgcaacctccacctcccaggttcaagcaattctcctgccttagcctccccagtagctgggattacaggcgcctccactgtgcccggccaatttttgtatttttggtggagatggggttccaccatattggccaggctggtctccaactcctggcctcaagtgatccacctgcctcagcctcccaaaattctgggattacaggcctgagccactgctcccagctgagatcagtttttattgattgattgattgattgtgtggggtcattcatgacatccaagaggcagtttgaaatacagctttgtgctcagaagagagatttgtgttgggaatataa

SEQ ID NO: 2078 - DNA, 4001 bp, Homo sapiens
gcgcggtggctcacgcctgtaatcccagcactttcggaggccgagggaggtggatcacaaggtcaagagatagagaccatcctcgttaacatggtgaaaccccatctctactaaaaatacaaaaaaaattagctgggcgtggtggcgcacgcctgtagtcccagctactcgggacgctgaagcaggagaatcgcttgaacccgggaggcagaggttgcagtgagctgagatcgcgccactgcactccagcctgggcacagtgagactccgtctcaaaaaaaagaaaagaaaaacaggccaggtgcctcgattcacaccgttcccatactttgggatgccaaagcggaataattcgctttgtggccaggtgttcaatataagcctgcgcaacattaagcaagatctccccgccccccgccccccaaaaaattgaagtatacaaaacctaaccattttggtcaaacgacaagagaaatatggctcctaaaaaaattgtaatgaatgtaagtcaaaagttttaactaattagcccatatctaagaattattcaccaataataataacctcaaaaagaattttcatttaataagttctatattggaactgtataagctaataattttcctgtgattttgggactcaatatttcttactgcttctggtctcaatctattaagagtgaaagtttttgacagcatagcacaaagcagtaatttctaatgaccaagggcttatctcctgcagcaaaatccagttccaaaacaaagccttctcatgtcacacacctaacaactaggacaggagccctcaattcaggtggttaagaattattatcacctgaaattaatgtttttcagttgtgttatcacactataaaatttaagttgctaaaatttccctcaaaggaaagcagctgccactaaactcctctgaagctaccccttctctcttccttttttcgtctttaagttttcccacaggtattaaacacaccacctcttgacatggtttaagttggctgggtttttcttccaatgtttcatcctaaaggggagaggttccaatgttctagccataatcactactaacaaaactactgatgcccaaataccatggtcaagtctgctaataatactttttggaattaaaaagtatttttgatcttgcaaagtaatggatacaattctttgcatgttgggaagtggcatggatacacaccacttcatcacattagtgctttctaagtactccttcccctcaattaccctccaatctccagttacatctatttttaaattctagaacacagcgatcgctcaggttaacacaaaaaactaaatcagttcacctcttatttaaaaagtagttacgaaacaagcaacttacgtacattttgtaagtatctgaagatgaggttctgcaccacagtggctaaggaaaaaatacaaaagcagcatagactctgcttcctgaaacaaccggacgacgctattcccgtctcacctttgtttactaaacgcgaggtctggtgcttacgcaaacaacaagtgcccagctgggcattcgttacgggtcttctaaagactaaagaacatccattccactttcatccccctggagtttcccaaaaccgttaactcccgttttcactccgcacctgaagttctcttccctccttttgccgcgtccattcctgcattccccacggcaggggtccccccaagaccacctccccaccatcacggttcaactacccgcgctttcttccagtcttggtagccccgggggctcatgggatgtggatccgtactccactatcccaggcctgccctcagcctgcgccttcgcaccccgtattctgacccgaacctcctagtcctgacatcctgcgtaggatacgatgggctgcaccataaccttctgcactttctgaccctggccacggtacgccatggtggaatttcacaaagagcacacccgcacgctgcctctgagagcaacttccggaataaagaaccggaagcggaagtgtgaaggtcacgcggcggcatgggcggctcctgggaaatgcccctctagccatgaagtcacgtttcttcgctgcatggcctccgagggaggccaaactgaggcgtctgcgctgtggaaggtgggccggtcctacagcgccacctggagggaggcgggaggaggtgccttcggttgtatagtggccgtggtaggaggagtgccgtcctgtctccaatttcttttctttttttttttttgaggcgaagtctcgctctgtcgcccaggctggagtgcagtggcgcgatttcagctcactgcaacctcagcctccagggttcaagcgattctcctgcctcagcctcccgagtagctgggactacaggcgcctgccaccacgtccgactaattttttgtgtttttagtagagacggggtttcaccatgttggccaggatggtctcgatctcctgacctcatgatccgcccgcctcggcctcccaaagtgctgggattacaggcgtaagccaccgcgcccggcctgtatctccattttctgagttagcttgaaaagccaaaatcgtcccagtgtgtatctctatgtgtaaaatgagttaatttcgtgcctttcctaaagcctattttgctggagtttaggcttgatagcagcgttgtggtggaaagggtagggcggcaaggagcccaaacttcaggcctcccacctctggcagtcggccagaggcggtctgcattccaaagccagacgcctggttccctccagttacggattcaattctcatccatttcgtggagagttactgttcaggtggcaactgagggtggcgatttaccaggaagacgctgaaatccacatgctgggcgcaaatccagctcttttagagttggtgaccaaggataaattactcagcctcgccatgtcttggcttagtttccaaaacggagattatagtaaagattaactttactcaggggcttaaagattcaatgaaataattgtctatgtgtgcacacagttaggcgtcagccagtgtcagaacatgtccttccctggataacacagctactaagtggagcagctggaatttgtaggtgtgcctgaccccaaagtccacctacctttccattgtgtcatggcttgtggcctggcagagatttcacttaattggcatacacatgttatagaggaggaaactgaagtttagacttttgaaaggacttgcctaagggaacacggattagggcaaatggcagaatcaaaattagcttttctgagggcttctgtttaatggggataatagtaataacgacttcagaaaggggttgagttgaaagtgatttttaaactacacaaagcggccaggctcacgcctgtaatcccagcattttgggaggccgaggcaggtggatcaactgaggtcaggagttcgagaccagcctgggcaacatggtgaaaccttgtctctactaaaaatacaaaaattagccatgcatggtagcacatgcctgtaatcccagctacttgggagactgagacaggagaatcacttgaacccaggaggcagaggttgcagtgagccgagatcatgccactgcactccagccttggtgacggagcgagactccgtctcaaaaaaataaataagaataaataaataaataaactacacaaagctggcaaatgcatgggataactatttcctttaaaaaatttcagccagggctgggcacagtggctcatgcctgtaaatcccagcactttgggaggctgaggcaggcagatcacaaggtcaggagtttgagaccagcctggccaatatggtgaaaccccgtctctattaaaaatacaaaaattagctgggcgtagtggtaggcgcctgtagtcccatctactcaggaggctgaggcaggagaattgcttgaatctgggaggcagaggttgcagtgagccgagatcgcgccactgcactccagcct

SEQ ID NO: 2079 - DNA, 4001 bp, Homo sapiens
tttttttttcaatcaactctcccaggttaaaaccaaccatttcttgaggtggaagaggtgaggaaacagaatgagtggacaccatggagttaagaatgtcaaggataagggtagatggcacgagatgagtaagaaggaatggatttctctataaggcagattttcaaaaaactatcccttttgcaaacctactgttttacaagaggcaacagaaggttgcggaaattacaattaaaatttataaaaaatgagaacgatttcaagtgggcaaatcgaaatatggagggagagagtaaaagtgtaaaaaaggaatgcacaacatagattcagtaagcagaaacacagcactgaagactgctgaggagaacggagacaacgcgagcacacaccacctgcaagtcaaccggcaatcactatccgaatttcaatacgaagtacaaaaaggcaaatgtaacacctagattagggtaatggaggcggtgtgcacagagattgcaagacaaggcagcatcccgcaagagcatggagggatgtggtgggggaggcgtatgaagggggagggactgcagcaggggagagagggtgggctgcagcagcagaaggcgccttaaaaaacagaagaaaggaaaagcagcctaggggagggaaagactaggacaaagtcaagtgtgggatcacaggaggatagagtagaagaggcagcagagacgggcatgccctaaaaaagcaaagcggtcaaagacccaaaaagggcttgaagtagttttgaaggaggaggagttacaaggggtctaccataaacctgactaggaggaggcatgagtatagagcaggagtgaaggcaggaggccagggaagggatgctctcagaggggtgtgctgatggagacgctagattccaaattagggtgtgatacggggccaaccgagaagagaaactacggtgtcaaatcccacgccccccaccccaaaggcatgcaagggtcagaaagcaaggtaaactcttggagtagaaatacaaaaaggaggggaggaaaggggcacacggtgggatggaaaaatttaggggcagcgtaaccatgaggagagggtaactaaggaaagaaaaaggagacgagcggggagggatggtgtttccggaggaaaagtaggagcagaccagaggtcctgcctacttggtctggagggcagaaggggcagtccacgggggcggaggggagtggtggagaacgaaactgcgatgctgaagatgagaacttgggggggacacggtactggctggatcagaaaacgaaacgccgtcagtaaggagcagatgaggttccttctgagcaagacgagggggagtgaggagcagaatgcagcacgccaaacgggaaggcaaaggggcggagaagagcccagagtaatcggggcacagggaggagcactgggggcgcaagggcatcagctggagacgacggggtgggagaccggcgtcgcagaagccccggggcgggtggtgggagggcagcccacaaggaggggcccggctgcggaggcctgaggggcgggggtccggaggccggctcggagctcgggggaggtgcggcctgggggtgacaagggtagcgaggagtgcaggggcaggaggggcgcggggaggatggggcggcgggtagccccgatactcacacctccaggatgcggtcccccttgcgcaccccggcccgatcggccgcccccccgggcagcacggcgctcacatgctgcagcggcgcgtacagctccccgttgatgctccgcagttgcccgccctcgctcacttggccccgcacgttgaagccgtagccggactcggacttgacgatgcgcacgacccgcgggccgccgcctcccccgccgccgttcccggcgcagtggagcccagaccccccgccgccgccgccacctccgttcctgtgaggggctgagggatgaatcccttccccgtcctcgtccgccatcttgcgagcaggcgagccgtacccccgccccctacgcctccaaggcctcccggcgcgtgctcgccctgcctggcagccggacgacccccgacgcgcgcgcccgatccgccggccgcgggaccgactcggccaccgagctgctggcgcggggtgaagaggaggcagggggcgggcgaaaagcggacaatcgggcaccgtggggcctcctgggagatgtagtttatgggtggcgggggcggggagcggtctgggcctgggcctgagccgaggttataagacgcagttcggaagcaaggcctgccgggagttgtagtttatctttcatgctgggttaggagtttgatctgctgggtggggagagtataacccagcacccagcgtggtaaaatgattcagttcttgatgcggaccaagtttttcgcccccccccctttcatttcataacctctaaaaaacaataatgttagaataacttaacgtttgtgattcaacacagtcttaaattatatcaactcattttttggcacagtaacttatatgttgaccagggcccaacaacctgtgaggcaaccggatcacgattagcttccctattttacgttattaggaaacaaccttagagtgctcaaagtcatccagctactaagtatcaggaactaaggcccagttattgtgcaactttcttgtcctgtattgcaactacagtcatgtgccacataaggacattttggtctacaatggactgcaaacacgagggaggccccctaagatgataatggagctgaaaaatgtctatcacctagtggcacagtagccaccataaggtcatagcacaagcattactcacatgtttggagtgatgctggtgttaacaaacctgcactgccagtcatgtgaaagtatagcacatatgattatgtacagtacataatacttgataatggtaagaactatgttactagtttatgaattcactgtagtttttatcactattttagagtgtactccttctacttttttttttaagttaactgtaaagcagcctcaggcaggtccttcagaaggtattctaggtattctaagtattgtgatttttttccacgtattccaagtattgtgtttttttgttttgttttgtttttttgttttttttttttttaagatggagtttcgctcttatcgcccaggctggaatgcaatggcacgatatcggctcaccgcaacctctgcctcccaggttcaagtgattctcctgcctcagcctcccaaatcccttgcgattaaacgcatgcgccaccatgcctggctaattttttggtatttttagtagagacagggtttcaccatgttggccaagctggtctcgaactcctgacctcaggtgatccaaccacctcagcctcccaaagtgctgggattacaggtgtgagccactgtgcctggccccagttattgttaccatcagatgacagctctgtgcatgttattacccatgaagaccttccagtgagacaagagatggaggtggaagacagtgaaattgatgatccagatctggtgtaggcataggctatgtttgtgtttaagtcttagtttttaaccaaaaaaaaaagtttaaaacataaaattaaaaattgccttaaatagaaaaaaagcttatggaataaagatataaagaaagaaaatattttgtacatctgtacaatgtgtttgtgttttaagctaactgttattacaaaagagtccccccaaatttttaaaggctgggtgtggtggctcatgcctgtaataccagcactttgggagaccgaggtgggaggattccttgagcccaggagttcaagaccaaactgggcaacatagtgagaccccatctcaacaaaaaataaaaaattagctggtggctgagcgagactatatctaaaaaaaaaaaaaaagcagctgggcatgatggcacatacctgtagtcccagctacttaggaggtttaggtgggaggatcgcttcagcctaggag

SEQ ID NO: 2080 - DNA, 4001 bp, Homo sapiens
ggagatctagattccttagtctgagagagctttaggcaattcaccagaaatgcttatttagaaatgcttctggtcgggacctgtcatttccttcccacctagaacatctgcgactccagcaacccccaacacgcccagaggtctaagcaaacgaatagcgctgaagcttcaatttcattagcttcaccttggatctgcctctgacaagaggacctcatttaaacattgattcttaagagtcagctagaacacctagaatctggggaaagagaaaccacttgacaagtttaaaacaatccgagtcactgtggctcaagcctgtaatcccaaaccctttgggtgctggaggtggtagaatcccttgaggccagatgggtccagccccgacaaaaaaaaaaaaaaaaaaaaaaaaaaaaaaaaaaaaaaaccagaaagaaaccctgatgattctgatacaccattgctatttccaacatcccatcccaaagtttcacaatgcataaccatagactaatattccttatccaaacagcaatgtaaagaaggaaagaaagtaaataaccaactggccaactgtcgttgatctgaacatgaagtatgtgtggaatataaaaaggcagagtttacaactaaacataaaataattccattgttttactacttaacagaaaagtcaagagcacaaaactgtgatagtctgtttaaatattcggaatacaaacctgggcctatcattccatttaaaccgaagtagaaataagttttatatactcctctttggagtcagagtatgcatggtcacttcctaactttggtttgctctcccagagtaaatgcggtggttaagtaggtcgtttgctttacctaatatctccaggtaacgttaaaatgaacaggcttcttagtaatgaatacagcgttgtgatctgaactcaggtcttctctcagcagcaacttgagaaactggagtgacattcaacctccctgcaagaaaggtatttttcttttctaaaaccctttaagaaattacaaacaccagtctacacgtaccaaaagtctaccactagcccccacaagtcaatttccctccaacagtaaaataagcaaataagagcctttggtcctaaatttcccgggggcaaggaaaaacgaaagcactggctgtgggttgggtggcagtagctgaccatctgaaaaatccttagctcctcagcggaggagcttcctgttagaaacaaccgttttctcctgttcagggagatttcctagaacctattcccacaagacccgagactcacccaagtctcaaatccacaagcaacaacactaaattaagaataatttctctaaacttggctgctctcccagagttcagggctggcctcgcccgaaaagcagctggcgggagcggttttgagccaccagcctcccaggttcgggagctgccgcgaggaagatgtctgtgtcagagaagcagaaagggaaaacaaatcacaactttgcagactccactaagccacagccccgccgaacggaaggtcaaagtgcggaggagggagcggctgcggtttgaggccccgaggcgacgcggccccgggtgcggccagagctggcaggcggggtccagcagcccgggggacctcactcgtccccagctcagagccaccgccccgggagggcaagcgcgccagaggcagccgtcggcgcaatgctggcaacgcccggagttgccttggaagtttcccgggactcgccgccgccgccctcaccttgctgaacacctccaggtcgtcctcgtcctcgtccagatccagcacctccgcctgcagcagggcggaagagccactgctgcccggaaagggggcgccgccccccgggctctccccgttggcgcccccggccgggaggcccgaggagggcgcctgcgatgcccggcgctcgccctccatcccgagagtgcgcgcccagccggccgccaccgccgccgccagcccggctcccccgagcgtgcccattggctcccacgtctcctgcacctccccggccggccccgctccagcccctcgcccgctgcgcagacgcggaactgccgggaccagcgctggcccgggccgggcgcatccccacctggcctggggcgggctggaggggcggaactgggactctcggactccggctacgttggagaaagggttggctgtaccctggagaagaggagagactcaaaggtaggaggtgggcgtcctcgcattgacccagtcgggggccaccgagtgacggtttccgcagtggcggggtctgggaagaagccacgaagcgaaccgtccacttcgcgggatccacagcgaggctggaaggcacccgacccagccttgccaagagaaaaaaaaaaaacagcaataacaatactgtatttcctgtattcagtggttgcctttcttcttggttgtgattttcgagctaatgtaaaaataaagacatgaaaacttcccgttttgttaattgatttttgacccagtgactggcctgtgcggtcatttcactgtcgagccaggaaagctgagctttacaaactattttcagccactttcaaatgcatctttactcctggacgtcttcctgaagttaatgagcagaatgttaccaagacccaaggacaactagcaagtctggaaaattgccaccgagaaataatcttcagtccttgcattgccaaggcaaagctttaattatttaactgcttattattcaaaaacaaaactaagttccaaaactaatggaaaattttgcccacgttgatatattctttaatttatcttcaggttttatttacttccgtcagccccacctcttttctgtaggcccatttaaaaatttttaaatacattaagctctatgtaagaattccttatttggggaaatagagaatatctttatttctgattagaggcaaggccttaataatatattatctcctaatcattcaaatgtattcccattgatttcagacgtgcacccacccttcagtcaggttggtcactgccccatgagtatccacatttgtttctgtgcttgatgatttctgtactttaaatgccatctcctgcccatccttcagaaattaaatatagtcccatctctttcagaaagactttctaaatgacagtctgttctcaatttagcatttaattttattccatcttgcagattgtatttgtttcatgtacaagttttccattccttagtaaatgataacattttcaggttgaggatcctgatatgtattaaccacagtatcagatgtactctcaaaatgctctctgctaatttctgtaaataatataagttattaaaagactttattttttccttgataagcttattctgactagtaaggaagattcaaggttttctaattgcaatctgaaccaggaaattcttaataatgctgtaactcacagaattgctagaaaccatagagaatgggctcagaaaatgggcagaataaagcaaggctgcacagcttggattatagccaaaagcaaggccacagaaccagtggtacagacattgctgctaccattgcctgatactggttgccacaccatcttcaccagtgtcaatattgtcattaacactgatgttactggactccagttgctttccctggcagcagtaccacagctacctctgagaacttccctgctattactgccacaaaaatgtctccatcaccctgtttctctgtgttgatttttctagtattaaaaccctggagagtatgtgtgcttggccaatctggccaagtttcatggaaattcctaaggcagagaattttctaaacatagaaaggccatattgatgcttgtcaaccaaaaacaagaaaaataggaagaggggtaggatgaggaagaagagtagggaaaacgtgactataatttgcccctttggctgtccaattaatattacctttcttcacatactccccctacctccatgct

SEQ ID NO: 2081 - DNA, 4001 bp, Homo sapiens
aaagttaggcacagtaagagattaacaatatactgtattaaaattcacttgaacatggtatctctcgaaatgtcttattgtactctgtttcgcacctcaggtagctgaaactacagaaagcagttaagtggggatcactgtatttctcattcaaaagttccttcctctgtccaccaacttattcattctttctctgggccaagtgctggaccagaccctgaaaattacaacaggctaaaccagccttcatgaaatgcactagcagaggaaacaaagcaactaattcattacaattaatgatcaacttctgctaaggagaataaagagttcatggagggcttaatggggatggggtgatttccagaggaagtgatatgtgggctgatatctgaggcaggtataagagttggagggagggagagaatacagcattagaggtggaggaaactcctaaaagccaagagaggaaagaaaatgaagctttccagtaacaaaaataaagccagtgtggcatgaacctggaaagccagaaggaaagtgggccaaatgaaccagagatagagtgtgctcactcagtaggtctttatcctaaaagactgcgaaacctcagatgcattctaagcatgtgattcactaaaacacgtgcatttctaaacgataattcagtgccacagagctccttccaaaacccattctcacacccagacaacgcacagacttccttaacaagtcattcactgacaccgcccaacttttaaaaagaaaaaaaaaaagcttcaaattgaattctacttcaaggaagaggaaatcaagcaggctgaaaaaaagaaaaaagtggtttaaacaggtggcagccacttaaatattaaaaagtgaccaacaggccaggcgcggtggctcacgcctgtaatcccagcactttgggaggccgaagcgggcggatcacttgaggtcaggagtttgagaccaacctggtccaacatggtgaaaccccgtctctactaaaactacaaaaattacctgggcgtggtggcgcacgcctgtaatcccagctactcaggaggctgaggcacaagaatcgcttgaacccgggaggcagaggttgcagtgagccgagattgcgccactgcactccagccttgcgacacagcgagactccgtctcaaacaaacaaaagtgaccaacgaacttaacctaaatatatatacggagaataaagtttatatagttgtttctcacttagaaataacctttcaatatacatattatttaaattacatgaccattaacacttagggaaaacagaaacttacctacatcctaatattttacaataaaacatgagcttgattaaaggttctggtgcccctacagattttcatgtcttgctaataccatccttcccttcacacattttctctaaatcattaaaaagctgacttcctgagtgcatttttggtttcgctttttaaagaataaaacgtcttctaattcctaactttctttactactgacttgagagatgccacgagatttgcggaacaccaaaccagcgtgcagggtttaaaaggctgcccgtgacccgggcgcctgacggtaactttcccgccctcccctccccaactcccctgcagtcgccgagcctcgccttctccgcagcacagcccaggacaaggccgggccggagctgctgccgccaccgcttctcccttccccgcgggctgaggccggtggacccaagcgggaagcgaggagaggcgcgggagcaccaccgttacctgaggcccgcgcccggcagcgggcacttcggccaagagggcagagccgggaagcggtcacagagcagccagcaggaaggtcgactccgggaagctctcctggcgcccagggcccgcaacgtcgcctgctaagctaaagcgccggacagcccggcccctacgccccctgcctccgagcaccgctgcgtcacgcgcagggccacctccggctgagcatcctattggtggtccccaggttgccaggctccgcccacctccccgccccttcccgggcgcgcgggtccccggcgccagtgctcgcaggctggccctggcaacctgccaaggaagcttctcacccggacatcatgataccggcgacaacatcttgcttgacacttccaccccagcagtagaatgtgcagccaaaacgggactgcgacaactccctgcaagcccgaaacggcaccctgcgtggtagcatggagctgcaggggcgtttggctcctaggccgactggaagaagccgcttctggagctgtggatcattgcagtttgaactgaccatccaggaacaacgtagaactagccagaagcaagaatcgctggcttatctgcacaccaagattcgtgcctttatcaggagattccttaccgtttgaaaaccagcgtccttcagcaacattcaaactagataaggggaaaaaacctgcaccaaataataaaacacaccaaataatggaacaactaagtaatatttaagggcccttgaggccaggtgcggtggctcacgcctgtaatcccaacactttgggagaccgaggtggctgggtcacctgaggttaggatcgagaccagcctgaccaacatggtgaaaccccgtctctactaaatacaaaaaattagccgggcttggtggcgcgcgcctgtaatcccagctattcgggaggctgaggcaggaggattgcttgaacccggaagccagaggttgcagtgagcctagattgtgccattgcactccagcctgggcaataagagctaaactccttctcaaaaaaagttttaaaaataaaataaacaaagggccctcgtgacttcataatcaaaagaagaatgatgcagagagatttgggacagagattaaatacaacagttaatcgcttggaatttgtgaaggcagaggtgtacgtaaatttagggtaaaggtaggtgaaaaggcaatgatgagaggagcagagactgaagagtcgcactcacagcctgcaaactaataccagctagcctggcctgactaatcgcttcttccccactcctccccaggacaaaaatccctgaacaaacagatgaggtttagcagaactgactactctctgggtcctttaaacaaagtggatttgtacacgttcccttggccacccagcaggctgcactgttcactcaaagcagaaatggccctcagcatccagtcgagtttagtactggctgtcattggcagatctgctccgtttggcctcttctacaactgtgattgccacgtgtgctgactagttggtgacagggtctggtagacccccagctgcttcccctccccactcccactagttatagagcagtaggaacataggcactcatttctattgggtctctgttggctaccttctatatacaccaagatgactggccttttcactgtttgattcattcattcaaaaaatattgatagtattcttggtgctagaaatacagtggtgaataaacagaagaagcccctgcacttagaggcttatgttctgcaggactaggtatgaaaggaaacaaacaggtggctcaagcctataatcccagcactttgggaggctgaggcaggaggatcactttgaggccaggagtccaagaccagcctgagcaacatagtgagactccctctctacagaatttaaaaacaacaacaacaacaacaacaatgacaacaaaatttgctgggaattgtggcaggcccctatggtcccagctactcgggaggctgagataagaggattgcttgtggtgggggatggggggtgagggacggaggatgcagtgagccaaaaaatcatgccactgcactgcagcctggtcaacacagtgggactctgtctcaaacaacaaaagcttatgtttctaatgaagaatataaataataaaacgaatagatgagataatcactggcagtgataagtactgagcagaaaacaaaacagaatg

SEQ ID NO: 2082 - DNA, 4001 bp, Homo sapiens
ggaatcagccaggaaaacatttgtgatcacaacctctggcctctcccatatgaatcatagaatttttgaaagaaattttaaagctagtccaaaacttcttgtgctgtagatgaggaatcgagggccagagactaaaacacaaaacagaaaataagttacattcacagaaaacttcctcggcaaaacacgacaggttctgagtggaaggattttgtttttactgtggtttcctgagattgagattggggatagagaaggaaaaacagcctccatctttcacctaaaaattttcataggtatgaggaatctgtcatgaacattcattcaaccaaactatctcaaagcaacatattactaacccaactttgactgcagtcaccattgaaacaagaacaaaaaagctgcctagaactgactgaaattgatcagcttgttcttcaagccccattaatcctcaaatccacctgcatacaaatcactgagaccacatagtgggaagaacaagttttcaccaagtttttaaaaatagaagtaaaagatgcaataaaaacactgatgacaaaaggagagaaagggaactgaaacttgtagaaatctacaaatgcagtatctagttcataatattgtcagagccattgccacagttttgttgtttctagaaaagctgtattttaaattacatgtcaaatgtgatggctttgtctgccttaatattagctcctaattatataaaatatctgagcctcatttctgcagcctcaaaacatagttcactttctgtaaaaaaaattgaggggtaggattaggtaggaaggagggagaagaacaaacgttactcccccgtcctgaccattacaacttggtgctaagcactgcccagcatgtgatggtcacacaagggtaacaggccaactgggacaaagttggggaacgcagactctgcagtcacccactgagaacccaatgcctgttgacgagagttgactggaaactggcagagtgcagaagaaactgctaatagtatctgtgaccctgacatgaaagatctgatcaaaacagcaggatagaaagcctattattgttgttaataatcacaaaaagaaaatagccattagaaattgaacagaacataagccttcttccaattatttccacaagcagacatgagactcagatttctaattaaaaatcactgtgcacagagccaaacatttgagtcagcagagaacttacctaattgttaacactgcattcccttggagccatctgtcatacctggctagctttctactctcatcccaaccaaacttcagatgaagactaacctttccccagataaattacacttcatcaaatctgctgatacttcttactgaaatatccaatgcataagtcattttaacatccctctaggggctaaaggtctgactatacattgcatgagagaagactcttcatgaaggtttcgctcactctgctcaaccaggaccaagaaggagatcctacagagttcctactccttgatccaaagctgaatggaagaaacagaactcaagagactattaaataagctagacggctgggggtgctagggaaggtaggatgaagagaggccaagtattggaagaaatgaggcagttaggaagttccggggcattaaaggactgaccttcagacttccgggtgttacaaaggtctggcgattcacaacaacaggccgaggtcttcagcggcagctccctgaagcctctgacaggcacactcagtcctgtcagcttggactcaaccctgccagagccagcaaacaaacacacgcattcttcccagagctgacaccccatacaacacggcctctctacagggcctgtttatttaaggaaccagatgctttaaagttggagtagaagttgggaagttatgtttacagaagtagttagtgacaggagcagagggaggacagaaaataagcaagagttcctggctttattcatcataagtttaaaaagttttaaggaaattgtcaaatggtctgtacacaggaatgagaagtaaggaaattatgtcagccaccaccacaactctggccaaggcatttcatctgttcctttaagacagtttcatgcctaccctcaaaggggtgcttacagcagaaatgttttgaagcaatccaacttagtaaccaacaataaagtcttctaggcctgctcaatttcacgcatgtacaaaggttatacatgtcatgaatactccaagcagctgaaggaaagaatcagttaaaaatgtggcatgaaaacagttttgagttccaggcaaaaggaagattattgagtctaagaagagagcatttataaatgatagctaattgctgagtgctaattatgtgccagacattcttctaatgagttattacatatgtatagattatacaacacaatgtgatatgttgtaatacatactataactcattacaaatacaatattacatatgcatatattatgtaatacaaatatatatttatacaataatatacatatacgtatatattatgtatatataatttaacacacactcatttaattctcacaaccaccctacaaattaagtgctcttatcttcactttacagattaggaactgagacacagaaaacttaagtaactcacccaggatcacacagtgacatggccagggttcaaatgcaggcagtccagataaggcagtgctataccaccttaccatggtaagtcaaacccttagaacaaaattagggagcataatttttggaaagttataactatttatctttctccttcgttttcttgtcatcccttttgtttgtttttttagtaatagccagtattttttatttccactttcccatgagtctattatagctaacttgtaatactgtaactagaaaggaaaatgttttcctctcctgcctcaactcctaaaataaagcacttaatcattaggacttctatgtgaaaaaatatatgctgtgtgtaataaacccaatgcactttaaatatattttaaattaatagattgaaaagaaatgatatgagaaaaaaaaccttagagagaaaaagggaggcttgggcaaagagaaaaacctgctggatttcatggacagagaagcctgagtggtcatcaggacaccggtctccttaaaccgtaatataaacgcactattatgctttagctttaccgtgctttcttgagaagacaggttaaatgctaatatatcctcataagccacagacacaggtctagtagtttgctataaccttctgaggcttttcattctccagtctgaatgatcttttctttgtatcttggcaccccagcatctagcacagatctaggcatttggagggcattcacatacattgatgatgtgaattaatgtggcttgaaatgaaacaggaccaagttaaaagaaataagagaaccatgaacttttgctttttcttgggactcgaatcctgtcatgttatgtaggaaaaatgattctacatgtaccttccttccccagttgtacaaagtacaatatctctgataaaaagttgttctgtcatgctgatgcttttatttcacactgttttataaacggtccaaaaatactagatctcttcaatacagttcaggattttttatgacttctaaaaccaaataaataaacagaagaacaggctactacataacaattcttggttaagaagtactacttaaccatttttaaggtaaatgatattaaacaaaggctccactttttttttttttaaccagatacagaaaggatgagatctctgaagaagagaccacggatgactaacaaacgcaaaaacttttttttttttttttttttttttttttttgagatagagtctcactctgtcacccaggctggagtacaacggtgcgatctcggctcgctgcaacctctgcctcctgggttcaagtgatcgtcatgcctcagcctccagaataactggaat

SEQ ID NO: 2083 - DNA, 4001 bp, Homo sapiens
tagctgggtgcatgtaccagtagtcccggctacttgggaggctgaggtgagaggatcacttgagcccaggaggtcagggctgcagtgagctgtgatcacaccactgcattccagcctgggcaacagagtgagaccctatctcaaaaaaaaaatagtaattacacaaaaattagctaggcatagtggtgcacacctgtagtcccagctactcaggaggctgaggtaagactctatctcacaaaaaaagagaaaaagaaaaacaggagtaaatctaaatccaggagtagcagcagacctaaagttaggtcaaccagcgagagaagaatttgaaatatggagcaagaatgctgtgaccagctagctcaaggaaggaagtggtccagtataaattaagcattagtgttgtaaagcctttctcaatcccccactgtgagaaggaagtctattcgatttttttttctcatcaagtaggaagacttcccagtactcattctacccaacctgtctcaccctccagcactagcttggctacctttacacagctgctgctcgggatacactaagcacaattattcctgaatatttgtgtcttgtgtcctcagatcagagaattctattacaggtaacaagtatggtccagataaccaggcagtccaaagggagactgaggcttggctgacgctgaaaaacggttacagaaggacaagtgctggcacagagccttggccacccatctctgcccccaagtgcaattcattttctttgaaagaggaaaacaggcaagggagaaaatatatagaattgaaaatacattatgcaaatgtggctagcaaggattaaattgttaattttagagaaataggagaaagatgcccaagttgtgctgaagcaaggaaccaggactttcttaataattagttttgtcagtccagtagtgtgcaaaggttgagctgcttgtccccagggacagaaatcccataattttgaaagtcttttgaccaagagctggctcaaagcagaatatgtgcaatgcgtttcttaactattgaaaatcttgtcaccacgggatatagacatgctagtcagacttccgtaccatgacagaaggtcaaatctgaagcagtaaaagagatcacataaatattgccatctcatttccaagctagtccccttaactattaaaacacggtgaccagatcgctgcttcgggcctcctgaactcccgcctctcccacccggaaagtactgacccagagaggacacacctttgcttctgcgcagcccaacttctgcaagcgctcaagagttaattactccttcaccttcctggggcctaacagcgttactgggtcctgattatttatacagacgaaaaacgatgttcaagagattttgacaacttaaaaaaaaaaaaaagaatgcggtggaagtctaagattgcctcccctatgacaaaacacagccccgccggccgcccgggcccgactccgcccgcccgcccgccgcagtttcggggctgcggcccgggggacgcgggcgcggcagggctggggtctcctccgggagtcgcggggcgcacgggccgggaggggcacgcgggcggcacctcgcacccgagcggctcccgggcccggcgcccgctcacctggtgcgtgttgttggccagcttggcgacgaagtcccggacccggccgcactcctcgtcctcgcccggcgcgctgcgacgccaacggccgccgcggggaaacgcgcccccggctgcggccgcccgcagcccccagctcaccccgatggggccagaccagcgcggcagcggcgcagcgggcggcggcggcgcgtccagccggtcctggctgagggtcgacggcggcagcagctgcaggaggaggaggaggccgaggccatggggccagcgcgagaggccgtccgcagctccccagggccgctccatcgccgccgaatgccgccgacgccgacacctgccgcccggcgcgcccgcccacccccgccggcgcgcgccacacccccgagccgagcgcggcgctccttggatacgcgcggccgggcctctccgccccataggctggccgcctgtccctcttccccggcccactcctcattggctcgcgtcgcctccggcttcgggggtcctggattcggatgctaagatgcgggactgattggctggaacggggcagagactgctgaggtcaaccccgcctcgcccggcgtctcccgggcccggcttgtggagttcacgtaggagcttctcataccttcccgccgagccccgggctcctggcgtcgcgaccccttgccgcacctctagcgccctcaagttggggctgggttacgtccctcctgttccccagagacactcctaaaattccttcggtgaggcagagcctggaaaaacctacccaggaaatccctgagcttgctcagctggaaaagggggctccatcatgaaccggggcttcgggtttttataaaccccgctcactggagcgcccattgtctgctaagcagctgccttgctgcaagaaggtgaatgcgaactgatgtgggccacatcctacggagacagacatcaggacatccgtgactcctgcaagcctgaagaatagtctttccatacgtttggcctctctcaccttcctcttctgaggggaggtaggccaaaggcggaattacttacaggttttccaggacttcgaatgtagcttaggcattaggggcaggtaaaagaggggcaagagaatgatccaatgcctactgtacacatgatcatttcctagatgcacatttattttaccaaagtgccttaactctgcagtgagagcttcggacaagtttggttccagtatgtgatgtcctctaaattagcaccccgatccacctctaatgaataaaataaaacccctacgctgttccctttaccgcagaagctgcacacacaacttctacaacacgtagcacaggtaaaaccagttctgaatccttaagcttactgactccatcccttcagaaagctagaaattgttcagtagaaaaggtagcaaatagaaagatacaaaatatgcaagtcattacactcaaagcaagtaaagattacttttaattataaactggccataaacccaaatgaggatatagtcattgtagagcaaaatgatacaatgcacccaacccgatatttacattaaaatatttccagtcacattaactttcaaacaaaaagacttaacgaatttacaaatttttccaagacgtgagaagtgaaaaatgtttttgaatgccatctgagcaggatagtaaaatcactagaatagtctttttaagttctcagttactggactgaaaagataaagctgatgaaaattggtgaacaatttgttcctttccataactactatcagattaatttaaaaaagattatttttaaatctatgccaactatgggagtagatcacaagacagtcagttccagtagcatgtgattaggtggggggaggaaagggggttataaaggaatatttctttgtttgggtgacacaaagatgaatggtctattgtcttactgtctgaaaagaaaaaacaactcaacagtgccacctcctggagaaattaccaaatacacttttaaacgctattaaatttgttccaattatctgtaccttcactttttagtatgttgcttttagttatcacaggcttacagtacttatatatttccttcttcaaactgtatcagcttctgggacatggtaacttgcatatggcactgagaaaatgtttgagtgaatatatttattatttcactttttaaattggaaaccctaggaactatatttcatttttgtctaatgagattgacattaaatataaaagtggcactgtcagttctcctttgtgagatactggacataagatttcaccttatttgcaggactaaagtaaatttatcttattactaaaaaccgtacctttctccaggaaac

SEQ ID NO: 2084 - DNA, 4001 bp, Homo sapiens
accggcatgtcgtgatcctttgggggatactggtttggaaggcatgaactccgggaggtagagacccacctacttggactgctgagagccaagtacagcctagtggtcaagagccagcagcatcgtctctggccgtctttggccagaccccttcaccagcgccagcgccagcgccagcgccgaggcgtcctgcccggaaattcccagagagtcaaagcaaacttcccaggaaaactcttcggcttcctccaagcctctgtcaccgaggcggctgccaagagcgccagcggagtctttgcagctgccgcgggccctccagggcgggagccgccgctccagcgctcggggtcctcccggaaaggtccagggctgaagttcaaaattcacttcccgcccaggcccggctcaccgccccgcccggtactgtccggcaacccccacgtctcttgtcctctccagctccagttaagtcctggagcgcctccagcctgaagacccatgcgggcagctgagcgaatcccgcgggcgatccctgcgcgcctggggacgggaagcagccagagccggcgcacacacacaaccttgtgtgtgcgtgtgtgtttacgtacggaacgcgcggggtgggaaaacaatggcgagccgctgggaactgaacgactacccgctccgcatctccctacccctaggcgcgatcagcgtttgcagcggaatcgggatgaaaaggctcacctacgatatcccagggcgggaggtgggggtagcaagaagcagcctgcggtgggggtgggggtgggacaggagcagccggagcagaaaacaaacaggatgccgcgctggtctggtccgctggggaacgaccctgaaaccgtggcaaggggagcgcgtctgtcccccagcaccccacgcaaccatggtggaggagctctgcgcctcgtcgcaggcacctgagccccacgcaggacgcgcgcaggtcgcttcggcttcccgctgagaaatccttaaactaggcgcatagtcgggctgatgagaaagacctagtcctctgcggtcggcgaggagcgggttgggggtgcaccctaagctcgacccgcgtggtgaacgcgcgcgcgcgcgcgcgtacacacacacacacacacacacacaaacacacacacagccacgcactgccttagaggctgccatccctctccacaaggacccaagtcggccagggaggagccgccactgcccagcgttgttgggggtaggtgagggtccgtctctcctcgaaaaactttgcacagggtggaaactcgcagggaagagagccggtgggtgcccagaaacgtaggggcgcaagtgtcaaacttcagagagctggggaaatgggcgcgacggcgcgatcatggcggggaggggtgcacttactactcagccaggcgccgggctcggggctcggggctcgcggctccgcgctcctgctcctcctccgtgcggtcctcgcggctggcagcctaggcttcccgctcacatgcccccgcgacgcggcgggcgggccgggttggggaggctgggctgggagggggcacgccccccgccgtcggccggggagtcgctgcggacccacggccaccctgggtccgcgccccacggggcccgccgtcccgggcggcgagcttggttccggccgggcggcgccctctccgccgagccaggccgctctctgccctctgccctctgccctgggcttgcggccgtctccctgccttccgcggtcctgctctgcgactcgtcggacgcgcagccggcccgccctccctgctcttcggctctcacgctctccggctccaacctcagcgcctcggctcgattccgagtcagggcctacgaggctgaccgctgagctctgggctcagacctgggctcgccggttctgggcccgggttccaggacccgtgctcacacagttcagttccaagccgggactggagaagggcgctcgcggctcgctgctgcgaggcgactggacagcctagaggagaaagagggagggagaccgagagcgcgcagggggaggagggagggagggtggggacttgcagaagaagggagggacagagagtttcctcctcctccctgcagccgggtccatccaggcatcaacagctggaaacctctgttggaaaggggaaagctaaggtttacgggcggcggggaagggtgggggtggagtgagggggtgtagagaagagaagaaagaaggattctgcccgctcccactgcccaggtatgagggtcgctacagagaatcttcactccttaaagcaagacctaagaagttattggtccagctccaagcctcccaacccctccaaacagatagcctggactcgggttttttaaaaaccccatttctccggacttcccttaagaacctgatctctgccgggcgcggtggctcacgcctgtaatcccagcactttgggaggccgacgggggcggatcacgaggtcaggagatggagacaatcctggctaacacggtgaaaccccgtctctactaaaaatacaaaaaattagccgggcgtggtggcgcgcctgtaaccccctactcgggaggctgaggcaggagaatcgcttgaacccgggagtgggaggttgcagtgggccgagatcgcgccattgcactcactcctgcctgggcgacagggcgagactccgtctcaaaaaaaacaaaacctgatctcacctgtagctagacggattcctgatatctccaaccactccctaatcctgtcatttgcagcctctcaaataaatcttattttctcctgtcccattatatgggagggtgggggagaatggagagttggtttcctttcattcaacgtatttatcaaatgtctacatatgaccgggcgcagtggctcacgcctgtaatcccagcactttgggaggccaaggcagcagatcacctgaggttgggagttcgagaccagcctggccaacatggtgaaaacccctctctactaaaaatacaaaaattagccgggtgtggtggtgcatgcctgtaattccaactactcaagaggctgaggcagaagaattgcttgaacccaggaggcagaggttgcagtgagtggagatcgcaccactgcactctagcctgggtgacagagtaagactctgtctcaaaaaaaaaaaaaaaaaaaagtctacctatgcctggcttaccggggtgctggggacacgaagacaaatgagacggtgtcctgccctttctggattctgattttgtaaaggaatgggtgaatataccattgcagtgaagtggagagggctaagatagggcaggcaaatgggcacagggccaccaaagacactgggatatggggactggaacttcttgggggaggtggcatctgaaatgggtcttggaaggacctgtgggtgtagggcagattaaaggagtgacaatcatggacctactaataagtctatgcccacagtgtgggtggccagcatgtgttcaaaggtgatggtcagcaaggctctgaaggccttctaagggctcatccttgcccactgctttgcctggctaactccttttattcatcttttaggtctcagcctagacatcaactttccctgaagcctttcttgatggccatatctgggccaggtgccccatctgtgggctctggaaaaaccccatttgtaaataatatggtaaccattcatttgtctgtctccgccctggactgtaagctccacaagggcagggatgtatctctccagtgtgcctagccagagattgggaaagagcaggcccttcataaatacttattgatcaatacttgttgatggaaggaaatggggagccactgaaggattctaagcaaggtctcagatggcatcaatctagctggaggtaggaaggaggccagtgaccagacaatggcagtggccagggtaaaaatgatgcaggcctgagctaagctgggagtagggggaatggaaagg

SEQ ID NO: 2085 - DNA, 4001 bp, Homo sapiens
tgagtaacaagtgtatggaaagaaactctctggatactaaaacaatagagcacactacgtgtgctcaaaattcacacacccacagtcatctataacctaaattcagagtccgtttcattggtggttagggcacgcctctgggcattgaactgctgggttaatctgggaattattcttttagatcagacatgaaatcaagcagagaaaaatgagagaggaggtggagggtagttgtctttttcctgcaataagaaaatgtgtattccaacaaactgaagaaaattgagttcactgtttatagttaaaactacatattactttgagttcaaattctttctattaatacataagatttattgaagttatattgtttgagtaggatcaagaaagctgaatattatttcaggttttcaagccataaggacaaatagtgcctttaggttttccattcaactaggaaaattatagcttcatatttgcaacactaaagctaatgcagtgtcagcacctccatcaaactccgttgttcagcagtttataattcaagcagaaatgttcactccaagaccaaacttggcctacacaatctcaaagaaaatggagaaaaaattattttggctagcgctgacttataaaagcaaaagagagggtgcttttacaaagtgctttgaaaaacatctttgagaatttgagaatgtaactggggattactgagttgacatccagcattactaaagttatagaaaggacccaaaattccatgacatcacatcagcatcaggagtatcacaactactttcatgaaattcttcatcaggactaatttccttatcaaacagaattactgttaataggaaaaaaaaacagttatagtggaaaataaagacaggtaaaaatttctcatgaaggcaacacaagactttagatccattttccctttaagtactgactctctagtgcaccatacagacatatataaaatgaaaaaaaaattttttttccccacttttcaaagtagttcataatggcgggctggaatttccagaaacaacttttctcttcccaaatgctaacttgtacgtagaaacagcttaatgtagaaggggatttccagctgcaggtgacaagagctattgggctcctcatttactgaagctgggtggggagccagtgaattctgggatctcatgcactttgaagtcctgtggtaggtggtttgtagattgcctggtgcctttgtggcattctgtgggtaagttggccgccaacccctcattgctctgatctcccacaccttaaaaatatgtcaaaactttaatatagtgggatcagggcattacattaaaaaatcatcttttcctatctatacaaggctcgcttgtactaaatacagtgtaattctaggcactccgtgtctgttttcactcagcatttattaaagccctattatgggccaggccacagatgatttgatgcgattctcatcctttagaaggtttcaggagaaaacaaaaagtccataaaaggaattccagtacaattgtggagtgccatctggacgacttcactgaaaaggttctggaggtgtcagagcgacacctcctctcttccccactaggcagttctcaccaacctttgaaatcacactgactcacctggtgggtgttcccttaagttccgttcgtttatcaagcacttcctgtccctgggaccctgggtcctggaaccatcaggccacggagagatacggaagagagggcgagccttaaggcgtcgcctaggagggtctggccgggcctctggcattgccgggggcagggagggcttaaagggctcaaggctcacctgattgaactgtgcagctatgagcgagggttcccatatcttagaactggtgttcacagttcctcctttctccttcttgggtgccatgcaaaggacgggagaagcattggcctctaaactgggcgcaggccctgcctaagcgtccccgctaccacagtaaccgaagccacgcccagttcctgaaccacgtcggctcccctcccccaacaccgttcggaatccttgggtcaaccgcctccgtctccacagcaacggagtttcagagcgcgcggcagcttgggggcggggttcccagtcccccggtcaaattttaggacttttcagcaggaaagctgcacaactggaggagggcaggacgaggctggcctcgcaggtcgggctacgttcttctacggtctgaggcgttgtctagaaactcaaaatctctggaatcccatccaggactcctccatcaagatttcttccgatcctgagtaaccaagattggaatactgaccccttcaggaggcagcccatgccgttttttcccaaccgctctaatctgccccaaatgcttccttatatgaatccaaatttgtctctccttgacctctaccctctgcactgtttcagcctccgcctctggggccttactaaacaagtccaatcacccttccacgtgaccccttatctaactgtaggtgggattaatgtacttatctgcccaaacagctccagtcctttaaactgccttttattgattggtaagtagacttttttttccccttttttcccaccctgcactcatcaatatctaaaatatcctggttggacaagtttcccaaaataatgatagtaataaaaaccattgtttcttgggcactggttatatgctatatacaagattatttcatttaattctcacaaccaccttatccaattcccacagtgtctgattgatggtgccaggattagatcccaggattatctgagtcacagatctagtgtgcataactgctacactgctgtctactactgttttaggcctgccaaaatgagggatacccccttctggagctagatttacttttgttttttattgcagtgagacaaatttgaggacaccctggggcagagcgcaaccaaaggtgccttgcggtctcattagtcatatggaattcagcactgaccagggcttaactagccattaaggccctgcactttgcctagaggtgagatgcttcagttatcccagtggcccagatgagtgaggtgatgcaagccagaaacttaatttccctgggcacaacctgatgaacgggtgaccttccacgggggatgttctaaaccttttaattgctaacccttttaatttctttgaggaataaattgagggaaggaggatagtgctatccagccactagcatcctttttcatttgggggcaaattttaatgatgatgcttcaacttttgttcgtaatttggaccatgaaaggaagtttatctttccaccctaattctttaatatagttagagtgagccctcccatcatcacagttcttcatccctggatttaaccaactttggatccaaaatattaaaacataaataaatatacaaataaaaatacagcataacaactattttacagcatttacataatattagatattataaataatctagatatgatttaaagtgtaggagaggatgtgcgtaggttatgtgcaaatactaggccattttattgagaggtgaagccagctggacttcctgggttgagtggggacttggagaacttttcttacaacaggattgtaaaatgcaccaatcagcactctgtagctaggattgtaaaatgcaccaatcagtgctctgtagctaacaaggggattgtaaaatgcaccaatcagtgctctgtaaaaatgcaccaatcagtgctctgtaaaatgcaccaatcagcactctgtaaaatgcagcaatcagcaggatcctaaaagtagccaatcgtagtgacgattgaaaaaagggcgctctgataggacaaaaacaaaacatgggcggagacaataagggaataaaagctgtccaccaccaaccagcagcggcaacctgttgggtccccttcaatgctgtggaagctttgtgcttttgctgtttcactcttcacaaaaat

SEQ ID NO: 2086 - DNA, 4001 bp, Homo sapiens
tgtgataaccaagtgaaatatcatatgtagttgttcctggtgcaatccctcatatataatcagtcctcaaaaaatactggttgtttccctttctgtccatgttactctattgttgttattatttatttatttatttatttatttatttatttatttgagacagagtcttgctctgtcgcccaggctggagtgcagtattgcgatctcggctcactacaacctctgcctcctgggttcaactgattctcttgcctcagcttccagagtagctgggactacaggcgtgcaccaccatgcctggctgatttttgtaattttaggagagacagggttttgccatgttggccagtctggtctggaacttctgccctcaagtgatccatctgcctctgcctcccaaagtgctgggattacaggcatgagccactgagcccagctagtattgtaattattttttaaaagcctatattccatacaaggatgtgaacatcatgatggatggggcttatttcatttatatatgtcataaatacagcacctgccacatactctaaataaatagataatttctatgtttagctattgttagtatgtttacttaaaccagggctacagatttattgaaaaattcattaatgtgagtcttcaacaattattgtgttactattatttgtatggggctatcatagacgttggagacaaaaataatggtgagcaaaataagagacactgtctctgctactagtttaagaggggagatagatattatctcataaaagaatgtaaaattgaattgtgatcagtgctgtaagagaggtacgttgtgaaataatgatgtagtaggtgagataaacgttagaataaaagcagctcagcaagaccctatctcattgacatattttccattggtctgtcatgtcactgtattccataatagtctaattcacttttttgcagtttcttttaagttacaaaaactcctggggcaatgcttctttaaaatgaaactcttcctgggcaagaagtttggctgtagggagatgaagaagactgctagtggttttcttacccgttatctattaattaatatattggtactagttaccgtgtcagaatggtttagacactttcattttattttattttatttatatttatttatttatttattgagacagggtcttaatttgtcacccaggctggagtgcagtggtacaatgtcgggtcactgcaacctctgcctcccaggttcaagcgattctcctgcctcagcctccggactagctgggatgacaggcatgtgccaccatgcccggctagtttttgtatttttaatagagacggggtttcaccatgttgtcctggttggtctagaactcctggcctcaggtgattcgcccccctcggcctcccaaagtgctgggattacaggcgtgagccaccacacccggcagatacgttcattttaaaaaggcgaatgagtcatagaacaattgagtttagtgatgtttgtaaaataacggaggctcaaatccctaggtagatgggacacaatctgagttcattgggctagtgagtcagggtgacccccagtcagggtattgaacataggtttcatcaaattgcagagtggtgatgtcgaagaaaaaaagcactttacaattttatctatgctgggagtttccttaaatcatctcacactgaatatctacggcccctctctatttagaatttcgttgtatggtaacagaaactcccaattatgtttgcagcccattaagggaagaattgggtactacttaatgaattagggtaatcgttaaatcgttaattggaaactcccgctgaggaacaactggtataaagtcacgcccgccctttacgcgatccttctcttcctgacttacctgttcctaaagtagtactgatttcctacagtcgacgacctagcttgcagccgggctaacgtggccatggtctcttggccttgggtttacaactggtgttactaccggtctccatggtaactgggctaaaccatagctcactcccggggttcgactttttgttcactcctcttttctctcatgctgctttgactttaagagcactaaaaagagaattaagaaatttctgtgtagcacaaaagtttaatttatttgtctctgtctctactgcgagtaggaagaggggattataggaaggggaaagcagtaaacgcggagaactaatggttgctccgggcatccggtttccgccgcctgtcggcttccggaagctcatctcaaaatgctgaactgctctttggaagtcgccggtgctgttgtagttggagtctgttcacgggcctgagcttcgaggccaggctcccgggtgtcgttaatgttcggggccgccgggcgccaaccgatcggagctccagcagccgggaacagctggtgaggctggcggccctggggagggggaggtcagggaagggtgtgattgcccgaggccgctccgctggacctggaatggaggcgggagggagctgtgatggatgatctgaagacatctaggccttgctctcactcattcctgggatgcacgcagtttgagggagctcttgggtgtgtgccaaagatttgtgaaagaatacagtaaatgttttctgattgcttgtttaacaatattttagaagtcaagcttcctgtactccaggagcaattcatctcctcattgattgttgacaacactagggacaggaagaatttatcttaatccgggccttattccccactcctctttcaatatttaccagattataccaagtcttttggaagataaattccagaaatctagagttctggaagttcaatcgtggaaaacacatcaccctctcacccccttttttaaagagagagggtaacctacctgtttccaccctcttgaacattctattcaagttaaagtgagatatgtatgggggctttccaagaacctataactgtcaggattaagtttggggcttgactatgtctatggtatcatgttagaataatatattgctttgacttttcaaagtatttccacaaattaatacactttatcctatgacagccttgtgatagcagaatatcacaagcacagaaaattcaagtaccgtgtccaaagttgccctgtacattttaatcctagagctagaatcctgatttggggatttctagttgaacactctgtattatctgtcctgtttttctcccaagcccttttcctccaaacataacataagacaaccagtgacacaaacaagcaatttcccattgaaaatcctcaaacataaagttctgaccaacaggtgaaagaaatgtggctaaatggtgcgtgttcattcctagattctgcaaaaattagaacatgaggaattctagtagtctgtgatctcagataattgcttttccatcacctatcactgaaaagttaaaagaataccttatccaaaatatttctagttggacctgatcatcctgtagttaattttatagtgaatatagatttgattatactatttgtaaattattacattttccagtgagaaaagtagggagcattttttaaatgaaccagtttttaatggtataactagcatagaatgaaatgcacaatttttacaggcttaattttattagttttggcaattgcatatacttatgtaaacaccacacaaaacaagataatggatttgtccatcaccccacagttccctctcaaggatacctgtcttaatgtttcactgttcattatcttggttaagtcagggagacaaaatgtcctatgtagattggtctgctcttcctagggtgctattgatttgtagggtaggtgactacatcagaatgtgattgattctctcaacttcttttacctttaaaatcatggttaggtactgagagaaacctccttcaattctctttaaaggctcgcttgtcatacaactcaccatttcttatggcaccagagta

SEQ ID NO: 2087 - DNA, 4001 bp, Homo sapiens
tcctgcttcagcctccctagtagctgggattacaggtgtgtgccaccacaccagactaatttttgtatttttagtagagacgcggttttgccatcttgaccaggctggtctcaaacccctgacctcaggtgatctgcccacctcagccttccaaagtactgggattacaggtgtgagccaccatgcccggccccccccttttttttttttcagacagggtcttactctgtccacaggctggactgcagtggcatgaacgtggctcactatagccttgacctcttgggctcaggtgatcctcccatttcagcctcccaaaatgctgggattacatgcatgagtcacagcacccagcctgcctctgtccatttatactgggttgtctttttattattgcacggtaaatgttctttataaattctagatacatgtcctgaatcatatatatgatctgcaaaaattttctcccattatgtggattacattttcacctttttgtcttttgaagcacagaagttttaaatttttgtaaaagtcccatttatcggcctggtgcggtggctcacacctgtaatcccagcactctgggaggctgaggcgggcggatcatgaggtcaggagtttgagaccagcctggccagcaaggtgaaaccccatctctactaaagatacaaaaaattagctgagtgtggtggtgcgtgcctgtaatcccagcactttgggaggccgaggcgggcagatcacctgaggttgggagtttgagaccagcctgaccaacatggagaaaccccgtctctactaaaagtacagaattagccgggcatggtggcacatgcctgtaatcccagctagtcaggaggctgaggcaggagaattgcttgaacctggcaggtggagggttgcagtgagccgagatcgcaccattgcactccagcctagatgacagggtgagactctgtctcaaaaaaaaaaaaaaaaaatacagatagggtgcagtgtatactgctcaggtgatgggtggaccaaaatcttacaaatcaccactaaagaacctactcatgcagggcaaggtggctcacgcctgtaatcccagaactttgggatgccaaggggggcagatcactcgaggtcaggagtttgagatcaccctggctaacatggtgaaatcctgtttctactaaaaatacaaaaattagctgggcatggtggtgcctgcctgtaatcctaggtacttgggaggctgaggcaggagaatcgcttgaacctgggagatggaggttgcagtgagcagagactgcaccactacacgccagcctgggcaacagagcaagactccgtctcaaaaaaaattactaatgtaaacaaaaaaaaaacaccaaaaaacaaaaaccttagtcatgtagccaaataccacctgtaccccaataacctatggaaaaacaaataaataaataaataaataaaaagttttgaaatcaggaagtgtgagtcctccaactttgttctttttcaaaattctttgggtattgagtgccccttttataagtggtttcctcatctgaaaaatgggagaatttctcttggaaatatctatgatggcaggaaaatacagcagataaagataagtggcatatcatatatatgtctggaggccgtcagggaaagcttgttcaccttacaccccaccttggccctgcacctaccagaaatcagctggatgagtcacagtgagattttccacccctgctcaccgccttgcacataggatgggctctgtctgagcctatactttgcctgttggcttgaattggatttgtttggtatacagggcagttaaactgggaatagatggcaggtccaattattctcagcagcagaggtttaggaatgcatttcaggaatatccagccatgtggttagggtttgagaataaggcaaggggctgtgtgacctccaactactggacagtgtcatttcccccagcttgtcactggttcagtggcccccattacacaatgaagataacaatcgttgccttgccaacctcacagtgattattgggccagggtactctctcccagaaagccttccctgactctccccagactgtgtggggtttcttctctttgctcccacaggcccctgtgaatttgcttcattacagtacctttcattctgctttgccaatgactgcttttctctctgtctcctccagtctgcgagctccaggatggtaggagctggattggccacatcccagtgaccccagtactcagcacctggcatagggtatgtgctcgatgcctgtctttgttagactgaacagaactgaaagtgctctgaatggctgggtgcggtggctcacacctgtaatcccagcactttgggaggccgaggtgggtggatcacttgaggtcgagttatagaccagcctggccaacatggtgaaaccccgtctctactaaaaatacaaaaattagccaggcatggtggcgcatgcctgtaatcccagctacttaggaggctgaggcacgagaatcacttgaacctgggaggcagaagttgcagtgagctgagatcatgccactgtcttccagcctgggtggtagagtgagacttagtctcaaaaaaaaaaaaattggaaaataaggccaggtatggtggctcatgcctataatcctagcactttggaaggctgaggcaggaggatctcttgaagacaggaattcaagaccagcctgggcaacatagcaagacccccgtctctacaaaaagtaagaaaaatagcagggtagggtggtgtgtgcctgtaggcccagctactcaaaaggttgaggcaggaggatcccttgagcccgggaatttgaggctgcagtgagtgatgatcgcaccattgcactccagtgtggggtgacagagagagaaagaaagagagagaccctgtctaaaaaaaaaaaaaaaaagaaaagaaaaagaaaagaaaagaaaagaaaaataaccaatatttgcaaaaatgtgaagaaattgaaacccttgtgaacgtaaatggtgctgctgctgtggaagacagtttggaggctcctcaaaaaggtgagcaaggccggacatggtggttcacacctgtagtcccagctacttgggaggctgagttgggaggatcacttgagcctgggaggttgaggctgcagtgagccatgatcatgccagtgctttccagcctgggcaacagagtgagatgctgtttcaaacaaaacaaaacaaaacaaaaccactaaacatagcattattgtataactcagcagtttcactcctatgtatacactcaagaaaatggaaaacaggactagaacaagtgtttgaacaccaatgctcatagtagcccgattcccaataccaaaaggtgataacatcccaattgttgacagatgaatggataaacaaaatatggtatatacatgcaatggaatattatccctccattaaaaggaatgaaattctgatccatgctacatgaaagaaccttgaaaacttgatgctaagtgaaataagaaacacaaaagcccaatattgtatgattccacttataagaggtatctagaaaaggcaaattcatagagacagaaagtaaaacagaggttactaagggatggagcagaaggaaatgggaagttattgctaatgggtgtggagtttctgtttgggatgatgaaaagttctggaaagcatgatatagttgcacaatattgtgaatgtacttaatttcacagcattgtacacttaaaatggtaaattttatgttatgtatattttacaataaaaatgtaagtggttagatcaatcctataataaaaagcttataaaaaatgagtagaaatggccagtcgtggtggctcacgcctgtaatcccagcacttgggaggccgaagtgggcggatcacttgaggtcaggagttcaagatcagcttggccaaccagatgaaacccccgtctctaccaaaaaa

SEQ ID NO: 2088 - DNA, 4001 bp, Homo sapiens
ctttcaccctgatgaagtcctattctttacttttatactcactcttattctggttcccgttcttatgccaccctctacctctccccagctatctccaccacactgtcaatctcactctctcctagctgtttctaatccttctttaacaaacaattgctggctttgcatttctctttcctccaaaatcacccaggcctccacttattcactgctaaaaaaagaggactctatatttttaaacaaacagtgtttttacctaaatcaatctggcctggtatatgacaacataaaaaaactcaaggatagagcccaaaaactcaccaaccaagcaaataattatgctgaacccccttgggcactccttaattggatgtcctgggtcctcccaattcttagtcctttaatacctatttttctccttctcttattcggaccttgtgtcttccttccatttagtttctcaattcatacaaaaccacatccaggtcatcaccaatcattctatacgacaaatgccccttctaacaagcccataatatcaccccttaccccaaaatctttcttcagtttaatctctcccactctaggttcccatgctgccccaatcctgcttgaagcaaccctgaaaaacattgccattatctctccataccacccccaaaagttttcgctgcctcaacacttcaccactgttttgttttgtttttcttattataatataagaagacaggaatgtcaggcctctgagcccaagctaagccatcatatcccctgtgacctgtacgtatacatctagatggtctgaagcaactgaatatccacaaaagacctgaaaatagccttaactgatgacgttccaccactgtgatttgttcctgccccaccctaactgatatgatatattctcccctgcccttaagaaggtactttgtaatattctcccccctccacttaagaaggtactttgtaatattcttccctgcccttaggaatgtactttgtacacctatcccaaacctatatgaactaatgataatcccaccaccctttgctaactccttttttggactcggcccgcctgcacccaggtgaaataaacagccttgttgctcacacaaagcctgtttggtggtctcttcacatggacgcacgtgacaaaaggggctttgaagggctccccaaaatagctcagttgggagagcattagactgaaaagggctttgaaacttctttttcttttctttttttctctttctgagacaaggtctcactttgtcacccaggctggagtgcagtgagtgacttgatcacagctcactgcagcctcaacctcccgggctcaggtgatccccccacctcaccttccaagtagctggaactacaggcacacaccaccatgcctggctaatttttgtattttttgtagagatgtcattttgccatgtcgcccaggctggtcttgaactcctggggtcaaatgatcctcctgcttcagcctcccaaagtgctgggattacaggcgtgagcaactgtgcccagcccaggttttgaaaatattaaacatgcatatacagtagatcctcattactcattgattacgtatttgcaaatttggctactccctaaaatgtatttgttatacatatagcaaatagcactagtagcactagcctgggaaaaagatcaaaactgtggtttccatattgcttttgcgccatccatattgcttttgagccattgtaaagtcgaaaaattgtatgtcaaacaattgtaagttaggggccggccgtattctttctaggagcaatggttcagtatttgctaatttaatgtttgtggcaactttatagaacataactatcataataataagaattgactgtacgagaaaatatattactatttctacaggtatattattataaattacctttagcatactaccatacagcaacccaaagcgtgtttcaagtccactggtgtggattagcccactgggatgacaccttggtgatggaatattctgatcagtgccattccaactttgttctattcatagaagcctggttaagagaggttctggagtcagagatcatttacttaccagccaggtgaccttggataaatataaattcctctaccctcttttttttttttttttttttttttttggagacaaggtcttgctctgtcacccaggctggagtgcaatggtgcaatcacagtttcattatgtcggccacgctgctcttgaactcctgagctcaagcgattcctcttggcctcccaaaatgctgggattacaggtgtgcatcaccaggcccagccattcaaccctcgtaatattggtttcatcatttgcaaaatgggggctaaagatactgctttcaccaagctgtgtgtttgtatgtgtggtaagtgatgaggagagtgttgagattaaattaggaatgcatgtaaagatttttgcattgtggctggcatcaatttattacatgtactgatatgttttgagcacatactgtgcttggagctattgtggatactggggacaaatgggtccttgccccgatgaagaagagttctaatctaaagattcattgtaagtactcagtaagtggtagctactttattggttttattaaaactttatattttacatggggaacttgttgttgttgtttgtttttgttttggtttggtttttgagatggagtttcactgttgttgcccaggctggaatgcaatgacacgatctcggcttactgcaacctccatctcccaggttcaagtgattctcctgtctcagcctcctgagtagctgggattacaggcatacgccaccacatccggctaattttgtatttttagtagaaatgaggtttcaccaagttagccaggctggtctcgaactcctgacctcaggtgatctgcctaccttggcctccctggcctcttttgttttttgagacaggatctcattccatcggacaggctagagtgcagtggtgtgattgaggcttactgcaacctcgacctcctgaactcaggtgatcctctcacctctgcctcctgagtagctgggactacaggcgtggaccaccacaactggctaatttttaaatttctcatagagacggggttttgccatgttgcccaagctacatggaaagttattttattcatatatttcttttctaagaagaggaggtctccagttttttttttttttaaatcttcaggtcactctggaatgtttccaatgtggaggaaggggcccagcaaaactaactaactcactcactacatggagaagcaactcaagaaacaagctgactcaagaaattagagatcattcatagtgccattgttgccttcaaaggtgggcagtgcattttttaaaaacacatttatttattttatttttttggtggcaaggtcttgctctgttgcccaggctagagtgcagtggcatgatcttggctcattgcaacccccgcctccagggctcaagccatcctcccacctcagcctcccaagtagctggaagaataggtttgtgtcaccaggcccggctaatttttgtattttttgtaaagacaaggtctcgctatgttacccaggcttgtctcgaattcctgagctcaagccatcctcctgctcggtctcccaaagtgctgggattacaggcctgagccaccgctcccagccaacacatttatttacttttagaaaatacagtttaatccatcttgaattgatttttgtataaggtgtaaggaagggatccagtttcagctttctacatatggctagccagttttcccagcaccatttattaaatagggaatcctttccccattgcttgtttttctcaggtttgtcaaagatcagatagttgtaggtatgcggcgttatttctgagggctctgttctgttccattgatctatatctctgttttggtaccagtaccatgctgttttggttactgtagccttgt

SEQ ID NO: 2089 - DNA, 4001 bp, Homo sapiens
cagttacaacagagtacttcctcttagaaagtttgtattggcaacgttagggaagctgcagccagccagtcaggcagctgcgctcaccagactgctaaacaccattagttggcaggaggaggaagaagccagtaacaaaatctattaaggctgaactctgaaggagtttcactaacttgtgtcctgggccaagggatcgagaaagtttcgtgcattcttcttgctaaactaattttactttacaaaaagttgtcaaaaatggcagctttgggaggaaaacaagcaaagctagggctatggagtttccgagaaaaatctctgcaggcttgaagataaagggagagtccaagaaaatttctacttcaccaccactgcctcacactctgccccacgcacacttgccttctttaagacctaacaaaagacctaaaacagtcctgtgattttcctaggggtttaagttctgtgctgcagcaacctcattctaacgtgacgaaggccagccaggaaaggcgggaagctgcaagcacgggttaagtggagcctggccagtagggtgtacaggaaggaaatgcagagggctcctggctgcagcacccaggagagtaatggtaatatttcagcactctcaacccccaagttttcctaggagatcaaacagaaggcaatatacataagaagacttactgagtaagaaggagcgaagagaccgaatggtgaattttggttccaaactccgtacaggtctgtgcctgcaggactaaaacggggtgtggaaagggtcttgtggagatttcctccagaacagacaagcgggagtattcctctaaacaggggaatgagagggttctctaaagaatgcaggggaagaagttcaaaacccttggaagtcttctgagatcaacaaggggaatagagttttctcctagcatggagaggtccagccccttcactggatgagtggggttctctgccccagctggacttccacaggaggatggaggaaagcatcctcttgagcaagtctggagagtgaaggggtggggttgcaaggttggagaaggaggtgtttccctcataaaaatgactgggcctttcttgcaatggctggcacaaagtcggaagggtctggggacgggaggggcctgaagtgatttctgaggagttgggtttttcctgtaaggccctgggagggaaggcaaggtactttgcgcaatgacacatttcagttgttggatgtgaagattctccttcgaagacagaataaagaaaggccccttcattaatgcgggtttgaaactggtctgaaatggtgtgcctgcagggattcgggaggaaatgcgacgcccacccccagacttgggaaaggcgggggcaataattctctaagagaactggagcccgaaagaggaatgaaaagcccccgcgccgcgcacatacactctctctcactggaaagttaggagcgaggaaagaactctgaagtgatttgggaacgatctgaaagcgcgcaagttggaagtcgggttgaagccagcatagcggagcaggggtcaggcctctgcgtggccggagtgggagagcgcttctgagaacaagatggggcaggaccgaaggggcgtgaggtcgacgctccctagggatgattcggagggtgaaggaggtttgggggtggttccgggctctcggaggtgactgagggagtccctgagccaatgcccgggggtgggaggcgctaccggtactcactgagctgatctccagcgccagggcgcactgcagcgccttcaccttcggcatccgtgcggggaggggcggcggggagtgaccccggccacgggcccgagtgaggcggggagacctggggctgggcggggacggggaggagacgaggtggcggcggcggtggcagcagtggcccccaggccggggcccgcggtccagcctgggttccgccggagaagcagctgagcgcggggcgcagactcgttgtcatggcagccaggaggggcggggccggaagagaggccgcgcggggcactccagggctacccgcgctgggacgagcgctggaggcggagcttgacgaacgccgagcgaggcggagtcgggcagggggcggggcttccgaaggggcggggtgaggcaaggcagctcttctgtgacgtcaaactgcgcccaaagccggacgaaagggagctgctgtttgtataatgggacggtgctctgttcagggagttggagttcctgtaaggccgtcggagggaacccctgagttacaacgtggtgatggcaccttgggctagtggcgacccactgtggcctcagttttcccaattgtaaaagaataataattattgttagtcctcctatttaaatttcacggcacggtttacaaagccagcataaggatactgggaattagggaagagacttgcccaaatcaaagtcggaaccaggactggaacccaggagctctcaagttaaaccccagttgcctccctgaggagaggggcttgcatcagatggtccatactcctagtctcctattctgtgattccctttgttagcgcgttcccttttcccttcaaattttcctgtctaattcacccatgtatgcgtcttaatgcatattgcttaagtggaactgtcaatgaggtgccaacaataagtccagctgtgaagggcctgacaatagaccatcaaagataaaaagaacctaagagattgcccaatccaatcatgttaaaaatcatttgtattgcaaaatacattatacatgcagaagtgtataaaacacgtttatcttaataataatgtgaacagtacctgtacaactagcacccggttaagaaataaaacattaccagcacctgaaaaatgcccccaacgattacattgcctttctcgccctggagtaaccactaccctgacttttgtacaataattctcttccttttgccattcatgtatgcatttctaaacaagatattgtttaatgttttccggtattgatagtatataaatggtattaatactgtatgtattcttctgtgatttgcttctcccacttaatattatgccaccggtgatgctgtgtagctgaagttttttccattgctggacagtattccaatatagattgatttatccttcctactatcaatgatcacttacactgttttcatttttagctattattaacaatgttgtgaacattgtagtacaagtctgtgtctattaatgcacatgtactagcgtaggagtgggttagctgggtattagggttttgcacatgtgggtctttaaaaagtaagaccacaccattttccaaagtagtgtacctatttatgtttctggtgcttatgtataagagttcttatttttccacatcatcagcaacatttgtgtttggatttttaacttttgtatatttggatgtgtgtattttaggtatttcattgtggttttatcttgaatctctgggtactgttgaggttgagtacctttggttttgttagcctttccattatctcttattgaactgccaagtagttatcttgcccccttttctgttggtctctctctcagttctttatatactctggataataattatatgtctactctatatgttgcaaatatcctttccactttgtgtttgtattttaattttacatatagtctgtgatgaacagaagataaattgttgtcatggagtatgagtattctcagtttgaccatataattccaagttgctatccagaatgccataccagtctatgctcccaatattcgaaggttactatggccccacattcttcccaggcttggcattatcaagggttcttgttttcccccaacataacagatgtaaagtgttatctcactattgaatttttcagattactgatgagtctgagcatgtctgtatatgcttataagattttctatctttactaaaaatcatctgctcataatgctttaccccatattctatc

SEQ ID NO: 2090 - DNA, 4001 bp, Homo sapiens
gagaaagtccacaggggattaaagtgagcacatctaagtggtttttccactccaataatgtacacctaaatgatttttccatcaaaacactgacgatactcgaggagaagccaggaggtggggggcgggtaaggggtggagcagcgccaggaagagaaagttcccatctgcttcccaatccagcccgtggtctccccttcatcctagggcacagaggtgaatttttgctccctgcctccccccgcccccgcctggtttctcaggcacgacgtagtaaacaccgggagagtccctggaagcgcgcacctccccccggcctgccgaggacagctcaagcaggttatgaatggccccacgattcccggctccttttcacacgcggacacgcgcagacgcgcgctccagcggcgagggtttaatgccccagtaacagcaaccaccaacacaatcaatgatcctccatttaaaagacaggagctccgccgccgctgcttccatttccttatccaagcggctcaaagcgagcgacgcaatctatttttcccatggtgactcattaatgaggacgctccataatttccttcactcactacatagtaagggaaattaaaagccaaacttaaaaccttccagggtcttaaatatcggaataaactgtcattttcgaggacaaccacagatttgctatggtccctctgaatctgcaccaagtccaagccaatcgtcattttaataagtgttttatgcggaggcctatctgttacggtacacaggcatttcacaaagaaaacgcactacacgctactcaataagatgtatcaacgacaacatttattcttataattcacaaaaatattcaggggaggttttttttttaagctacatcttctcatcgtaaaaggtttggaatgttttaccgtttgattcgggaattcaggggtggggggcaccagggtcttagggcggcctgggagtgcgacccgaggctacgggcgccggggctagcaacctcctgtcagacgcggtctcctccgccggggacgaggaagcccaaacgggcgcaccaacttatttcacaccactctccacccagccccgcaaaaacgagaaacgtttgccattcccagtgagtttcaaggctgcaaatcctccggagaggtcctagatggtctctccgggtccgcgacgcgaccacagtacctactgcgacttctgttttcgcaccgcctttcccttcgcacggaaccctcccgaagtcagacattgccgagcgcccgcagagcagcttggagtggcggcgccggacccggctgtcgggcgggctcgggtcccggctgctccgggccgggcactgcgcgcaaggacgcgaccccgccgcccagcgcatctcccaccgactcccgggctgacgcgagggcagccccggggcgccggctgcgtggaggccgagcctcggtcacctccctcgtcacggacgcggccgccggggccccgcgggctcttcgaaggcggcgcggcttggccgcccgcaccgccgacacccgaggcccaacgccgcgacgcgggccgagcggctgacgaggtcccacagcgcccgtgggtccgggccggagtcctcctcaccagctccgcgctccgggaggggccggcaacgggccggggcgggaagcggcgcccgaggagcgagcgcggccgcgggcctcgtgtcactcaccgtttgaaatgctcgatgatcttctcttcccgcacgttctcgggtaagttgcccacccagagatgcctggtttcccggaccatgctgggcggcgtgccggcgaccgccgctgctggctccccctcgccggcttcgtacgagaccgtcagcgccgggaggcgggtgccggggcggcggcggcggcggctgcggcggtggcgtcggcagcggcggcggctcctccggctcccccccgtgcagagaccatccctctcccccaggttctgactctcgggcctcgcagctcagctctgccgccaccacacacccgaagccgaccctcgcgctccggcagcgcatgcgcccgggcaggggcgggcgggggagcgggaggaggggcgagcgggacacgggcggcagcgactacgacggagctggcgctgtggcagccggacgcttcccactggcgcgcgcggcccgactcccgccgccgcactgcctccccctcgccgcgggcgcgcgcgcgtcctcccgcctgccaaggcggagaagctgagttcctcccagccggcgcgcaggcgcgcggaccgggcgacgaagtgagggactacaggcggggaaggaacgctcgcgcgctcggccccggtgcgcaggcgcgcagctgctagtggagtcccgctgcttggcgggctctcggtcgggttcccgcgccgggcaaggggcggctgaggaagcaggagcggtctttagcccctccagcggcaaccccaggccccggcctggtggaagatatgaagagaaatgcaattggtttccacagggctacgggtcaaagcggctgccaaggcctgtcccctagaagtcaggaccccttcgtcctccgctcacctggcggccagctcctggcgtttccggacacttagattcctgcctgcttgggaaagcgatcagaaaaaggttgcccttctcaccgctctgctgaacagcgacggcttcagaaacgcatcccatccaagagtcactggcttgtaacatgaagcaacttttttttttttaatacggggtctcgctctgttgcccaggctgctggagtgcagtggcacggtctcggctcactgcaatctccgcctcccagactcaagcgattctcctgcctcagcctcccaagtagctgggattacaagcacccgcaaccacacctggctaatttttgtatttttattagagacagggtttcaccatgtaggccaggctggtcttgaactcctgacctcaggtgatccgcccgcctcggcctcctaaagtactgggagtacaggcgggagtcactgcacctggcctaagcaacttttttatatagaatcttgcgaaaccgtttgcaagatacccttgctgatcgctgtggtatagaaggaataaaacggaaatgagacaggaatccaatattgttcccctcagaccataatttaatatttaaacagagaaaggaattagacctctggcctttccaggcctaagagcttttgaaacctacagttgaactttctttttttttttttttcctttgagacggagttttgcttttgttgcccaggctggagtgcaatggtgtgttctcggcttactgcaacctctgtctcctgggttcaagcgattctcctgcttcagcctcctgagtagctgggattacaggcatgcgccaccatgcccggctaatttttgtatttttagtagagacagtttctctgtgttggtcaagctggcctcgaactcacaacctcaggtaatccacccgcctcaagcctcccaaagtgctgggattacaggcttgagccaccacgcccagcctctttttttttttttttcctgagaccaagtttcactcttgttagccaagctggggcacaatggcgctgtctcagctcactgcaacctccgcctcccaggttcaagcgattctcctgcgtcagccttccgagtagctggaattacaggcgcgcaccaccacaccaggctagttttttgtattcttagtaaagacggggtttcaccatgttggccaggctggtcttgaactcctgacctcaggtgatctgcccaccttggcctcccaaagtgctgggattacaggcgtgagccaccatgcccggccagttgaacttttatataaaggccaatttacagaaattcaaggaaaacccataaaattaaggtaactatatcgagagaaaaataaaattatttataataaaaatacacagaaataccagaggtgtgctgcttcaggtgcaagccagatttttttttt

SEQ ID NO: 2091 - DNA, 4001 bp, Homo sapiens
aaaataaaattaaaaaaaaaagaaagaaaaagaaaaaaaatgagggggatatatgaaggaaaaaagtacataaatgctcttttaaaagaaaaaaacagattccctaaccacattattttctatcagtaggtagtaggtagtgttttctaaactttgaggctggtgaccaacaacttgggtcacttgtcctactgaaagtggtagatcttgtgttctcagataaattcctctaaaattctaaaacaaccctttaaagaaataaatacaatagggaagtaaccaagtcaacaagtgggacaaactcagactgtacgtacaggagtagttagatggatcaggaaagaggtgcttcacaaatggcaccacaaaatattaaaaattcacaggttttttttaaagcacctctaatgtgcctctccaaaaacataaaaagatgtcagaaaataaggaaacatcatctgctgtgtcacagtacaaattacaaatcatttaggtttctaattttagcatcagattctttaaatactattattgatctgctaagaatcaatgttcttgaattcagccactcttatacaagccacaagtaatgttttcaacaaaaccattacagattcccaaattgtgatgttctcattttcacttaaatgctggactgtaaaagaataaattacaatctccagtttaaatggtctttataatctttttctaggaagactgaataattactttcctagaaatctaaattaagagcttcctgaaaacttaatgagttgcgggaaatagaaacatgacatttattactagcctgaacaatacccaattatctctcctcctcattctccctaaaggcaaagcctgattaagaaccaccatggtttggttctccagcaacttttattggccaaaggatgcagaaggatatatggtgtctgtggtttaattaacaggatcgtttataaaacaactttacatttatcttatttttaaaattcttgcttttgaataagctgatgtgttagaatagacatgctcctatcccatgcaaaaagctgttcaaaaatgagcagcttgcaaatctatcataaatgagacattgaataaaatattcttacagtgaggtctaagaagtagttcagtctgagaatttgcttcagatactttttgaaataaaatattcaaggcataaaaaaagcaaaactcaaaatatctaaaacagatacatactgatatttttatcctagtcatttcccagagtttttatgtgtctctgtgctctgctgattaaaataaacaacaaaagcagtaggcatcttctaactaaaagttaatttactagtcttcaactaaaaagtcacagtggaagaacatatataaggtgaagaaagctttttaacctttcagatttaaataatactgcatttcaactttaaagaaaggttccaccatatattttttgcactgacattttaaaatacaagaacaagtctttgtaatacaatatatacttcaatatacccaatataccttatatgaattaaaaacatgtcaactggataactgtagtaaggcatttaagtattcagcagaagccataaagaaatttcttaatgagtggtgtccatttaatattaactggatttagtaggtttccttaaaatgaacaggaaacaaaagatgtgaaaaacaggcagtgatgccattatactgaattccagaaaaagcacagtacaatgtgttttctagcagggagaccagcaaactggaagtggatgagcggccccagcttacatggtctattgtatttgatcaactgctgagagaagtattagtagcccagtaggtttgggtaaaggtaccagaatccttagtgctagtctcacagccaaaaacagagcaggtactccagatatacttcctgaactgacctggatgaagaggctttaaaatcaacagagctggacagtataaagttcacggaaaaactcaatttttcattttattttggtatattagtgaatgtctactgatctagtatttcaagtgtggatcacgtaaacaccatgtagaatgtagtaaacggagttaaataagaaaacacactggctatcaatgccagagtctttgaatatcaggtcataaatataaccaattgtgcaatataaccaacatgatgagaaaagcacacctcacaattgacaattttagttcatatgattaaaaaaaataaaatctgaaactgcatttagtgccacattctatcatatcatacatcagattccatgctgtggagccgcactgggctacaggacatacagtacatatagcatgttttaaaccgaaagtgaaaggaaaaatatgaaacagaaaatttttacatacacatctaacggtgttgtccatttaattcgatttatatgatttgctgtgccactttgactggcttgcagaacaccccaaattctcttttccccataaagatctacttccatacagagtagaaaaagatggtggtaaaaaaaacttcagattcttcaggttccaacgattgtgtcccaaatgccactgtatgaacacctaaaaaatattaagaacaatttcaaaatctgcataactataaatgcaaaagtaaatacagcttaaagcctaaaagagaattcgtgaatatcttgtcttttaacacttgcctgtgcctactacatgatgtcgactataaataaaacgtccactgtggtaaatgggaaaaaagaagaagctttaaaaagttaaagggagacatttgtcaattttataaataggcctcctgttttagcaaaaggcacattcatttagacctcaatcaatccaggaagggctcctcactgacataaggaatcaggatatctcacccttcccatcaaccaccacctgcccttcctttctttctgaacaagagcataagaatttcctatagagtataaattctttcagttagaacatccaactttaacttatgggttcttctccttctcttttttttttttctgagacagttctcactttatcgcccaggctggagtgcagtggtatgatcttggcttactgcaacctccgcctcccaggctcaagcaattctcctaagtttcatgagtagctgggactacaggtgcacgccaccacgcctggctaattttttgtattttgtagagatgatgtttcaccatgatgcctaggctggtctcgaactcctgaactaaagcaactggcccacctcagcctcccaaagtgctggaattagagccactgcacccggctgggatcccctctttttcatactgcagcttcccaaagctttaacaggcctctgcacttgagcttgccaggaactcagggcagggaggtgtccaaacccacctgtgtgctctcctaacaaccacactcctgagcgttcggggcctgtgcgcgccgcggtgacctcagctgtctcaaggcagcatctccgtactgaatacctgagcccattctttctgggtccagctcacctaaggaccaagcaagtcttcttttaaaaaaggcttttatgtttctttgattccaaaaatagattaaaaaaaaaaaaagcaaagtacagaacactgtgtatatatcccaccattctgaataaagggaaaaaactatatatatgtttgcttgcaccggcacaaaacatctctagcaggatacataaggaacggctgattcggaggagttctagatggctgaggacaggagggggtggtaacagggggacttttcattgcatactcttttatacttcttgaatttcaaattatgtgaatacattatttatataaaataatttaaaattaaattacaaagatataatttttcacttattagatgggccaaaagtccaagtatgatgatactacatgctgtggacatggctttagtgaaataagcccatcactaggagaaaatgtgacagcctctacaccaagatcccaaatgcttatgttctc

SEQ ID NO: 2092 - DNA, 4001 bp, Homo sapiens
ctttcttcaggttcttagtgcccttggatcttctctgctccatgaatgggcctgagcaggccctgctggcttcagtatccagggaggagctgaggccgcccaagggctcccgggagctggcacaggtgtcagcgggggcagcgagtccttgctccagccttcccctggaagctggctgagccttggcctccagctcctcctggtcctgtgctggagcctggccttcatcgctgccagtccgcacgacacacacagcttcttgctgctctgcagaggcctgtgctgacgcccccaggcacagtgctgcgctctgtggaggagcctgtgcagctgaactgagggactcccctccactgggcactgggaacccgacagggccacaggggctgcctggctggggcccatcccctgtagcgggcaaatatccaaatttctcagtccctgaggcacatcctgccccacttccacctggctctccaggcccagacccagtgtcttttggagagggaggtctgcaagggcctcccaaggactccaggtcagcaacttggggagggtctcccacagacaggaggttgtccccacgagggctctgatcaagccacaggaagtcaccagccccttcctcacactctgaatgagccccttgcctcctccatttctttcttaccctcacagggactgggtctggtgaggatgtcaggggccttccagggggctcctctttgctgagtgtggggcttcttctgtcacaccctggagaactcattccaccgtctctggcctccctgggcctgaggcagctcacctcctccactcctgcaagcctctccctgcaggccagagctctctctgggaggccagcagacctgctacaaagtttcctggggcaactgtcatctaagatgtcacacagagaaacctggagcctcttggaggtcagagctctcccctgagtaggcaccgagggcagctgcatgtggagcccaggagccagcatcgagccccggctctgtaccacagctagcagctccaagacccctggccggacctcagcagcacctgcagcccgggagctgccacctcgaagggcctccttcctggggatcttccttctgctgccagccctgactccgggcccagagcttgctcccggcccatctggtgacaggcctggcatggagctggctccttccatgttctgtaaaagctcacagttgtgttggggactgagcacagggtctcctgtgctggggccttctacgtcccccgcctgggacatgtctgtccacctacctgggccaaaagcacaacacgggccctgtgtggagacagaaagaggagactttgtcttggagagtccgacctgtcagcccgttcagtgggaactgggaggagcccctcttccagccagctctcccagacccttccactcctgaggcctaggggtgagcactccagggaggggagcacccagcaggagctggtgtcctgggtgagggtggagaggcctgcctccaaacagggccgagctacagtggcctccagggtcttcttgtctctgagagttcacacattcgcttaaatgggacctaataagataccatttatttatgacttatgtgcttatttcatttcatactggcagccacaggtgaggacactgagattctgagatgttaagacactcacccaaggaagcacaggaagtggaagggccaggagtctctctcccagttctcacactgcgcaaggagcagatactgaacggggttcgtgcccataacccttctcgtctctctcccatcggtcccgttctgaaaggcgccccacccaggttcccaagccttactgggacagtcccccagcatccaagaaatccgggccccatcggtcgcgtcgctctcacctgggcttccctgagttttccctcctggggttccacccactagctgaaaaggagctgagatcacgtgatgcgggggagggaggcccttgctgagggataggggcggagtccctgatgatgagcaaaaggctgctccccaggcgtgctggcgttcctgccccggcagagggcgccctcttcctcctgagggcttcctggaggaggtgccaatcctggctcccaagcagaggtaggtgggtgcatggggcagcgaggggccttggctgcctgcctgagagtttaacttgatcctaccgcaatagtccctgagccagtaggacaatgtcagaattacctagattttttgcctaattttattttattttatttttaaacttttattttagggtcagaggtccatatgcaggtttttaatataggtaaacttgtgtcacgggggttgttgtacagattatttcgtcacccagttatcaagcctagtacccaatatttattttttcttatcttctactgcctcctaccctccaccctcaagcaggccccagtgtctgttgttaacctctttctgtccatgtgttctcaccatttagctcccacttataagtgagaacatgcaatatttggtttttccgttcctgcattagtttgctaaggataatggcctccagctccatccacgttcctgcaaaggacgtgatctcattcttttttatggctgcatagtattccattgtgtatatgtaccacattttctttagccaatctgccattgatgggcatttaggttgattccatgtctttgctattgtgaatagtgcttgcctaatttaaaaagaaaatctcaaatataattaatgtagatggaaatgcagaatcaattccaatagaaggttagaaataaaaagtttaaagctatctctcatttcccaataccccaactcctggaaacaactgtgttttgttttttgttttttaccatgtttgtcatcatgttaattttttaaatttcataactgtaaataatatactcatgcctctattacttgatttattaattttaactgtgtctgttgtatctgttgacttcctgctgtggtgattttattaaccaccctttccccctttctcttccgcttttcatatatatatatatatatatattttttttttttttttgaaacagcgtctcgctctgtcgcccacgctggagtgcagtggcacagtctcagctcactacaacctctgcctcccagggtcaagtgattctcctacctcaccctcccgagtagctgggactacaggcacgtgccaccatgccctgctaatttttgtatttttcgtggagacagggtttcaccatgctggccaagctggtctcaaactcctgacctcgtgttccacccacctcagcctcccaaattgctgggattacaggcgttagccaccgtgcctggccctcttttttatatttatattttaaattttactattggtttctattatcactttgaatactattcttaaatgtctgtttcttctgtatattgtatctcttgactcttctctgtgtgaaatggataatttcccttgatgtcccctccctgcttctgccgttatccatgaactaagcttttatttttgtatcgctgaggtttatagcatttacattctattcggtaaagataattcagtttaccgttgtttacctgtagattgattcttaacactgaaagccaaatgacatttataatgttatgattatgtaaatacttttactgcagaaacagtggtgtttggctttttttttttttttttttttttttgagatagggtctggctctgtcgctcaggctgagttgtggtagtgtaatcatagctcactgcagctttgacctcccaggctcaagtgatattcccctctcagcctcctgagtcgctggtactacaggcatgcaccgccatgcccagctaattttttttttatttttggtggagacgaggtctcactatgtggcccagactggtctcgaactcctgagctcaagcgatcctcccatcttggcctgggatttcaggcgtgagccactgcacc

SEQ ID NO: 2093 - DNA, 4001 bp, Homo sapiens
ttaagatataaacattaaggtaaaagaaaaaagccttgctctagctctgcctacccaaagtaacagattgggttggtggccctgaacatactcccacttccagcccaggagtgtcctgtgtgtacagcagccatacacattcacacacattctcagtgtcaggatcggccaccttctgactacagacctcacaaccagccttcacagtgttagttcctacttcacgctgagaaggcaacagaggttgaatcaaccagtgacgcacagccagatgtggagttaaaagttatttattgaaggaagactagggatggttcacttgatccttccccaaatccatcctcaaatgcacccgagcaacaagaagactagctcagtcagtgagacgttcagccttacgcagaggctcaggagccctccagaatgagggtaagggacatctttttagaggtgcaaaggagcgattatgattcagggtgacagcatgctaactgcagggtcaataggcaaatgggattcataagcagaatggagtagggtgttcagtatccagtggccagctcctcaagggcatggctgtggaccacattacttctgcttggtcttctgctgggctggtgctggagtgaccgttgaagggcagggctcaggcaccttgggctggcagggctctggaaccttgggctggcagggctcaggcactttggggtggcagggctcaggcaccttggggtggcagggctccttggttttggggatgcatggttcctggggtggaggctggcaaggttgtttcacctgctgctgctgaggctgagggggtggggtgcaaggctgcttctgctgctgagaattcatgcttcaaatgtgtttttttctagagacagaaagctgacacagtgattcaattaaagaaagatggatacaaattcaatgccaaacagattttatttcaggaccctttagaagagaaagcctttcatctcccttaactcccccattacatttaaaaatgaaataagcttggataattttcaggccctttgaagaggaggagctaaaaggcaatttcttctgctccattttattggagttctcttcttggctcccttcctacccaaggcaacttatatctgttctggaaaaatgccctactaaagctggcttctgagggacatgaggtccgcatattaggtcttttggaaaatggcatcagaccactttcctctcctagtaccatgtagaaagcctgtgacttataggatggctttatattcatctaagcctctatggttttgcttctggtctgtgcttacacagtcccttccaaatgcttttcttcccatctctgcttgtccaaatacccctccatcatagctcacatcacttgacacccctaggagggtctccttgagcaaggtctcccaaaagtgcacagcccttctctgcccatctccgtcatgccaattactatctactttgcatttcatttatttatatatatgtattaccttcctgctaggttttatgtttgttaagtaagtacgttaggcattgatttgtccaaagtgcctagcatactgccttaaatggaataaatgctcagtagagatccatctaataaattaaaatttctataaatatcttgtcagggggaaattgcagtgttactgagagtgctctgggcctgagttctagttctgctatgaacttcccatgggcatttgaacaatcttctccaggactcccagttcaatgactatctactgaggtgggagccctaaccatctctaaggtcctttcaaatccagactgtaatttaacttaaaataaagatattccactattctctatctcccattgaaaccctggattaacctgcttacacatatttgcctttagctaatttctaataatgaaaaagtacactagaattgccagtttgttgcaatcagagacttacctggtatacggagcagaatgggctgtgtggtcccttgggtttggtgtgaaggcaatggccagctggcttttataagatgaatgagccctgcctcaaggaaatagaagctctcgggcactctgttttcattcctcacctgtcacacatgactcacactaccatcctcatcaccggttggctcagcttttttgatgaacaccacctgatattttttggcactggctggctgaaaatgatgtcactggcctaattttcactgccaccctcatcctcagacccaggtgcagggcttgccttgagggaggggtgagcagcaggcttcatggagggtttcatgagttaaccctggggggacatctgagtcctgttgaggccttgccacctgctgtccttgtcattgagatggttgttccccgtgttctgtgggacagggcactcttgcacacatgaataggtgggaaagggagggggagcagaggagctgaggtgggccctccttgtctgccttggtgaaggtggaagctagaaataatgaaatggactgattatagaccccttgtctcagagtccaagacccttccatccatttcccccatctttttcccaattccattaaactacacacattcagaataatttacttatgactctcccactctcaccttcctccccctgactggttgctaatctgggaaaacctgctttccttcaccaaccacacctttacccttctcctacttcagggactttcaggggctaatccttcttctgggatcactttttcccttcactccacccagacatctggccctggccttttcctcctttctgatcaggctagactgccccccacctgaaaacccaaaagccttttctacctgcctccctgcagcccatccatggggtcctcaatgctgaatccttctccacttttgcccactgccagctccagccccaatacctagagatcctgctggctgcaaggttttcctcctccttctgggtctgtatctcctgggggctttccgagggtcagagctgttcctgcttaaagcaacggtgtccccaccacagtgtttatttcctcatttattcaacaaatctcagtggggagcctaacatatgcccatcatgcctgtcattctaggagctctctgatgaggaagcccacttttcctctacagatcatgaactccccagggtaagagacagagcacagttgagagccactgagattatggatctcagagagcctttagttcacactcctcaagggatgattggggaatctgaggccaccagaggtgaaataactcaccaaggtcaaaaaaacaaaccctaggaagaaaagaattttacacagaaatcctgtgttctcctttgttttaattccttgtgactccctaatgtctatggaggaaattaagcccaggcagaaaattgattagaggtggaaaggggagcccttcctgactgagagctgggtcacttgtagttctggaaagttttaggagtgacagcgtgaggacacagaaagagccttgccttgtgggtaagccttaatcggtgctaagataaatccctttaagtagaaataaagatgcttaatatttgagtggctctaaacagtgggtgtttctagctctgctaaagtaagaagggcatgaattagaataggtggaaataaggttcagtttatcattactcagggcaccagggtcggagaaaggaagggaaaagccaaaactaaaatgtctgcttctatcctgagttgctttcgctctaggggagctctcagagtgacatcgtgacacagctgaggtgaaggcactgggggaggcagtaggtgataagcccctgagcacctgcacatgcttgccttcactccacgatggtcagattctgccctgccaaggaacttctctttcctggggacacaagaacaggggttccctcaatctttccataggcaattgccataaaactgaggtctctgattcagagctgcactcaaaacacaaactgttactaggtgtgg

SEQ ID NO: 2094 - DNA, 4001 bp, Homo sapiens
caggattagtgagtcagagtcagcttagacaagtgctaactaaactctagcatgactcactgagttgcaagaggagagcccttttccagccctggatgcccaaagcaacagcctctaggtggcattacacaacctcccataggcagcccaggaatgcttgtgggggcagcccttcaccctcctaatgtgagcatcagatgccttctggacaaagcccttcttcaccaactcatctctgtgtacagctcccgcttcacgagggaaaggaatgaagttgtagagtcaatgacacacagtcaagagtggaattgaaagtgaatttaatgggggtataagggagctgaatcatttgctttcatcttaagtctctcttcagatgaattctgagcagctgaaaactagctctggtactaagaccttcagcttcattcagagactcagagtgtgtaggaaagaaagcttcatagcacattcttttttgggggagacagaatgctaattgcaaggcaaatgggactcatacgcagaatgggataggggattcagcatctggtggccggctcctcaagggcatggctgtggaccacattacttctgcttggtcttctgctgggctggtgctggagtgactattgaagggcagggctcaggcaccttggggtggcatggctctggaaccttgggctggcagggctcgggcactttggggtggcagggctcaggcaccttggggtggcagggctccttggttttggggatgcatggttcctgaggtggaggctggcaaggctgtttcacctgctgctgctgaagctgagggggtggggtgcaaggctgcttctgctgctgggaactcatgctgcaacagtgactggtcctggacacagaacagatgatttaagcagagaataatagggaagaagccatggtgaataccacttctggtctcttaaaaagctatgttctttccccttcttgaccacaaagaatacttaatttaatttctgagcctttgaagaagaggaacctaaagatgatttgctcttgctccactggagcagggcctctcctggtgctctctttcttcctacacagcacaataacaggcttctagcaggaatatgagactcataatactggaccattggaaatgtgaggttctttggaaaaaaaaaaccctaacaaattaaatctactcactcatttctgataaatagcatggcttatcatctattgtataactctgacctctctagaaccccaagcaatcccacctgtggcctggctcaagttctcctctgtcttaaatgttttccttgttcctactcattcaagcactaaccaaactccacagatcgcttcatatgggacttttagtggcttctctagaaaaaaccttccagaaatctctctattcccaaactgtcacagaacttgccctaatcacctggcactgataagttactgttatacaatgcattttagctcttatttcctgattaaattgtagtatcatagatgcttaaattatttctttgcaaacaaattgccaaatatagtaagctctcacaaaagtatctgttgaaagaataaaattctctgtattaaaattataaataagaaggaattataatgccagggtaagtgctgtggacctgggttctagtcattatcccattacaaacttactatggatccttgaataaaccaacccccttcttgctgacacagaaagagtgaatgaagaactgataatgtctaaattctcttcaagcctacagtatgaacacttttaaaatgaagatattcctagaggttataattcagttgaacagtctgcatggctatgatcaaattcaataatgagggaaaaaaataccaagaatgccaaggagactctaataaaaattaaatacctagaatggatgctaaagagttccaagtaaagagactcacctggtgtgaagagaggaatactctgtatggtcccttagaactggtgtagtgttcccagccaactggctttttatgcatggaacaagccctgcctcaaggaaacaggatccatctgggctgctgtgcctacattccttacctgtcagatgtgattcacccctcttccctcacccacctgttgactcaacttttgtgatgaaacttgtggcacttgctgtctgacaaggatgtcacctgggctttatccccctgaacaccctttgctcccaggtgtagtgtttacaggaagggtggtgtgggctgaaagagagagaaggaagacattctggggctgctggaaccagaaactgtcctatcttctggaagagtctaatcctcagcacaggtgacacttgtagggctgtttaatatatgaagtggatgtagagataaacaataggtatttctggttattctgggaggccaagggcatggtggctaggtgaaaaatagtaatattctgttaatccatcactcagtatactcgtgcctggcaggggaaaggaaaaactaaaatgattatttcggttctaaaaagccttttctccaaggaggaactcagggtaaacaacataggggcaggctgacctcagtctgtgaaggagagttcggagcagtgaaactctgggaagaatggtcacgttcggaagctctggagcaacctggcccttttagtccatccatttattctgtacattgtgacagtaggccctgaagaccctggctatcatggggaatcccttctctgcagccaacatgggaaggaacaaaggagctgggattccctgagcccttatatcaaagttcactctcctcaagataagatgaaacttaggtcactaatccaggtctacctgcagtacacaacctgttgcaagtgtggtttttggaaaatccaaactatccttcaaatccaggtgtcggatggtccctccctcattattttcactcatctaaatgtttgtagagcaactgctggctgcacagctgtgtcacctctcatgaacttgagcccaggaccagccagctaccaccagaagttcctctgcttagccattgttctaccttccatcttcacgtgatgcctggtgtgtagtagctgctcagagaattgacaattatagaataactgaatgaatggaaggatggagagatgggtggatgatgttattcgtgaagagacgccagaggctgttttgagaattatcaggaaatttttttataggggaaatccttccttgtggcaggcctcatggtataagctgagaaaagctgtaagagcttagcaagagacagatatttctgtcattttatccattatgatttggctgttgccccacccaactctcagtttgaattcccacgtgttgtgggagggacccggtgggaagtaattgaatcatgggggaaggtctttccagtgctgttctcatgatagtgaatacgtctcaaggtatctgatggttttggaaaaggaggagttctcctgtacaagctctctgtttgcctactgccatccatataagatgtgatgtgcttctccttgccttctgccatgattgtgaggcctctccagccatgtggaactgtaagtccattaaacctcttctgttgtaaattgcccagtccctgttatgtctttgtcagcagcatgaaaatggatgaatacatccacttatctatttctctctctccttgtttaagtagtcacctcactttggtctgtggccactgtcatcaccatgcctcttgcatcagttgagctcttttctagacttggacacaagcctttcctcaaacctgctccctgtagaccctacgaaggaaattataagcacactttgtttgcaatatggtgggattatcaggtccaaggcaacctgcttcctgcttctcggtcctccatgccgccaggcccaggacctggctgacctgaacctcagctctgaggctgggcccctgcctcccatgtctttcctagacccacatgtcttgggggagctttc

SEQ ID NO: 2095 - DNA, 4001 bp, Homo sapiens
ttcctgatatcctgacttgatcattacacattctattcatgtaaaaaatcacatgtatgcagtaaatgtgtacaagtattatgaatcaatacaaataacattagagagtcttcttatttcctatgttagttacacccaagccactctcttgctggaacaaatatggtagtggttgtagtggggagtgatgatgatgaggaggaggaggaggaggatggtgatggtgaaaacaatgataatatgttgctgcgaatacaactctatcaaatgacagctaattacgtgtcaggcattgtgccaaccaaatatcagatagtaatcaaattttatgccttagactagtttgtaatgtaaatgttattttgctcactttgcagtaaagagaagttgtcaattcagagaagttgaataatatcctcctcaaatcaatcaaatgctaattagggaaaataaaaggggtttaaaatgatacagaaataatctttggtatgactccaattgtgagatcctgctgtgaatcaaagaaagattgaaataaatccaaaagattacatactattgctaataaagcagatttgaaaataaacaaaagatccattcacaaatatatatgcatagatactttattcagggagtgaaagataagtgacaattgcaaaggtggtagaagctcgtgaccaggtgacagacagacacagaacacatcaacagaattctctgatggttcccagggagagagctgctgctctttcttccgaagctctgggagctggcacagcccaggacttcctttgctcagtctccacctggacagtggcagtatggcagcctcagaaaagaaactttttgctgtcagggatcatcatgggcagattactggctaaggagaaagaagctccctgtgtatccatggtaggctttgatgagaagatgaaggtggagctgtggaacgaggtgagccaaatatccttatcctttcttggtcctgatgaattctgaagctgttacttgctcttcggtggatactttgactggcagggtggggaaggtgtcacaggaggatatttctgctggcactgctgaggtgggcagggctgtggacactttggtggtgggcagggctcagggcacttcgggggtggacatggctctgggcactttggcgtggggcacacaggaggtggctggcagggctgcttgcactgctgctgttgataagacatcctgctggagtctcaggatctgaaagaaatgatacaacagtgttcgtgggaagggaatcctccagagagagaagccaaagcttgtgtaataccatggcatattatttctccaatctccaagaaattatttaaattcttaattaccttttcaagactttctggtttctcccttccactttaacaaattgcttcattgtccctaggaaatcctgtgttttctcatacaatttttccaaataaattatctctgttataaagaatcaagcatcttatttccctgaaaataaccaattcaagaaaggcagtcacaagttcagacaccctgggcaatctaatatgctattcctatcatcattatctgttataaagtccaagtgggctgacttgggcatagagcaaagggctgctcagggagaattgtagtctttcacacctgctaagacacaaacctttgtaaaggacactagaaagacagagaataaagaaaaatactttgttcttttttcttcttcatatcaaaggttaccccttaacttctctgtccatatggatacctacctgtataacaaaagaaagctaaaatagcatataattgtgctctaatcttaaattttcatccactaagtagcatcaagtcaattttcataggattggatccaccaaacttgccatattcagattaaactcaacatttcagggcacaaagaacagaggaactcaaggaagccgactcaccaggttctccaaggcagatcagtgctcaggtaccaggggtttaagagtcgtgcagcagaggatctctttatagagcctgctaccccacccagcaggaagtgaaactacccaaaacaatgctgatccagtaatttcttaagccagatgcaaatttatccatgactggcatgagcaggatactcaaaataggaaatatcctgttctgaaatctctcctctgggttaagctctcctgactcacagaagccatgccttggatctcagtttcagtgacttatggcaaagagggacttgggggaatctctaactgatggtcaagggatctctttcttaattgggaacaaagatattttcctgtcttacaccttccctaaatcataaaacttctgccctcattcactttacctgaatgccttattgttgtacatgaactcaactgtacctctactttcctcatgcaatttgccaatgtgctaggaggaaggggagacctaacaaaggcctgagttctagctcaagccttttctttgctctgttgtatgaccacaggcaagtcacttctcctccacggaactgtaaacagggagaataatacttacccctgagtttgcaggcattgaccgcattgtgccacctgatgaccctgttcgagcttgaaattttttcttctacctctttctttctctcataaaaccccagattttacctgtattatcttcctctttaaaactgtcttctctaatccatttgtagaggcatttgtctcccaggatagattccaaagtgagatcgagtctccctagcacgttttctacttgctgcccttagggatgtgtactataactttttatttataaaaatgtactcttggacaccaccttaaggaagtagagagaatggaaccaaagttgcaagcattcactcaaaatctatgtattgaaacttgcctatgttcaatacattttacatacatttttagtataatttgaatattttaaatattacataatctcccaaaacattctgtagtgtcctgtgaatatcctatagagaacaagctgcatagactcatgttatcatatgtaaataattagaagtaggtttgcagagtgcagaagttcagagcacttaaagtctgaaatctagaggaaaataaaagctaagtgtaatccaatatgtattcttgctctctatttccaaacaggttttaggtgtttgaaagacagtgttttaaaatttgtttgtatgttcttcctttgttttttccgtagaccctctagtcccacagtctgctggattatcaactcacaccccaatgtacacctctcatctgtccattttggtacatattgttcacttaacacatatgttgtcaatgcatttagtgattgttctttcacatcttttttaagctcttttacaatcataaggttttctaaatattgtatattaagcatttaaagtgatattgctagagcttccttatctggaccattaatcaggaagctttccaagaatgtggttttgtaagtagataagaagaaaggggaatgaggaagaggaaagacaaaatcatcagagcagtcaccagctatgctccaggaagaacatgtgttgaatgaacccagcatcacatccctcagttaagcaggttaggtacccagaactgctatttctcctgtcagtaaggaagggcttttggctaagatcatcactggccaggacactacagaaatagagccaacatatcagaaccttgaggccaggtgtttacaaatggtgttctcaccaagtgtttcctatagactattacacatgtcaagcacttcactgggcaaagtaaagggcctttactcaataggtcccctactactccccaacagcctcacatcacatctaaaacacaaatccttaaagaaatatctgatttgtgccatgcaaaattgaagaatttgctgccagatgagatcactgtgtgagataacacagtctgagtcacaccctgcgacaccccttctgagaacaccgcattccaacaggaggc

SEQ ID NO: 2096 - DNA, 4001 bp, Homo sapiens
ttcctgatatcctgacgtgatcattacacatttgatccatgtaacaaaatatcacatgtaccccaaaaatatgtacaagtattatgaatcaattaaaaataacaatagggagtcttcttatttcctgtattagttacatccaagccactctctttctggaacaaatatcttggtggttgtagcagggggtgatgatgattatgatgatgatgatgcttctgggggaaacgatgatatattgctgcttcttagcagcaaattcaataaaatgactgctattatgtgtcaggtattgtgccaaccaaatttcagatagaaattagattttatgacttagattattttatgatgtaaatattgtttggttcacattgcagtaaaaagatagacatttggagaactggaataatatgttctgcaaatcaatcaaacactaagaaaaataaaaggggtataaaatgatacagaactaatacttgctatgacccaaaattcatatagcaacaattgtaagatcttccctgaggatcacagaaagataggaataaatctaaatggtcatatcacattgctaataaagcagatttgaaaagaaacaaaagacccattcacaaatatatatgcatagatactttattcagggagtgaaagaaaagtgacaattgcacaggtggtagaagctcatgcccaggtgaaagacagacacagaacacatcaacagaattctctgatggttcccaggcacacagctgcagctctttctgctgaagctctgggaactgacaaagccaaggttcctttgctcagtctccacctggacagtggcagtatggcagccttagaaaggaaaccttttgctatcagggaacatcatgggcagatcacaggctaaggggaaagaagctccctatgaatccatgataagctttgatgagaagatgaaggtggagctgtggaacgaggtgagccaattatccttatcctctcatgctcctgatgaatcctgaagctgttacttgctcttcggtggatactttggctggcagggtggggaaggtgtcacaggaggatatttctgctggcactgctgaggtgggcagggctgtggacactttggtggtgggcagggctcagggcacttcgggggtggacatggctctgggcactttggcgtggggcacacaggaggtggctggcagggctgcttgcactgctgctgttgataagacatcctgctggagtctcaggatctgaaagaaatgatacaacagtgttcgtgggaagggaatcctccagagagagaagccaaagcttatgtaataccatggcatattatttctccaatctccaaaaatttatttaaactcttagctctcttttcatgacttcctgtcttctcctttccactttagcaagtggcttcatcagccctaggaattcctgcctttcctcatacaatttttccaaagaaaacatctctgtaataaaaaatccagcatgttaatccaagaaattaacatcttcatgaaaggcagtcacaagttcagaccccctgggcaatctcacaagctattcctatcatcattatctgttgtaaagtcccaatggcttgacttgggcacagagcaagggctgttcaggaagaagtgctggctctcacacctgctaagacacaaacctttgaaaaggataccagaaaaatatggaaaagagaaaaatactttatccttttcttccaaccaaagctttcctattaacttctctgtccatatgaacatataactgtatatattttttaaagctgtgtaaaacactctatcacatagtctaatcctgtatttccatccactaagtaccatcaaacccatgatcataggtttgaatacaccaaacttgctggattcaaattaaattcaacatttcagggcaaaaagaacagaactcaaggaagcagactaaccagtttctccaaagcagatcggtgctcgagtaccaggagtttaggagttgggcagcagagaacctctttatagggccagctaccccacccagcaggaagtggaactgcctaaactgagctggtccagcaatgtcccaaccaaaatgcaaatttatccataactggcatgacagggattctcaaactgggaaacatcatggaggccctgccttagatctcagtttcagtgacttatggcaaagagggacttgggggattctctaactggtggtcaagggctctctttcttgattgggggcaatgaatgcttcctgtcttacacattccctaaatcataaaacttcctgccccgatccactttagctgaatgccatattgttgtacatgaacccatctccaccccttctttcctcgtacaatttgccagtgtgctagaaggacctaacaaaggcctgagttctggccacagatttttttgctaagttgtatgccaggtcaactctcctctctggaatggtaaacagagaagcatcatatctacctctggttttgaaggcagtgaccacattgtgccatctgttgaccctgttcaagcctgaaattttctacttcacctctgtctttctctcacagaaccccagattttacctatattccttttccctttgaagttgtcttacacacctcttatagaggcacttgtgtcccaggacagacaccagagtgagatccagtctccccagtatgtttgctactgctgctatcaaggatgtgtactacagcctttttatttatagaaatgtacttagtcaccacattaaggaaatggagagaagggaaccaaagttacaagcattcattttaaatctatgtattgaaccatgcctatatctttccctgtgaacatcctatagagaacaaaatgcatagacttacagtatcttatgtaaatagagaagagaaggggtcttctcagagtagagaaggtcagaggacttaaagtctgaaatctaggggaaaatatcaactcagtgtgatcctatatgtttgctttctctacctctctttccaaacaggttttagtctttgaaagacagtattattttatttgtttgtatgttcttcctttgtcttttcccaaagccctctagccccacaacctgctagattatcaattcacatcccaatgtatacctctcatctgtccattttagtacacattgttcactcgatacgtatgttgtcaatgtgaatgtctttcacatctttttaaaactcttcctgcaatcaatggggcttactaagcatcatatattaaacacttaaaatactgctgctggagcttccttatctgggccaataatcaagaacctttccaagaatgtggttttataattggagaagaagaaggacaaggaagataagaaaaaaagaggaagaggagtgactcaaattctttggagcactcaccagctacgctccagatagagcaagagcgctgaatcaacccagcatcacacctctcagttaagcaagttaggtttccagatctgcaattgctccagtctctaaggaagggcttttggccaagatcaccatggccagacactacagaaatagaactatcatgtcaacaccttgagtccaggtgtttacaaacagtgttctcaccaaatgtgtccacatgtcaagtacagtgggtgcagtaaagggatttcactcaataggtcccctactcttccccagagcctcacatcacatctacaacacaaatccttacagaaatgtcttttttctgccatgcaaaattggagaattggctgctaaatgagatcactgtgtgagataatacagtttgggtcatgccctgagactccccttctgagaacaccccactcaaacaggctgtttatcacagcagtgcaggcaccagagcggcagcagccctagtgcccccagcatctcagacaggctcactttacgagttgagatggtgaactggaaactcagagttcctcacagttcagctacatgaagagtg

SEQ ID NO: 2097 - DNA, 4001 bp, Homo sapiens
acatgatctaatttttttatagctgtgtagaattcatggcgtatatttatcacatttttaaaatccactctactattgatgggcttttgggttgattctatgcctttgctatagtgaacacggctgcgataaatatacacatgcatgtgtctttatggtagaatgatttatattcctttgggtatatacccaatagtgagactgctgggtcaaataatagttctgttttaatgatgatgtactgctgctaatagactactatcaaatgagtagtaatgatatgtcagaaattgtgtcaactgaattcctgatattaattccattttatgcctaagataagttagtgatataaatattattttccacattttaaaatgaagagattaaaattctgattgatttgttcttcaaatcaatcaaacactaattaaggaaaataaaaggggtttaaaatgatataaaaataatcattgttatggcccaaaattcagataacaataattgtgaaatcctggtcctggggatcagagaaaggtagaacaaaatccaaataatcatataatattactaataaagcagattctaaaagaaacaaaagatccattcacaaatatatatgcatagatactttattcagggagtgaaagataaatgacaattgcaaaggtggtagaagctcatgaccaggtgacagacagacacagaacacatcaacagaattgtctgatggttcccagggagagagctgctgctctttcttccgaagctctgggagctggcacagctgaggacttccttttcttagctccacctggacagtggcagtatggcagcctcagaaagggaatcttttgctgtcacagatcatcacaggcaggccacaggttaaggagaaagaagctccctgtgcatccatggaaggctttggtgagaagatgcaagtggagctgtggaacgaggtgagccaattatccttatcctctcatgctcctgatgaatcctgaagctgttacttgctcttgggtggacactttggctggcagggtggggaaggtgtcacaggaggatatttctgctggcactgctgaggtgggcagggctgtggacactttggtgatgggcagggctcagggcacttcgggggtggacatggctctgggcactttggcgtggggcacacaggaggtggctggcagggctgcttgcactgctgctgttgataagacatcctgctggagtctcaggatctgaaagaaatgatacaacagtgtttgtgggaagggactcctccagagagagaagctaatgcttatgtaataccatgaaatattatttccccatctccaagaaattatttaaactcttaactgccttttcaagactacttcgtttctcccttccactttagcaaattgcttcattggccctgggaaatcttgtgttttctcatacaatttttccaaagaaaatatctctgtagtaatgaaccaagcatgttatttctgtgaaaataacatctttaggaaaggcagtgacaagttcagataccatgagcaatctcacaagccatttctcttatcattatctgtagtaaagtcccagtgggttgacttgagcacagaacaaagggctgtttgggaaggattgcaggctcttggcacctgttaagacacaaacctttgaaaaagacaccaggaaaacatggggaaaaaatactttgttcttttttcttcttcaattcaaagctttcctattaacttctctgtccgtatggacacctaactgtatacaagaaacaagctaaaatagcatatcactgtactctaaatctaaatttccatctactaagtagaatcaaacccatggttacagaattgtatcaaccaaacttgctgttttcagattaaattcaatatttcaggtcacaaagaactgaggaactcaaggactcacactcaccaggttctccaaagcagatcggtgctagagtaccaggagtttaagagttgtgcagcagggaacctctttataggacgttctgccccacccagtgggaagtggaactgcctaaaactgggctggtccagcaatgtccaaagtaaaatgcaaatgtatccatatctggcatgagaggcattctcaaactaggaaatatcctgttctgggatctccccactgggttaagtgctcatgagtcacagagaacctgccttagatctcagtttcagtgactttcgtcagagagataattggagggattctctaaccggttgtcaagggctctctttcttgattgggaacaatgatcccttcctatcttacctcccctgagtcataaaacttcctgtcctgatccactctagctgaatgccatattgttgtacatgaacccaactctacctctactttcctcatacagttggccaatgtgctagaaggaaggagagacttaacaaaggcctgagctaagctttttctttgctaagttccatgacaacaggcatgtcacctctcctccctgggattataaacaggggacaataatacttacctctgggtttgcaggctgaccacattgtgctatctgctgaccctgttcaagactgaaattttctttgccacctttttctcagataaaacctcagatttttacctatattcctttcctctttgaagctgtcttctgcaccacatttgtagcttctgcaccacattcgtagaggcacttgcatcccaggacagatttgagagtgagatctagtctccacagcacgtttgctacttggtgccatcaaggatgtgtactacagcctttttatttataaaaagtaatggagagaaggaaactaaagttacaagtattgactcaaaatctatgtatggaaccatgcatatatggttccctgtgaacatcctatagagaacaagctgcatagacattatcatatgtaaataattagaagtaggtgtgcagagtgaggaaggtaagagcacttaaagtttaactcaaggggaaaatacaaacaaagggtaatccaatatgtattcttcctctctatttccaaacaggttttagatgtttctcagtgttttttaatttgtttgcatgttcttcctttgtcttttccataaaccttctagtcccacaaactgctagattatcaactcatacccaatgtatacctgtcatctgtccattttggtacatattgttcacttaacacatatgttgtcaatgcatttagtgattgtcctttcacaacttttttaaatgcttcctacaatcagtgagcctttctaagtactgtatattaaacatttaaagtgatgttgctactgcttccttatctggaccattaatcgggaagcttcccaagaacatggttttataagtgaataagaagaaaggagaatgaggaagaggaaagactcaaaatcactggagcagtcaccaactgtgctccaggaagggcagagtgttgaatcaagccagcatcacatccctcagttaagtaggttaggttcccagaacagctgttgctcctgtcagtaaggaagagcttttagccaagatcaccactggccaggacactacagaaatagagccatcatgtcagcaccctgaggccaggtgattacaaatggtgttctcaccaaatgcttcctatagactattacacatgccacgcacttcaccagccaaagtaaaagtcctttactcaataaatcacccactactccccaagagcctcacatcacatctaaaacataaatccatagagaaatgtctaatttctgccatgcaaaattgaagaattcgctgccaaatgagatcactgtgtgagataacacagtttgggtcacaacctgagactccccttcttaggacaccccactcaaacaggctgcttatcacagcagtgcaggcaccagagtggcagcagacctagtgcccccagcatctcagacaggctgactttacaagttgacgtggagaactg

SEQ ID NO: 2098 - DNA, 4001 bp, Homo sapiens
gggtgcagcataccaatatggcacatgtatacatatgtaacaaccctgcatattgtgcacacgtaccctaaaacttaaagtataataataataaaatttaaaaaaaaacagagtcttcttattttttatattagttacatccaagccactctattgctggaacaaatatggtagtggttgtcatggggagtgatgatgatgatgatgatgatggtggtggtggtggtaatggtggaaacaatgatgatatgttactgccaataaacttctaaaatgacagctaattatgtgtcaggcattgcgacaacaaaatttcagatagtaattagatttatcccaagactagtttgttaagtaaatgttattttggtcgctttgcaataaagagattgacattcacagaagttgaataatatgttcctcaaatcaatcaaacactaattaaggaaaataaaagtggtttaaataatacagacataatctttgatatgacccaaattttaagattctgactgtggttgaaagaaaggtggaaataaacccaaatgattatataattttactaataaagcagatttgaaaagaaacaaaagatccattcacaaatacgtatgcaaagatattttattcagggagtgaaagaaaagtgacaattgcacaggtgttagaagcccatgcccaggtgacagacagacacagaaaacatcaacagcattttttgatggttcccagggacagagctgctggtccttcttccaaagctctgggaactgacactgctgaggacttcctttctcagtctccacctggacagtggcaatatggcagcctcagaaaggaaaccttttgctatcagggatcatcatgggcagatcactggctaagaggaaagaagctaactgtgtatccatggtaggctttgatgagaagatgcaggtgaagctgtggaacaaggtgagccaattatccttatcctttcatgctcctgatgaattctgaagctgttacttgctcttgggtggacactttggctggcagggtggggaaggtgtcacaggaggacatttttgctggcactgctgaggtgggcagggctgtggacactttggtggtgggcagggctcagggcacttcgggggtggacatggctctgggcactttggcgtggggcacacaggaggtggctggcagggctgcttgcactgctgctgttgataagacatcctgctggagtctcagaatctgaaagaaatgatatgacagtgttcacaggaatggactcctccagagagagaagccaaagcttatgtaataccatggcatattatttctccaatctccaaaaatttatttaaactcttagctctcttttcatgacttcctgtcttctcctttccactttagcaagttgtttcatcagccctaggaattcctgcctttcctcatacaatttttccaaagaaaacatctctataataaagaagcaagcatgttattccatgaaaatgacatcttcaggaaaggcagtcacaagttcagacctcctgggcaatctcacaagctattcctatcatcattatctgttgtaaagcaccagtgggttgacttgggcacagagcaagggctgttcaggaagaagtactggctctcacacctgctaagacacaaacctttgaaaaggataccaggaaaatatggaaaagagaaaaatacttcatccctttcttcaaaccaaaactttcctattaacttctctgtccatatggacatataattgtacattttttaaaaatctgtgtaaaacactgtatcatgtaatctaatcctgtagttccatcaactaagtaccatcaaacctatgatcacaggtttggatccaccaaacttgctggattcaggttaaattcaacacttcagggcacaaagaacagaggaactcaaggaagcagactcaccaggttctccaaagcagatcagtgctcaagtaccaggagtttaggagttgtagagcagagaacctctttatagggcctgctaccccacccagcaggaagtggaactacccaaaactgggctggcccagcaatgtcccaactaaaatgcaaatctatccataactggcatgacagggattctcaaactgggaaatatcctgttctgggatctttccactggattaagtgccctgactcactgaggccctgccttagatctcagtttcagtgacagcaaagagggacttgggggattctctaactggtggtcaagggctctctttcttgattgggggcaatgaatgcttcctgtcttacacattccctaaatcataaaacttcctgccctgatccactttagctgaatgccatattgtttgtacatgaacccatctccacctctactttccttgtacaatttgccaatgtgctagaaggaaggagagacctaacaaaggcctgagttctggccccagatttttttgctaagctgtatgaccacagccaggtcaactctcctccctggaactgtaaacagaagagcatcttatttacctctgggtttggaggcactgaccacattgtgccatctgttgatcctgttcaagcctgaaattttctgctccacctctttctcttgcagaaacccagattttacctatattcctttcctctttgagggttgtcttctacaaccctcaaagaggcacttgtgtcccaagatagataccagagtgagatccagtctctccagtacatttgccactgctaccatcaagggagtgtactacaggcttttcatttgtaaaactgtactcttattcaccacattaagaaaatggagaaaagggaaccaaagttacaagcattcattttaaatctatgtattgaaccatgcctgtatgtttccctgtgaacatcatatagagaacaagatgcatagactcacagtatcttatgtaaataattagaagttttccagaatagaggtcagagcacttaaagtctgaaatctaggggaaaatataaactcagtgtgatcctatgtgtttgctttctctacctctctttccaaacaggttttagtctttgaaaaatggtattttttaatttgtttgtatgttcttccattgtcttttccaaaagctctctagccccacaacctgctagattatcaactcacaccccaatgtatacctctcatctgttcattttagtacacattgttcactcgatacgtatgttgtcaatgtgaatgtctttcacatctttttaaaactcttcctgcaatcaatggggcttactaaacattgtatattaaacatttaaaacagtgctgctggagctttcttatctgggctaatgatcaggaagctttccaagaatgtgattttataattggagaagaagaaggaagaggaagataaggaaaaagaggaagaggagtgactcaaattctttggagcactcaccagctatgctccagatagagcaagaacactgaatcaacccagcatcacatctctcagttaagcaggttaggtttccagatctgcaattgctccagtctttaaggaagagcttttggccaagatcactgtggccagatgctgcagaaatacaactatcatgtcagcacctttgcgccaggtgtttacaaatagtgttctcaccaaatgcttcctatagactattacacatgccaagcacagtgggtaaagtaaacagacttcactcaataggtcacctactcctccccagagtctcacatcacatctacaacacagatccttagagaaatgtctgatttctaacatgcaaaattggagaattggctgccaaatgagatcactgtgtgagataatacagtttgggtcatgccctgagactccccttctgagaacaccccactcaaacaggctgtttatcacagcagtgcaggcaccagagcagcagcagccctagtgcccccagcatctcagacaggctcactttacaagttgaggt

SEQ ID NO: 2099 - DNA, 4001 bp, Homo sapiens
gactttatcattatacatttgatccatgtaacaaaatatcacatgtaccccaaaatgtgtataggtattaagaatcaataaaaaatagcaaagagagtcttcttattttctatattagttacaaccaagccattctattgctggaacaaatatggtagtggttgtcgtggggagtgatgatgatgatgatcttgatgatcatgatgatgatgatgatgataatcataatggtggaaacgatgatgatatgttgctgcgaataaacctctatcaaatgacagctaatcatgtgttaggcattgtgccattaaaatttcagatagtaattcaattttatgccttagacaagtttgttaagtaaatgttattttgctcactttgcagtaaagagattgacattcagagaagttgaataatatgttcctcaaatcaatcaaacactaattaaggaaaataaaaataaaaaaatacagaaataatctttgatatgtcccaaattgtgagatcctgtctgtggatgaaagaaaagtggaaatatacccaaatgattataaaatattgctaataaagcatatttgaaaagaaacaaaagatccattcacaaatatatatgcatagattctttattcagggagtgaaaggaaagtgacaactgcacaggtggtggaagctcatgcccaggggacagacagacacagaaaacatcaacagaattctctaatggttcccagggagagagctgctctttcttctgaagctctgggagctggcacagcccaggacttcctttgctcagtctccacctggacagtggcagtatggcagcctcaaaaagaaaaccttttgctatcagagatcatcacaggccgatcacaggctaagaggaaagaagctccctgtgtatccctggatggctttgatgagaagatgcaggtggagctgtggaacgaggtgagccaattatccttatcctttcatgctcctgatgaatcctgaagctgttacttgctcttgggtggacactttggctggcagggtggggaaggtgtcacaggaggacatttctgctggcactgctgaggtgggcaggactgtggacactttgatggtgggcagggctcagggcacttcgggggtggacatggctctgggcactttggcgcggggcacacaggaggtggctggcagggctgcttgcactgctgctgttgataagacatcctgctggagtctcagaatctgaaagaaattatatgacagtgttcacgggaagggaatcctccagagagagaagccaaagcttatgtaataccatggcatattatttctccaatctccaagaaattatttaaactcttaattcccttttcaagagtccctggcttctcacttccacttcagcgaattacttcattgtccctgggaactcttgtgttttctcatataatttttccaaagaaaatatctctgtagtaaacaaccaagcatgttatttctatgaaaataacatcttcaagaaaggcagtcacaagttcagatacccagggctatctcacaagctattcctgttatcattatctgttgtaaaatcccagtgggttgacataggcacacagaaaacgactgtttgggaagaattgcatgctctcacacctgctacgacataaacctttgaaaaggacaccagaaaagcagagaaaaaaagaaaaatactttgttattttttcttcttcaaatcaaagctttccccttaactaacttctctgtccatatgaacacctaactctgtactaaaagaaagctaaaatagcatatcattgtgctctaatcctaaatttccatccactaagtagcatcaaatcaacattcataggattggatcaaccaaacttgctgtattcagattaaattcaacatttcagggcacaaagaacagaggaactccaggaagccgactcaccaggttctccaaggcagatcggtgcttaggtaccaggagtttaggagtcgtgcagcagaaaacctctttatagggcctgctacccctcccagcagaaagtgtaactgccaaaagctacacttatccagtaatttcttaagccaaatgcaaatttatccacaactggcctgacagtgattatcaaactaggaaatatcctgttctgggatctccccactgggttaagtgctcctgactcacagaggccctgccttagatctcagtttcagtgacctatggcaaagagggacttgggggattctctaactggtggtcaagggctctcttttttgactgggggcaatgatcctttcctgtcttacaccttccctaaatcataaaacttcctgtcctgatccactttactgaatgccatattgttgtacatgaacccatctccacctctactttccttgtacaatttgccaatgcgctaaaaggaaggagagacctaacaaaggcctgggttctggtcccagattttttttttttttttttttttttttttttgttgctaagttgtgtgaccacaggcaggtcacctctcctccctgtgattataagcaggggagaatcatacttacctctggagatgggagctgaccgcattgtgccatctgctgaccctgttcaagccagaaactttctcctccacttctatctttctctctcatagaaccctggattttacgattttcctttcctctttgaagctgtcttctccacccaatttgtacaggcaattgtcacctgggacagattccagagtgacagccagtctccccagcacatttgctacttgctgccattaaggatgtatactagcgcctttttatttataaaaatgtattctttgctaccacattaaggaaacggagagacatgaaacaaaattacaagcattcattcaaaatctatgtattgaaccatgcctatatgattccctgaaaccaccctatagagcacaatctgcatagactcacattatcatatgtgaataattagaagtaggtttgcagagtggagatggtcagcgcacctaaagtctgaaatctgggggaaaatacaaattaagtataatctaatatgtattcttcccctctgtttctaaacaggttttaggtgtttctcagtgttttttaatttgtttgcatgttctttctctgtcttttccataagccccctagtctcatgacctgctagattatcaagtcacaccccaatgtacacctctcatctattcattttggtacatattgttcactcaacatatatattgtcaatgcatatagtgactcctctttcatatcttttgtaaactcttccagcaattagtgaggcttactaaacatggtatattaaatatttaagttgatgttgctagagcttccttagaccagtagtcagaaagctttccaagaatgtggtttatagttggagaagaagaaaggaaaatgaggaagaggaagaggaaagactcaaaatcattggagcagtcaccagctatgctccaggaagggtaggagtgctgaatcaacccagcatcacatccctcagttaagcaggttaggttcccagagctgccattgctcccgtcaataaggaagggctttggggcaagatcactactggccaggacagtacagaaataaagacatcacgtcagcaccttaaggccaggtatttacaaatggtgttctcaccaaattacccctacagactattacgcatgctaagcacatcaggggacaaagtaaagggcctttattcaataggtcacttactactccccaacagcctcacatcacatctaaaacacaaatccttagagaaatgtctgatttctaacatgcaaaattggagaattggctgccaaatgagatcactgtgtaagataatacagtttgagtcatgccctgagactccccttctgagaacaccccactcaaacaggctgtttatcacagcagtgcaggcaccagagtggcagcagccctagtgc

SEQ ID NO: 2100 - DNA, 4001 bp, Homo sapiens
tagcactggccatttcttccaacaggaacaatctacccctgatatacccatggctccctcttctattcattcatgtctttgagccaaaagtcacttcaaagggtctttctaaataattttctttaaatatagcccatgtattactataatttgtcctgtgtgtgggaggtgtgtgggggtcggggggtgggggtgatatgtaactctcttaagactgtagactctataagagcaaggactttgtttggtcatcattatccctatcagcagtgcatagaagactggctggcacatgatagacaattaggaaacatttgtgaataaatcaattgctatgagtacactcagctgaatacatgctctcttactttttacagatgatgaaactgaagctaagagagtttaggtaattttttcagccatacaagctagaaggggtaaaaatgagttttaaaccaataaaagagaattatttgttgtaccgaatccaaaacacacattgcacgcaacactgaattcagtgatggaaaagcctaataattctaataattcaataggaatgaaaaggaacattcacttggtgtagttaacagaagaggttaaagacacgaaatgcaaacaaaagcaatgtgggcttgaccatgaaacatgtgctttattggggagaagcaaaagaataaacacacttgctctcaggataggaaccaccatctacatcacagacagcaaagcgagattaggcagtgatctggctgctcatcttccaacaacatatcggttttcagaactaagccttttctctgtcaacgctcaagccagacagaggttagggaagatgcagcctcccactacagctgaagggaagatgatggagtcctgggagtaagaagagccactggatcttgttgtttcatggtcctgatgaattctagtgatgttacttgctcttgggtggatacttctgctggcagggtgggtatggttgcacaggagggcatttatcctggcatggtggaggtgggcaatgctcaggtggacaaggaggaggcaggtaaggctcagggcacttcgggggtggacatggctctgggcactttggcgtggggcacacaggaggtggctggcagggctgcttgcactgctgctgctggtaagacatctctcctcagtctcagagaatctgaaagatacatacgaaacagtgctcataagagagacagtcctgttggtggagcaattagctaggacatcaaatctccagtatctagggaccaactttgatccctaatacagtctttatgactttgtgaaccttcttcacacttcacttttaggacctcttaccctcagttcttccgtctttctggctgttctctcattctaccattttctgaaaataaaattgcctatgagacagcaacaaatgttgtctgaatacaaacactatctgaagaagaaaaactcagatattaaaagtctagccaataccaaacaaatctgtgctcttatcttccatgaggccctagttaccagttttaatgagctggctgtggtgctgagccatgagttttttaagagaattgcaaaaacttgcacccatcacccaaggagattgcactccaagagagatgtatttggaacagatgtgaagcaggagacagaacagcatcttgtgtctctcactctccttcagtttaagattttatatatttgactccaggttcctcatcaccttcatgtttatctaccaaataccagctaaaatttaccttcaagacctcattatcttctttttcctatccatgaggataaattggttaaaataaacaggcatttctgtacccaggttagaccctaacaccatccaagtgcaagaaaagcttctaatatttgtactcaccagagtcttcaaagatctacaactgaatggcaagaagatagcatcagtgtggtggagagtccttttataaggggcaggcagccctacacagggaacagcccaggactagcatgatgtgcttatttcccaaccaaaataccacttgcatgtaatccatgctggtatcacaaaattcctagtccatgatcctccccagcaggataagtgcacagtgattcacttgggacattatctcaggttcctcatgccagtggcaattgtagaacgtgacaaattgtctgacaattgtggtgcttccctataattagagatggtgcttctcctacttcccagcttccaaagtatcctgtatgtaaaactactcccattcagttgcacatgcccagtatctagctgtgttctctttagtagagaccagtatgtgctgatcctgcagcctggctatatcctaaccctcaactgcagtttttctttacaactaacttccccttttatcatggcctattgatccttaggcttttcttgacaattaattgacttgaacagggtgacaaaatcatatatcagcttcctagatgctgacagccccaacctgggtgtgttctgacatggtattaatgggcttgaacaaggcaacatcatctctcagttttctaggccattagagtcatgttggggccccttcttaaagcttcacatttgcagatttacacactaacctcatctctgtggcccttgtaactatgagtgacttgtggtctactagaaatccaaactcatcttctcccattttcttccaaactgccttaatgtatgtgctgcatccattttgaagcttttctcctacatgctaattcaatttactccttcacaatttctctcttttgaaatgacatttagtaggatttcaggctttctttgcacattcgaggagtgaagttctgtaaagctatttatcctgctgtttacttcatggatgtttttacctaaataagtaaagtatagctggcacagatcccacggataatttcttagtatagcttatttaaccatattaacacttcagctagtattactcactgtcccaacttggaaaaaacttgagtaccttggttatgcatacatctacagccaccactactgtgtggaactaaatatttcctaacctccttgaaacacagtttacacagctgtaaaacagaaataaaaaatacacctaccacaaaagtctcctacaaaaactcaaagagtggcctaaaattatgcacattacatagtgggtcttctaagaaatataaactctaaaatgtagaagaaataagaataataactaatcataactaaccaataatttcaaacatgtcaaaaacagataataaagaatggcattgtttagagtgaggcctatctagtgaagatcctttccctgcatcccccattcttctagctgtagtcactactaattagacggcatgggtaccatagcacctacagggtcggcaccttgttttcctgagaaagcccctctcagggaagatttttgccttgtgctctttacccagaagaatgctgtgttgtatctgcaatgtttcaaacttgattgggttggtacagtagagaaacaaaaaaaactgaggacctaacatgggaatttgaagaggtaggaacgtctttgagttgagccctactattaaattctttctcagcatctcagaggaacaacatgaggctagttatccctccctagtactctgaaactaaacaatttagtcatctaagttactatcaggaaactgacacacttcagggatgccagaaggaacagggatgctcctgggatgggtgaggcactttcacagcgttctttctcatgttgaaatcctaggaaccatagctgatgcatgctgaagaattagctaaggattacgtgacttaaaacagttctatcaacacaattttagacctacttttctttgcctcatgaattactaatagattccaaagttatttttaccaataaattatttggtttatcatttatgcttgataaactgaaggaggattgggcttttcagaaaagaatgcttaatgaggtttgcca

SEQ ID NO: 2101 - DNA, 4001 bp, Homo sapiens
ttctgcttaattcaggggcttacaggattcttcagagtgtgtgtgaacaaaagctttatagtacgtatttttaggatacaaataagagagagactatggcttggggtgacaatgtgctgattacaaggtctacagacaattaagacacagaaacagatgggaagagggtgtccagcatctggtggttggcttctcaagggcttgtctgtgcaccaaattacttctgcttggtcttctgctgagctgggcctggagtgaccgttgaaggacatggctctggtagctttgtgtagcctggcacaggaactttggtgtatccttgctcaggaactttgatggcacctggctcaggaaacttgatgaagccttggtcagggaccttgatgctgcctggttcagggaccttggtgtagcctggctcagggaccttggtacaacctggctcagggaccttggtacagcctggctcagggaccttggtacaacctggctcagggaccttggtacagcctggctcagggaccttggtacagcctggctcagggaccttggtacagcctggctctggaatctttgtgtttccaggttgtggaacctttgagtggcatggctccttggttgtgggaacaaatatttcctgaggtggaggctggctgggttgtttcacctgctgctgttgaagctgaggtggtggggtaaaggtctgcttctgctggtaagaactcatgcttcaaaggatgctggacctagagacaaaacagctaattcagtgctttgattaagtaggaatgaagcccagtttaatgacaaatatctgtcatttcattctccttcagaactgagagcctctcttttctttctttttccctgaatttgagatcatgggatgctttggtgatccccacttatcttccagagaataaggtaaagttgatttcttccacatcgtgtaaatggagcctttctttatgcttcttttcttcctggtacatctaaaaacctacgtacaacatgaaaacacatacaaatatgcaaatatatactctgaagctttcgcttacacactctttgaagaatcctctaagctcctgaattaagcagaaagtcttagtggcttttctggtcttcagctgctcagggatcatctgaggaattgagtgaaaagaaatgcatgtttcttgctcttccctgattaaatcacttttaataccactcttggctgtgtgtcattggctgaagattgatgtgacacctcagtttttccataagttggaaagattttaaggtcagcagtctagaatctactcactcatgtcctccttatagagtgcgatagttctcccaggagaactcttatctaaacttccccctaaggctcccacaatccacctgggagcctctgttcacactgtgcctgctgcacatgctctctggcaggctctccacatcatcgctgcctccccacacatgcccacctctcatggctgtccttcctgatgctctcaccttcctcgttttgccacagcatgatacttgctttccctctctgctaatcactccccatgctgtatgtttgcaaattttagtcaagtatatgttttctaatggattatacattcatgcaataaagaaaaacttatcttttgatcatcaaaattgccaatgtagtgccttctatattaaaaattttcaatacatgttgacaggagagtgctcttgaagtgggtatattgtcttgctaacttagcaagcctttacagaaatcactccccttttctgatcctaagttccacacctgtaatctgagtggaaagtcaaaatatgtataaggtcaccttaaacaaaagtcgttattgcatttaaaataaatatattcattgcatagcaaagagatctcaatcaaaataaagaaactattggagaatattaaggtgttcctaatgcggagactcacctgctgtgcagagaaggtcgaggtgttcagcctctgggatctggtgaagagtctcttgttagctggtatttatatagaaaatgagccctgccttaagaaaattggattttttaaaagactgctctaacttcattccagcttttgtgataagtatctctggcttaacattttttgtcacttaagctctgacagtgatgtcacctgggcctgactcactgtccaccctttgtggtgtggttgctgtgggcaaaggtcttcttgaatggcaatggattaaattaggaggaagtaccatgctcctaggactagaacgagccaggcctcttggcctgggccctaatctttagccagattagtcctattgggcttcctcatggttgaagtggacatggaaataacaataggcatttctggttctgcgaggccatggggatggtgcagaataagtgaatcatctgattttcagtctcttactggatttggacctgggaggagcaatggaaggcaaaatgcctgctttggaaataagttgctttcactgtgaagggcgccttaaggtgccgtgttgatcagggatagtagatgtcattgagatggacaggcaggattgactggatctgtgtgacattgtggctcagccctgaagaccctgcctcttgtggtatctttcttctccaggagtgacataggaagaggagcgtgctgattccctaggttcatacaccagccatttcctctgatcactacaggatgaacctcaagtcactaactcagagttgccctcaatacacactctcttactagacgcggcccttggaaaatccagacatccttacatctcaggcatgtgaatagctcctcctttcccaatgttccacgactgtgttactcccttgaacctgatgcccagctccttccaccaggttctgaaagccccttgttctacttcagcgtcacacagtgcctggttatcatgggtgttaagtcaatggacagtcattgttctcctgaatagagctgtaggttcatggaagggagaaaggaagtgagaaagaaacagagatagataaagaagaaaggaaagaaagaaagaaagagagagagagagaaggaaagaaagaaagaaaggaaggaagaaaggaaggggaggggaaggaaaggaaaagaaaagaaaagagaaaagaaaagaggaaagatagggagggagggaggaaggcaggaagccacaaggcagtttcttgggcatgattcactgtcctgtgccaggcctcctggtgtgagctgagaagaggtgtgagctgataattcatgaaggagaagaggcttaccctcccttccacacccatgtccttccctctctgctagcatttgtttgaccggccacttccctctgggatgggccagggccactgccatgcctaaactctgggctctgtcatcacattagctctttttcagtgttgggtccaggtttctctcctcagcaaatccacctctcaggagccacagaccctgggggcttcggctagaccctgctgctccacctgggattttcctccccagaggaaggaagctcctctatgaatcctggtctccctcattttcttcctcgattctgcaccttggttctagaggaaattcctttctgatttcctgtgtcccttccctgggcgggctctctcctgcccttctctaactcttgcctcattcaccccaacaaaagcttctctgccatcagcttattgaaattctcgttttaccccaaccctgttattcctgtttagtcaaacacactcagcgcctgaacgttaagcctctttcagagaagctttgttttctcatgagcagtgttgggtgtgctggtaagtctggcctcagttttagagaggatacattgagtggcttctgaaggcgagtcccacttccccaggtaccttagtctttcccactggctcccttctctggtggcaggaggctgtgagtcatccaactgcactgtcctgggactttcttgggacttgtgtgtggatggtactgggtgcctctt

SEQ ID NO: 2102 - DNA, 4001 bp, Homo sapiens
taaaatgttccctctgaatgaatgaatgaatcacagaatgggactgggagtggacaattagcccaggaagcagacacatttattacatgaggcacatatttattggggaaaacaggagagaagcccagagcagggggcatcatggagaggaatgaggcagaaactgtgcaccagcctctgtgaccctacttgtcagggtggaaccccagaagaagcccagacactttcctcactttgggaaatggatgggccttagctgtggccacgctggagcctgcagagaatgaggtctctctcacacccacctgggagagcatcggggtgggatatagaagaagccaaggtggtatgtgtggggaagggtacgatgggaagaaatccttacaatgcttccttacatcttgggcaggaggagatgtgagaggagggtaggctcaagagctggagggaagaggagaaggaagaagagaaggttccatctggtagccaggatggtggatgatggtaatatccagtccatccttacttctgtttgctcttggaggcttgctgggctgagggacacttctgctgggctggaatgatggtgcctttcggtgggcattgcttcttgacctggggagcacatggatccttggttttgggtgcacatgtctcttgacatttaacagggggtggctgacaaggctgcttcacttgctgctgctgggccctctggggtgggcactgctgctgctgccgctgctgctgctgggaagacattgctctaggaacaggtgagcctaaaggaaaccgggcagggacaccatgagaagggtgttaaaaagtagccttttaacaccctttttaaaaagatggttaaaaagtagcccagacattttacaaggtcaaagcatgccatcttagctgacagatctggacaatgtcaactggctccctttgataatgcagacaatgagaatgggcaaggatgtaggggcatgaggagaggacaaaaacagtctctgtcttacaggtaagcatcatggtgtgtgtgtgagtgtgtgtgtgtgtgtgtgtgtgtgtgtgtgtgtgagagatcgggctggagaaggggtgtataagaatgcagaggcctgatctctaatccctgctccacccctgactcaccatgggagactaaggcaagtcctatgtggctacaggatagtggttccagccctctacaaagaactgggaagcttgagggccagccaaatagatcactggagccaaaggatgacaggaggatgttcaaaggaaagagcgctagccaagaaggctcagacattggttctaggtccatcctgccattaacttcatgggcaaccttccttctgtgggtctcagcacccttattagaaggatgctggtcaggaagttccctgaagccttcccagctctgatgagggtctctggctatctttgtaggcagtgttccttatggtctaagttaatgattatagatgggaagtgcaggcctcaggaagtaaagaggtggcaatcagaatagggaagcatgagagctgcataggattgaataaaatgttcaatatacctgtttgcatacacctggaagaaaagtttaaagcttactggtaagcaaaatgcagaatagggtgtgagaaacctttaaacagggctcggaattgctacaaaatcctgtagctctaaatatctccttcttcaacaataaaaatcttctttctggggagtcaaacccatgatcagaaaataagtcatactgagcaatggtgcggaatggagattaaactttctaagtaccgattagtgtgccatttccgcaattgtcagaagacttgtgtcacttccctgattacccaaggatggaagaggatcttggcctagcggctcaaaggagttaaaggagaaggaaagcgccccacaaatcccaggagaacagatgagttctcacttaccagaggcgacaagctggaccccaggagaggaggctgagcccttgtccacaggcagagccactccaggagcctttatagggcccccaacctgccctgggcacttggtgtggtcctgattaccacctcccagggaattcctcacccacttctcccacctgcacttccttcagggacttgctttgctgacctgttttgatgaaagccacccaccatatattttcagcattccaagtctctgcacctgagctgatttaacccaccaaaggtgtttgctcaaactcagggattcaagatcttttaaatatagtacaaattgaaggagctgtttgcagacagacagttataagaaatattgaagaaaaaagaggaagagggagaggatggggtttggggcaattctgacaaaaatgtgaacatccctttttctgcaaattgctgccatttcttgagcactcactgtgaggctagcaccaggaccatccgtcatgcttattatttcatttcatcttcatggcccctctagggaaagtgtcgttgttaccattttgcagatgaaaaaagtgaggctgagaaagattaaacagcagagatgggatttgaattcagatctggatgattcaatgcctagccccaggtaccactcatcccccttcctcaatacacagtgcaagtgtccttcctattccagggggacagttcacgaagtgttctgtgaggcttctctggggcacaggtagaagatgatgtgaatggtgccccagcacacggcggtgctgtccccatctgcccattgggagttggggtgctgaggagtattcgtggtggttacagaacatgggatagaattggcccctgtggtagacttgccacataaaatacaggacattcagttaaatttgaatctcagataacagaatattttaaaagtataagtatattccaaatattgcaggaaacatactcaaaaattacttgtagttcatatgaaattcaaatttcactgggcaggctctatttttatttgctaaatacagcaatcctactcagggccttatctaggtggcaggaaggagccctggtcctccatttagcctcctaggccctgggatggagaaaggcagggcctctgggaagctggtccacctctagccctctaccccaaagatcgacctcaggatgctgcccaacaagaggccatgcaagggctcaccactgccatcaccagaggaaggggtaggatggcctgagaaatgataggaataccttaatgtactttccaaagcatttttcaaatccctcacctcatttaatcctcatgacaattttactgacaatttaaagaggctggcccaaagaagttaaaggacctgctcaaccacatgcagctgctcagggtggagctgggtgggtgcctggcctggggctcatttccactccatcaccgcagtcagcatctccatggtggacaagtcactgtcattgggtggggaccatgactaataacgtctcctgagctttctgtcttatgtggatggaatactgttcatttttcagggtcagcctcactttaatcagccccttaattttcccctccaggccagacctcccccacttcctcttcccaagcctagcaacactaagaatgtaatattctgggttccagattctggttctgcattccacctccaagaagaacaccatctccacctgcagccctcacttccacatacccccagtcctctgtgctcttgctgatatgaactctccacaaggaaactacgcagcaagacagatttgcatggacatagaccaaggcttttcatatacctggtgccttgaaggcactggtatgtgtgtattgcctgtgaacagatgggcagctccatccctcatgtcccagtcacccatgtgggtttactgcaatgaattttactcctatttttcccaatttcatcattgcccttttattttattaataaaggactcctgcttagttttgaagcattctgtcatgtgataaaactcggcttataaaacagctat

SEQ ID NO: 2103 - DNA, 4001 bp, Homo sapiens
agcagtctaaatcattgacaagtatttgtaaattactgcgctaggaagcaagtttacacgaaaaatacctctacaagatcctttcttggcctcaacttcaaaaggggttcgctgagacggatggaacacattccacccttcccttcatagctgcatatcccagcacacctagaaaacaatcaccataaaaatgtgttacattggccaaatatgcccaagtccttacacattcttgggcagttcacactaactcagttggcagatggctttcatgaaagtataccccccttggttagcagatacttgcatttcacctaattaattagttacaacccccgcgggcgcctcccgcgatggctccgatccccgccgggcaaggaaggaaagcagcgtgctctcaccaccctgcttgagaaggtggaaggctgcaggcacctgctagagacgccaggaccgtacctggtgtacaacggggacctagtggaatacgatgcggaccacatggcccaactgcagctccccttgccctagctaggctgcaacagctcaaaggcaatcctattctgctactcccagtctccttccgacaagttacagttcggtgttattaacaagcagatatctccagtagcatatctccaaaatcataacagacgcctgtataaaggaaattggtactttaaacacaatttaatatcatatcttaatttgtttgacagtaggttgttttctatcaactcaaaaacaagcatgctgggatacaactgtatcttaaacttaaccctgttcacgtgcaggagtagattattatttcaaatagggatttctgaaatttagcgtgtagaaaaagaatcgttttaaaagcatcactgaagatccccaatgcaacacacgagctaactaaagtgggtttcctaacgggaatagaggaggagaacacacatcctttggcagttactctgcgtcctcagcactttcttaggtgcagatttggttgcttctcccttctgggtcctacagcactatcataaggcaaatcaggaacttgttattttcaagtgaagtgagattcaaataaaaatctcttttttgttacggccctgagtccaaccgtggcggtgtggtctacacagctttcttattgttcgagtgggagaaaaggtaaggaagacagaaacacgccgaggcaggaattgccaggtccaaaaccagactcccctcatttaacgccccctgggaccgtcggactagagaaaggagagaaaaccagggccgggggctgcaggaaagctgccagtcccgcctctttccccagcggggctcggaactcacagggtcattcgcacgctccacttcacctcgacggcctccagctggccccagaagaattggtcgttaaactgaacaaacagtgcctgcaagtccggtgtggggtccaccaactcccacgacgcgtccactagcgacagggactcctgggcatgatcgcgctccgcctcctgcaagttccactcctcctgaagccgcagtgccaacatcaagtcatcatccatcgttgccaggatcacaggcggggtccgccggcgtcaggctggctccccagttacgccgcgaccccaagccgcctagccgaggaccaggactagctcctaggagatgccggctctcgagacggcccgtcaatcccgcgagagttcgcggaaacgcgcttgagaacgagaacggagcttaccccaaacgccgaagccaagattctagggctttaaaaaaagcagtcagcatgacacctcctagtgggcgcagaacctgggctcacagggctcgggccctacgaagctttcaggaagctagtttcagcctttactctttgccggttatttcaaacctcaacgtcacgctcggttcatgcgcagtaccgaaatttctctcggcctctccctcccctcacttccgcaatagctcatcttgcgcatgcgctttaaccgatggcattgctgcgcaggcgcaatgtctgcgctcggcccacttgcgcaggcgcagtgtctgacgctcagacccggcgcaggcgtactcgtctcgttcccattcctgcttcctcagcccaggagctcggttggccttgggtgggtctagacagccgcggcggctgcggcgccgatagtgacagtgagtgcgtgagacccggagagaaatggcgatggcgatgtcggacagtggggcgagccgcctgcgtcggcagctggagtcagggggttttgaggcgcggctgtacgtgaagcagctctcgcagcagtcggatggggaccgggacctccaggagcaccggcagcgcatccaggcgctggcggaggagacggcgcagaacctgaagcgcaacgtctaccagaactaccggcagttcatagagacggcccgcgagatctcctacctggagagcgagatgtaccagctcagccatttgctgaccgagcagaaaagcagcctggagagcatcccgcttacgttgctgcctgccgctgctgccgccggagccgccgccgcctctggaggggaggagggagtcggtggggcggggggccgagaccacctccgaggccaggccggctttttctccacccccgggggtgcctcccgcgacggctccggtccaggcgaggaaggaaagcagcgcactctcaccaccctgcttgagaaggtggaaggctgcaggcatctgctggagacgccgggacagtacttggtgtacaatggggacctagtggaatacgatgcggaccacatggcccaactgcagcgggtgcacggctttctcatgaacgattgcttgttggtggctacctggctgcctcagcggcgtgggatgtatcgctacaacgctctctattccctagatggtttggccgtagtcaatgtcaaggacaacccgcccatgaaggacatgttcaagctgcttatgttccccgagagccgtattttccaggccgaaaatgctaaaatcaaacgagagtggctggaagtgctggaggacaccaagagggccctcagtgagaaaaggcgaagggagcaggaggaggcagcggcccctcgagggccaccccaagtgacttccaaggccactaacccatttgaggatgacgaagaagaagaaccagctgttcctgaggtagaggaagagaaggtggacctctccatggaatggatccaggagttacctgaagacctggatgtctgcattgcgcagagagactttgaaggggcggttgacctgctggataaattgaaccattacctggaagataaacctagcccacctcctgtaaaagaactaagggccaaagtggaggagcgagttcgacagctcactgaggtgctagttttcgaactctccccagatcgttccctgagaggtggtccgaaggctactcgcagagcagtttcgcaactgatccggctgggccagtgcacgaaggcctgtgagctatttttgagaaacagggcagccgctgttcatactgcaattcgtcagcttcgcatcgaaggtgccactttactctatattcataagctgtgccatgtcttctttaccagccttctcgagactgcaagagaatttgagatcgattttgcaggcactgacagcggctgctactctgcctttgtggtctgggcaagatcagccatgggcatgttcgtggatgcttttagcaagcaggtgtttgatagtaaggagagcctctctacagcagctgagtgtgtaaaagtggctaaggagcattgccagcaactgggtgatatcggactggatctcaccttcatcatccatgcccttctggtgaaagacatccaaggggccttgcacagttacaaagaaatcatcattgaagccactaaacatcgcaactctgaagagatgtggaggaggatgaacttgatgacgccagaagccctgggtaagctcaaagaagagatgaaaagttgtggggtaagtaactttgagcagt

SEQ ID NO: 2104 - DNA, 4001 bp, Homo sapiens
gtgctgcccatgcttagcccagggctttccaccactgggaggggggtctgaggagggggacagggcagaagggagaggcccccatccccttccttgcttgctgttctcctcacaccccacgatgagaaatgaagttgtgggcccagcccccccaacgagaaaattcttccaaggacatcaaaccttagtcaccagggatggcgcttttaccatgaacacctgttaaaactcaactcatgaccagtttctgatgctacagactggagtgtttaattaaatattactcactcaggaagcagcccctgccaactcacccccaaactgtgtagttcattttcagagaaatggagagaggaagagcctgcgctctcctcgggggcaccagcagggcttgcctagtggggtgtctgtggcccagcatgcccggctatccagaaccaagtaaagaaatcaccatgaggagcagtacctaggaaccagagggccccctggatggtccccacacacactcacagagaaacacacacaaagacacacagacacacacttggagacacacagacactcacacatacacagacgcactcagagacacagacacagagacagacacagagacacgtgtggacacacaaagagacacaaagacacacacacgcaaagacacacacagacacaaagacacagagacacacatttgcagagacagacactcagagacacaaacttgcagagacacacacccaaagacacatacacactcacacacagacacacacaaagacacacagacatacacagagaggcacacacaaatacacaaagacgcactcagacacacacacacacacacagtcacttagagtctcaggcacacattgacagacacacagactcacacacacactcagaggcacataaatacacagatgcacttagagacacactcacacacacacccacatgaacacacagacacactcatacgcaggcacatattcacaaggacatgcacaaacacacacgcagatgcactctcagagacacccgctcttcctgcagacccgcaccctcctctcggggccgtcccgtcctcaccggaacctggacgccaccgagcccagtacacgcccggggacggtgacccatccgcggttcctcccgcgggcccaggccgcccttgtttttctgatttaatcgatttcctgacaaccctccggctctccctccgctgctgggagaagccgcggcggctccggggcggcggggagggcggcgctcgggtgtccccggcaggctccctgggggaggcgctgcgggagggtgggggcgccccgacgggggaccgggccgcgccgccaatcccgactcggactggcgggaaaagcgaaactaactcagccgagcggggtcccgctttccccgggctaaaggggggacgggtcggcggccccggagcgccccagcccctcctcgggaccgcaactcgttgcgacggtccccgcgccccgagacccccgccgcgcctcgccccgggaccccctgccctgcagcggcggcagcgcggggcgggcctgggcccctctcccaggagccgcggcgagggaggcgcccccggagccaccgcgggaggggccgcgccccgagtccccatcccgtactccacccgctcccccgcgcccggccccgcgccacccactcggtcccccagcggcgcgatccccgcgtccgccctcgcccggccccccgcgcctccccctcccgggccggtcgcccacccatcggggtcccaggtgccccgcgccgcctaccgcgcccggggtgccgccgccgccgctgctctccaaggccgaggaggctcgggcgcccgggccgcgcccgccgcagggagcgaagtcgcctcctccccgcggccccggccccggcgccggcgcctggagcctggttcctgctgcgagcgcgcaggctgcccgagcgcgacttctgtgcggaggagaaaaagcaaccgacggctttaaagtgaaaaaaaagagaaaagcgccggtgggcggggccgtccctgccccgccccgccccgccccgcccccgacctcgggcgcacggaccactcagcactgcagggaaggccgggggcgcggggcgcggggcgcggggcgcgtcagcccggcgctggttcggccgccccctccgcccccttagtccgcagccctctcccgagccgccgccctggtgttgccggcccgaagctcgggtccctccggaggcgtctttgggaaacgcgtggcgcagggcctgggttgcagccgtgggaggctggagtgggggcgggggtcttacgagaaggagaaatcttcgcggagagtggggttgtcccaggaaccccgagcaaggcctcgccggcctcctctgaagtgcccagcggggacgagtgggcagccgccgggggtccagggagcctcctgcagcgctgtttcggccgctcgcgtttcggtgcccacggggacgggggcctcggacctcgagaccctgagggcgcgggcacctggcatccgcagggctgctccctgaacaggtcccagcctctggggacttgtcctgtggctctagctcgttcaaggaattttcctcccccttccccgaacagagcagtcacttgggactgggaagattttaaagactttgctgttttgagagcaaaatctcctggcattccccacccctcgctgtgtagtgtccattgaaaacggtgaggagttagcctttctgggggagccgaaacaaatagcggggcttccgtagttactgtgtctttaccataacccagtacagtgagggtgggactaatgacacactcactgtaaaggcgaggaaacagtgcctggcccgaggccagctgtccagagcttggaacccaattgaactgtgagattacaaagtttgatgtctctcattttacggtgctgaaaatcagtttggtttagctttgtttgaactcagaataggattacggagactcaaccaactgccctgggctgggcgggcctgagtgggcattctgactttccaggtgccagcggtttaggaatgttgaacccagactagtcaggtgggcagccatggccagcagcttaggggtgcttcccatttaaaagatcacttgaggctggaggtggtggctctcacgcccttaatccccacactttgggtggctgaggcaggcagatcacttaagcccaggagttcaagagcagcccgggcaacagagcaagacacagactctgcacaaaaattaaataataataataataattggccgggcatgatggctcacacctgtaatcccagcgctttgggaggctgaggcaggtggatcacctgaggtcagaagttcaggaccaggctgggcttggtggctcacacctgtaatcccagcactttgggaggtcgaggcgggcggatcacgaggtcaggagatggagaccatcctggctaacacgatgaaacccgtcactactacaaatataaaaaattagccaggcgtggtggcgggcatctgtaagtcccagctacttgggaggctgaggcaggagaatggtgtgaacccgggaggcagagattgcagtgagccgagattgcgccactgcactccagcccaggtgacagagcgagactccgtctcacaaaaaaaaaaaaaaaaaaaaaaaaagaagttcaggaccagcctggccaacatggcaacactccatctctactgaaaatgcaaaaattagctgggtgtggtggtacgtgcctgcgatcccagctactcgggaggctgaggcaggagaatctcttgaacccaggaggcagaggttgcagtgagccgacatcgcaccactgcactccagcctgggcaacagagcgagactccatctcaaaaaaaaagaaaaaaaaggtaataataattttaaaagagcatatgaccccctccagccactctgcagtttgagaactgttgttta

SEQ ID NO: 2105 - DNA, 4001 bp, Homo sapiens
gcattgatgaatgcttcaccatgaaaatatgtaaagtatcctatgcccttatcaataagcaatatccttggttaatgattaaaaaatgtatattctgaatggaagttcattgtaaaaaacagttctgtgctttcaacaactgaaaaactgctgctttttgtttgattcttattttctcagtctcacctctccaacttcataagggaaaatgcacttttagattttctattaatttatttctttaacttcccactccactgacttatttttgtttctaaacggaatctaattgtacccacacatacccattaacattaacataaagaaaaacctatttccttctctagagatcttagggtctgctctgaggcaatcaagagaactgagtgacctgtatattagttgggtcttcatagctcttatcggttaagatattgactttctccatgatccacttccccagatcatctgcatctcgcttgaaaacttgtaagtgataggaatcctcaagcttctgacccctctcagcgacccgctccttgaaactttgataccgagtcaacacttcctgacgcctctcctggatctcttctgctgtttccaaaacctttggcccactgctctccacaacctgcaagttaaaaagattctgttacttgctagttctcaaatatttaacatgttgccccgcttatatgtgtcaaggtgtttactcatgttggacctatattcagatatcctgaagtttctagggactattgtcagaagagctgtagtatatttacgtaatttttaaccagacatagcttctgtttaggttaaaaattcttgattatccagaagactctcctcactttttacataaatttgtgctagcatttaagttctatagatataattatattggactgatcatggagcaagtttaaatcagcaaaatcacataatttcagatagataaaaagaaatataatgttattgctttcaagggctaaaaaggtgttgagaagtgcttattatttttaacttaatttaataaataattaagaatggcttgcaattaatttagttaatgatatatgcaacagtttgaaaattttgtttccttcatacttaaaaataaatctcatatatttactctttacttgctttactcacaaacactataaatcaaaagttcagctatcttctgcccaattgtcacaaatttcaaattattagcatgtctgcaatttatttttgaaatataaaaacttttactctaaaacaatatataagtatccttttcccagagtgggagccaacctgtttgtgacaatatccagcaaaatcaccatagggttcaccttcattcttctggatatggataccattttccctagcttacctcagccaaaatgtttaatatagagtttaaattttaatctcccattattcctcctaagtataattgctactctgtgaattgccattactggcatggctatagaattagatcattacatggagactcacgttgttactaggtgttatttagcttcaatctccctacttattctctctgggaaccgacttaagtcattactgggtcttggtgctgcacagacataagctcaaggttattgttcacaaaaaatagttaaaagtaaaattatctatttgttaaaagccaaataattattaatgttcctgggaaagatagtatagaaagtttaaaggaaacatctttcctaataatattaatgacaaattgcatggaagagaaatatgtacttacggtttcctttggaaattgctccatttttcctaaaggtttagaacctggcaagataaaatgtgtcagagagagagagagagagaaataattcaaatggaactgtccagtcgaattcaaatagaaatatagaaacgttaagtatgtgggggaaaaaaaaaaacctcttgcttggtcctagaatcccatcagccatacacaatcgacattatctttagaagacatactcagctgaggcaactgctaagttttacagatactgggtgactcagcagttttgggaggctctggctttcaaagttactcaataagacttaaaaaatgaaagtaaggtttttggatgaaaaattagaaaaaaaaccccatatatttataggaaatacagctcaacaacttcatccaactcaactgcagatttttcacagtctttaagtcaacgaattatcctggctttttctagagagtctttcacaaaataagattttattcctaacctcaacaatttggtctttaaaaatctgatttagttgtactcttaatcatttaaatggaaggaacaaaaaaagttatatgatgtgttcattaatattttgtaaaacaaaaattaggataccttatttgacaaaccaatgatgtcacaaaaaagttgaaaatatggctgacttctgatatatatggtataaatcatcctactgtatgtattaattttaatggagaacaaaaagaggtagactttttccataggcatagttattttagactaacttacaaaaatgaaacaaacaagcaaaaagaaaatagtgggatgctcttagacctttctacaagccagtggggctatccatgccaaacttcattccagtgtaaatgcagcttgaataatctaacttccatgatctacaagagaagattttgattctacatttgtggtttcccctgttcttggatctcacatagaaaaactgagagtcctttacattctcttcttgaaagtctggattactttacttttccatatagtttcattatattcaagtcaaatttagtagtaaaggcaggaacataattttagagactgcactataacacatgcactgaggaatatttgtctgaagttgggataaggagaggaaattattttatctttaagagaaaagaatcaacatctatgaaatatttatatattaacatgatcaatttacattaatttctaatctttaaaaattctgtgaggcaggtattatcatacccgtctttatgtgagaaaacagtccctaaaaaacaaagtttcattctatggtgatttggtttgaaagtatttaaatagtcaaatccatatcaatatgattatcatggcactctgctccttatttttttagtcaatcttctcttagtccatcaacattatttgttctgtttccctgttccagaatcatcttagcaagaatgccaaacatgtgataaccttgtgaccaaagaaatagtatggcccattgtgaatagtgccacaatatacatatgtgtgcatgtgtttttatagtagaatgatttataatcctttgggtatatagccagtaatgggattgctgggtcaaatggtatttatggttctagatccttgaggaattgccacactgtcttccacaatggttgaactaacttacactcccaccaactgtgtaaaagcattcctatttctccacattgtctccagcatctgctgtttcctgactttttaatgatcgccattctaactggcatgagatggtatctcattgtggttttgatttgcatttctctaatgaccagttatgatgagctttttttcatatgtttgctgactgcataaatatcttcttttgagaagtgtctattcatatcctttgctcactttttgatggggtcatttgtttttttcctgtaaatttgtttaagttccttgtagattctggatattagccctttggaaccaacctgaatgcctatcagtgaaagactggataaagaaaatgtggtacctatacactatggaatactatgcagccataaaaaaggatgagttcatgtcctttgcagggatatggatgaagctgaaaaccatcattctccacaaactatcacaaggacagaaaaccaaacaccacatgttttcactcataagtgggagttgaacaatgagaacacatggacacagggagggaaacatcacaccctgaagcctgttgcg

SEQ ID NO: 2106 - DNA, 4001 bp, Homo sapiens
caactcccccatctctgtaataaacctaccaatatttgcagccaagtggatagaaggccccttagggcacctccagcactgaccaaactaatgacataaaaaagatcctgtaggtacaatgaggacttcagactaccttccaaccttccaagagataagggagctgcccatttcaaactctacacctacccccaccccccagcaatcattagaggggagccatggcccttcccaagtcctctctgataggaaaaggtctccttgcactggtgcagggaaaggaggggcccctccctctgtactctgaaacaaaggaaaacccagagctccaaccatgtggtgtaacattcaaggccacccacctcttccactccccagctaaggtctcaatgggctggagccacatggctctttccagtgactgaccaggaagggacagtgccttgcacaaacacatgctgcagctctttaacaggcaggaacccttcctatgggaactgctggtttaaaaaacgctatctgagtaagggctcttattcatgagtcaagtcagtcgactagatgagaagacaggtcacttggtttctcctagtccacattttgctttacccttcacatttttcaggagagggaaatggggctttaaaagcatgtcttccggagcagagggccacagcacagaagggttaaacaattatgtcttcccattttccagaatcagcaccaaccggctaccctaacatcctcccaactctattcagatttaggtgagggcggagaccgggcgtgggtggccttattctctgatctctgattgtatgcaggccgaccagagaccaggcaggtacaaggtacacccaaggtggcaatggacttttggtgccaatgccattgcaaatctcatgttttaatatagtgcatccgaaaaaccccgcctctcccaaggctctccaaatggtacaccttcccaaggttgcctttctgtctggactcctcttcaatctctgaaacaaatgtccaaacacctgtcagatttcagttgtctttcaaggaaacctgacccagagaaccggaggcaaactgcctttctctaagagcctcctgcccctccccccaccctgtccggcttgggggggaaagggctgccaaaatcatggtcagccccacaaagatactcctacagcccactgcaaaaattcctttccagtgtcaatggccccctggcattgcccatcctttggaggttcagacccatctatgaaaccacctctggggtcagcctgcccccatctgctccacccaaagaaatgaacaacctgcaaatcacggtggaaatacacgcctcaccagtccacagagcatttgcagtgtgctatttttcaaagcccttacctttgacctgagtatcgtactctgctatgatctccttatcctttttgaatttggctggagacgtcatgttttccttctttcttccaaattcgaattgtgaattgatagatccacggaaaaaatccaaccacctaaatcaatacctccaagaccgcttctctcgagggcagaaggggccccccacggtggtctccagcgctccgtggagcgcgggctgcgggctgggcagacggctacggcgggcacatgcagacggtgggcgctggggccgggtgcggcggcggctggtgcctgtgctagagccggagccgcagcctcagcattagccgggagaactgcagcgcccggaggctggcctggggtctgacatcaacgacacaggcggggagtggaagtccttccgcacaacatggtgtggggctgcgggggtgtggacgcgcccagctgtgtccccgggagggagtgggtgcttttcggggtgccgggggagggctgggcgtgcttcgcggttttttgtcgtagaggctcaaagatgctgcaaatcaaatcccaaacgggagccgcaacagcgcagactggatcggaagtcgtttgctccggttcacttgcctgtaaatgcaggaaaagggggagggggcgatcagccagagcgcagatcctaatcgcggcgggggtggggtaggggacgtcgttccgagcccgccctgggcccattcctgtccgcttaacgtctccccgcccgcagagcctggcgctacgaggtggggaggaaggaagctccctccggattttaaggctgaaagaaaacactttggagcagccgcctgcgcgggctccgggcggggactgcaggaacgcggggcaccaggcggggactgcggcacctcggcggcctcctgagccccgccagcgctgggcagcggccagcccgagggagccctcccgacctagcccccgacgtggccccagacccccggccggggcacctccctgtacatcaaaggggatcaaagccggggagggataagccaccagggcacaacttttcttcctctcccgcccctcctcccagttgttttgtttttggttactagcttctcttggcagcaaaatgttgatgggggggggggcaaatctgcaggaaaaagcctgctcggcacgggacacatccaggaaaacaatgtggtcagctgaagcaggaaacgggttagaggatagggtcggagccgggaaaaccggggggcggcgagcggaaggcagccgtcgcctccctcaagctagggacgatagtgactataaatgccacccccaatatttttttgacacccaagctcagagatcccagatatcccacccaatcccaggctggggatgggaggaggtcggtgaggtcgcagtcctgactcctcgcaccaggcggtgcccgagaagatccggccccggacgaggcccagggggctggagggacgcaagcgggagcgcggagcccggcgactagctccctcgcgtgccgcagcggcgaccctttctacttggtctttccttttcctccgagcgccgggaggaggaagctcccgctagcgtctcccacttcccgcggctggaggaaggggccacgctgagggaacaagacagggagcagaggcggcggggttcaggcgagcgggaagcgggaagcgagaggcgggtgtgagatggggtcctgaggctggaagggagcccggggacaattggagttgcacacgctcggaaggcgggaggcggcaaggagaaggctgccttagaggtgaggggaattggggcatgatcatgggccgcgatgttgcgtgaagcgcaaggatgtcaggaactgtgggggccgagatgtggtctagggatgggagtgggcgaagagaagtccatcggggcgggccggggggtgggactcggggagagccccggaagctgcgcggaacacccatcctcctgggtcctaggctgggacccgggctgtccgccagggctgggagacactggaggaggccggccgatgattacgcgcgatgccaacgacgactgccctacggtggaccgcggctgcccgtgtgcggaggaaagggagaggcggctgggtgccggctgcgctgcggtccgtgagccaggacggagtcccaggctgtacagtgatgggcggagagactcgcagtcctgagaagtattatgggctgtactgggagatttggagagggtggagggggggcggtctgagggattccgggcggcaccgctaaggcgatgccgcgagcagcatccgcgccctctccttcccgccccagccccggtttgttcagtcagggctccagcccggcggccgggaggaagaaaaggaagagggaaggagcctttacctggctctgacgcgacgggtcccaggcccccggctccgcttcccactcagagctctcctcccctctcttccccgccacccgtttctacgcagatcggtgccccagtccctggaggagcctccgccaactccgcaggaccccgccgggaagtagagcccacccctttaccaatcaccgcccgttttctatcgaccgatggggcccatagccaataggaagagc

SEQ ID NO: 2107 - DNA, 4001 bp, Homo sapiens
aaaagacatatctggttaaaactgcaggggggattccaagagcaaatgcaatgcatctggacaggacatggaggccagtggcctattgtttacaaaaacaggcctggattatgaacagtgacaagaggccaagacctcaataataactcacaaccacacctctctcaatcccagttcaactgaagctatcaatcagtcaactcccccatctctgtaataaacctaccaatatttgcagccaagtggatagaaggccccttagggcacctccagcactgaccaaactaatgacataaaaaagatcctgtaggtacaatgaggacttcagactaccttccaaccttccaagagataagggagctgcccatttcaaactctacgcctacccccaccccccagcaatcattagaggggagccatggcccttcccaagtcctctctgataggaaaaggtctccttgcactggtgcagggaaaggaggggcccctccctctgtactctgaaacaaaggaaaacccagagctccaaccatgtggtgtaacattcaaggccacccacctcttccactccccagctaaggtctcaatgggctggagccacatggctctttccagtgactgaccaggaaaggacagtgccttgcacaaacacatgctgcagctctttaacaggcaggaacccttcctatgggaattgctggtttaaaaaacgctatctgagtaagggctcttattcatgagtcaagtcagtcgactagatgagaagacaggtcacttggtttctcctagtccacactttgctttacccttcacatttttcaggagagggaaatggggctttaaaagcatgtcttccggagcagagggccacagcacagaagggttaaacaattatgtcttcccattttccagaatcagcaccaaccggctaccctaacatcctcccaactctattcagatttaggtgagggcggagaccgggcgtgggtggccttattctctgatctctgattgtatgcaggccgaccagagaccaggcaggtacaaggtacacccaaggtggcaatggacttttggtgccaatgccattgcaaatctcatgttttaatatagtgcatccaaaaaaccccgcctctcccaaggctctccaaatggtacaccttcccaaggttgcctttctgtctggactcctcttcaatctctgaaacaaatgtccaaacacctgtcagatttcagttgtctttcaaggaaacctgacccagagaaccggaggcaaactgcctttctctaagagcctcctgcccctccccccaccctgcccggcttggggggaaagggctgccaaaatcatggtcagccccacaaagatactcctacagcccactgcaaaaattcctttccagtgtcaatggccccctggcattgcccatcctttggaggttcagacccatctatgaaaccacctctggggtcagcctgcccccatctgctccacccaaagaaatgaacaacctgcaaatcacggtggaaatacacgcctcaccagtccacagagcatttgcagtgtgctatttttcaaaacccttacctttgacctgagtatcgtactctgctatgatctccttatcctttttgaatttggctggagacgtcatgttttccttctttcttccaaattcgaattgtgaattgatagatccacggaaaaaatccaaccacctaaatcaatacctccaagaccgcttctctcgagggcagaaggggccccccacggtggtctccagcgctccgtggagcgcgggctgcgggctgggcagacggctacggcgggcacatgcagacggtgggcgctgaggccgggtgcggcggcggctggtgcctgtgctagagccggagccgcagcctcagcattagccgggagaactgcagcgcccggaggctggcctggggtctgacatcaacgacacaggcggggagtggaagtccttccgcacaacatggtgtggggctgcgggggtgtggacgcgcccagctgtgtccccgggagggagtgggtgcttttcggggtgccgggggagggctgggcgtgcttcgcggttttttgtcgtagaggctcaaagatgctgcaaatcaaatcccaaacgggagccgcaacagcgcagactggatcggaagtcgtttgctccggttcacttgcctgtaaatgcaggaaaagggggagggggcgatcagccagagcgcagatcctaatcgcggcgggggtggggtaggggacgtcgttccgagcccgccctgggcccattcctgtccgcttaacgtctccccgcccgcagagcctggcgctacgaggtggggaggaaggaagctccctccggattttaaggctgaaagaaaacactttggagcagccgcctgcgcgggctccgggcgggaactgcaggaacgcggggcaccgggcggggaatgcggcacctcggcggcctgctgagccccgccagcgctgggcagcggccagcccgagggagccctcccgacctagcccccgacgtggccccagacccccggccggggcacctccctgtacatcaaaggggatcaaagccggggagggacaagccaccagggcacaacttttcttcctctcccgcccctcctcccagttgttttgtttttggttactagcttctcttggcagcaaaatgttgatgggggggcggggcaaatctgcaggaaaaagcctgctcggcacgggacacatccaggaaaacaatgtggtcagctgaagcaggaaacgggttagaggatagggtcggagccgggaaaaccggggggcggcgagcggaaggcagccgtcgcctccctcaagctagggacgatagtgactataaatgccacccccaatatttttttgacacccaagctcagagatcccagatatcccacccaatcccaggctggggatgggaggaggtcggtgaggtcgcagtcctgactcctcgcaccaggcggtgcccgagaagatccggccccggacgaggcccagggggctggagggacgcaagcgggagcgcggagcccggcgactagctccctcgcgtgccgcagcggcgaccctttctacttggtctttccttttcctccgagcgccgggaggaggaagctcccgctagcgtctcccacttcccgcggctggaggaaggggccacgctgagggaacaagacagggagcagaggcggcggggttcaggcgagcgggaagcgggaagcgagaggcgggtgtgagatggggtcctgaggctggaagggagcccggggacaactggagttgcacacgctcggaaggcgggaggcggcaaggagaaggctgccttagaggtgaggggaattggggcatgatcatgggccgcgatgttgcgtgaagcgcaaggatgtcaggaactgtgggggccgagatgtggtctagggatgggagtgggcgaagagaagtccatcggggcgggccggggggtgggactcggggagagccccggaagctgcgcggaacacccatcctcctgggtcctaggctgggacccgggctgtccgccagggctgggagacactggaggaggccggccgatgattacgcgcgatgccaacgacgactgccctacggtggaccgcggctgcccgtgtgcggaggaaagggagaggcggctgggtgccggctgcgctgcggtccgtgagccaggacagagtcccaggctgtacagtgatgggcggagagactcgcagtcctgagaagtattatgggctgtactgggagatttggagagggtggaggaggggcggtctgagggattccgggcggcaccgctaaggcgatgccgcgagcagcatccgcgccctctccttcccgccccagcccgggtttgttcagtcagggctccagcccggcggccgggaggaagaaaaggaagagggaaggagcctttacctggctctgacgcgacgggtcccag

SEQ ID NO: 2108 - DNA, 4001 bp, Homo sapiens
cccgggagggagtgggtgcttttcggggtgccgggggagggctgggcgtgcttcgcggttttttgtcgtagaggctcaaagatgctgcaaatcaaatcccaaacgggagccgcaacagcgcagactggatcggaagtcgtttgctccggttcacttgcctgtaaatgcaggaaaagggggagggggcgatcagccagagcgcagatcctaatcgcggcgggggtggggtaggggacgtcgttccgagcccgccctgggcccattcctgtccgcttaacgtctccccgcccgcagagcctggcgctacgaggtggggaggaaggaagctccctccggattttaaggctgaaagaaaacactttggagcagccgcctgcgcgggctccgggcggggactgcaggaacgcggggcaccgggcggggaatgcggcacctcggcggcctcctgagccccgccagcgctgggcagcggccagcccgagggagccctcccgacctagcccccgacgtggccccagacccccggccggggcacctccctgtacatcaaaggggatcaaagccggggagggacaagccaccagggcacaacttttcttcctctcccgcccctcctcccagttgttttgtttttggttactagcttctcttggcagcaaaatgttgatggggtggggggggcaaatctgcaggaaaaagcctgctcggcacgggacacatccaggaaaacaatgtggtcagctgaagcaggaaacgggttagaggatagggtcggagccgggaaaaccggggggcggcgagcggaaggcagccgtcgcctccctcaagctagggacgatagtgactataaatgccacccccaatatttttttgacacccaagctcagagatcccagatatcccacccaatcccaggctggggatgggaggaggtcggtgaggtcgcagtcctgactcctcgcaccaggcggtgcccgagaagatccggccccggacgaggcccagggggctggagggacgcaagcgggagcgcggagcccggcgactagctccctcgcgtgccgcagcggcgaccctttctacttggtctttccttttcctccgagcgccgggaggaggaagctcccgctagcgtctcccacttcccgcggctggaggaaggggccacgctgaggaaacaagacagggagcagaggcggcggggttcaggcgagcgggaagcgggaagcgagaggcgggtgtgagatggggtcctgaggctggaagggagcccggggacaactggagttgcacacgctcggaaggcgggaggcggcaaggagaaggctgccttagaggtgaggggaattggggcatgatcatgggccgcgatgttgcgtgaagcgcaaggatgtcaggaactgtgggggccgagatgtggtctagggatgggagtgggcgaagagaagtccatcggggcgggccggggggtgggactcggggagagccccggaagctgcgcggaacacccatcctcctgggtcctaggctgggacccgggctgtccgccagggctgggagacactggaggaggccggccgatgattacgcgcgatgccaacgacgactgccctacggtggaccgcggctgcccgtgtgcggaggaaagggagaggcggctgggtgctggctgcgctgcggtccgtgagccaggacggagtcccaggctgtacagtgatgggcggagagactcgcagtcctgagaagtattatgggctgtactgggagatttggagagggtggaggaggggcggtctgagggattccgggcggcaccgctaaggcgatgccgcgagcagcatccgcgccctctccttcccgccccagcccgggtttgttcagtcagggctccagcccggcggccgggaggaagaaaaggaagagggaaggagcctttacctggctctgacgcgacgggtcccaggcccccggttccgcttcccactcagagctctcctcccctctcttccccgccacccgtttctacgcagatcggtgccccagtccctggaggagcctccgccgcctccgccaactccgcaggaccccgccgggaagtagagcccacccctttaccaatcaccgcccgttttctatcgaccgatggggcccatagccaataggaagagctgataccgagaggcccggaatgagggggaggagctggcaaaacttggaggtgtgactagcactgccgaggcgtggtcacagattaagctccaccccgggttgttgaaccccgaagtagaactgatgggcgggattaaggtggaaccgacgaccaaacacaaactcttgagctaaggcatggccaattgggccggggtagagaggaggggtgttgcggggaattttaaccaataaagagtagaggccggtggagactgtagtccctcttccaataagaagcgggaagggcgtgtcttgccactttcactagggctaaggcagggtttgccgaaacctcccgaagccggccaatgagatcggaggcggagccaagctcagccgaccagaaagccgaattgatctcagcaccgttactggggcggtgcctacggtcttcaagccactaagctctcgtgaggggaggccccggagccttccaatgagggactggggctaactctagttcttccaatcggtgcgcggcgctggcaattcaaactgataccgggttggagaggcaggaaaagcggaagagggagcgaaaaccaacgtgttcggtgacagaccccagcgccgactgagcctctaaagcgacttcagctctgccccaccaacaccaccgcgcgcccgggaacagccgctccgggaagaaacctgaggggactgcggggggcacgagggacagctgagggaagggaggacgcgagagaaacagcgcaagcacgctgagggccgggggttgccaggagaggggcccgcggacccgcagagcggaggaaggtccgggagaaaaggggcgggacggaggagaatccgggatcgcctggcagaaaaagagaagggagtttctgaatcctgggaagaggaggcgtgggtagggatgcttagcccgagatccgacagcagggaaccggagcgctccgggggaggggcttaatgctggggaagggatgtcttaaaagaggagaagctttaaattagacgatcggagaaggctgagggaattgctatgaaggggcgggagctgaagtgtagaggactcctttagacagcagaaagggaaagccgttgagaagttcccttcaaactccacctgcctcctctccaattcaaactccactcccttctccaaaagttaaaaggaaagccaagtttgccacgctcccctgttcctactcaataaatacttcttctactccgccaccgggaaaacagaaaaaaaaaactaatttccttcccaatattaggacttagaaaagctctaggtcccgcaacttgaattttagcctaggggaatcaaaatagtaggagcattactcttgtttcctttttcaaaatcccacacctcatccttcctgcgacgccatgtctaccaacatttgtagtttcaaggacaggtgcgtgtccatcctgtgttgcaaattctgtaaacaagtgctcagctctaggggaatgaaggctgttttgctggctgatactgaaatagaccttttctctacagacatccctcctaccaagtaagtcatgctagtggcgggcaacggtagcttttaactaaatgggaacacttatggcttggatctgtgggagtcaacaaggaggttatcatttcggtgtttcagccactcccaccagtttgatgatccccttggaatatatctaagtgggcagactgtctggacaaagtctgtggtttagccaaggtggtcagtcctgatgtaatgcttctagttcaattgcagtcatgcgaccacacatctcttaagtttgatccctggttcagtgccctgccc

SEQ ID NO: 2109 - DNA, 4001 bp, Homo sapiens
tcccaaagtgctgggattacaggtgtgagccaccacgtctggccatctgatgtctcctttaactaggacatcagctcctagagggcagggactgatctgtcgtctaccactgtccccatacccgggcaacacctggcacgtagcatgattttagtgagcagctactgagtgtaaggggtaacgtacaaatagttgagctgtcttggggccctgcctggggctcagattaaaaatcagcttagtcggctgggcgtggtggctcacgcctgtaatcccagtactttgggaggacgaggctggcggatcacctgtggtcgccaggtccgagaccagcctgaccaacatggagaaaccctgtctctactaaaaatacaaaattagccgggcatggtagcgcatgtctgtaatcccagctactccggaggctgaggcagaagaactacttgagcccaggaggtggaggttgcagtgagccgagatcgcaccatcacactccagcctgggcaacaagagcgaaactctgtctcaaaaaaaaaaaaaaaaaaaaaatcagctcagttttagtaagagctcgccacgcaggtgccctcaccacctgccaggccctctgccatctggttttcctactgaaccctccccgaccaggtgttttccagatggagaaacaggccctacctgccttgctcgggggtgtgcagccatttcagggcacagctggccgctgggagaaccaggactcaaacctggctctacgccggcactcacctcgtcgatctcacactggaccacggactccacggaggggtgcttcaccacctcccgcaggacacctccatctccgcccccgatgatcagcacctgggaggagggggcagtcaaggcaggggccctggcaggactgggagcccccaggcccctgaagcagaccccctgacccctcggacccacgggcctcatctttttctaccctcggaaacgctttcgtgccggtgtcccctttcctggaagttccttccagggctgccctaggattccgaggccgcgtcagtgtcggcccccacccctccgcgggacgcccctggcctcgctagcactttctctgacaaccatgcaggcagcatctgggaagagcccggagcacacctggggccgcccctcgtccggcactgttccaggggacactggggtacctttcgcgggttggggtggctgcagagaggcaggttggcgatcatctcctggtaggagaactcgtctctctccgtgcactggatgacaccgtccaacaccagcacgttgccataggtcttactgcgggcggagtgacagtcggggacctgggttctctggggtggggaaaacgtaccccaagccgccctgggtgaggagggtctccccatcccgcctaggggtcccagggatgaggagcgatggtgacacgtggcgaggaacggcaggcgggccgccgggtggaggccggggtgggacccggggtctcctcgggctctgacgtgtcctgagggctgacacgtggagcggggcgcagactccgactcccccacccaagaggccagcccgcagtcccagccccagcccagggaggcggtgtgaggggtggcgagggggccagggcaggacgaggtccagcccgcttgggtcccggcgtggagaggcccgtgaggcgggcagcaggcggcccgggctgagcctagggggcaggcgcctgcgggcagcggcggtacctgcggaagacgaggatgtcctggtagcgcgagcgccggtggtggagcagctgctccacctgcagtgacagggcctggccgggccacaggctgcaggtctcgcggaaccagccctcgcggatggcggcggggccggaggcggcggggccgtcggggccgggctccatggcgggcgggcgggcggcgcggggcgcgggcccgggactgcaggccgcgcggcgccgcagcacaacgggaccagctccgcccgccgcccgcgccgcaacctaacccgggcgcggggcggggcctgccggcgggggcggagcccgcgctcgccaatggcaaagcggcctcgcctggcgctcattggccaccggctcgcagagcggcgcagagtggctgtggcgcgccgtccgtcggcggcagcagggtagtgcggcccgctccaggggccacgtggggcccggccggggccgggcggccgggtcgggttccggggcgggctgggccggcggaaggggtccgggtccttcctccgccccaagcagccggggcggtgcaccaccggcccccgcttccttctcggggttgggaggcaccgagggcctcgaggggctgcgggactcgggcttggtgtggagggcaagagcgctgcgacgtgcggactggagagtcagcctttgggctggagacacgggagcgggtggctacagtggtttacgttgttgcacggggcgagtagaacgtatccttctttgcgtccaaaatctggttccttgttggatttgaacagattatgtggctcgtcggggcgaaccgagggtttttatttacttggaaagaatcatcacagcccgcgaattcacaagctggatttagccattttcccttagattctgcgccatgagcctataggctgttgaatacgagagaagtgcttttctaaacgagtttctaaatttaccagcagtgtccaggaagaggcccagaacatacatattcagcaccagaaaagactggcacgcaatttttcttgacaaactgggtcttgctctttgaagggtgggtgggaatgtgctgtttttatgagaatgtcaaagaacttctcagaatcacattaagcatgctaattaccaaatattaaatgctaattgttccacacgcagttcgaatgccaaggaaggaagatgaaactagtataagctactcttgacattatgtcagggatggttttgacacgttttgcagcctccacctggaggtggggaacgtttcctgtgtcgtccccagagcagagtaacagcgttgtttatgggtgagagcaagcctcaagcctaggcaacaatgtgccttgcttgcttttaagctccttctaaaggggaggtaaaccaagaccgctaaagaattgctaggtgcctgggcgtgatggttcaccccggtaatcccagcactgtgggaggcggaggcggaggcgggcggatcacgaggtcaagagatcaagacgatcctggccaacatggtgaaaccccgtctgtactaaaaatacaaaaattagctgggcatggtagtgcgcgcctgcagtcccagctactcgggaggctgaggcaggagaatcgcttgaacccgggagttggaggttgcagtgagctgagattgcgccactgcactctagcctgggcaacgatagtgaaactccgtctcaaaaaaaaaaaaaaaaaattgctaggcagctgggcacaggggctcaggctgataatactagaattttgggaggccgaggcaggaggaccgcttgagcccaggagttcgagaccagcctgggcaacatagcaagactgtctctaaaaaataaaaaacattgctaggcaacagcttccatggacttgttccaggaacgaagattattcttgaaatgtccacgtagtggataagacagagtcaatcagtgtgtccagtgctacaggcttgattgggttcaatcctgtacttgggtcaaggtgtttgcctacattgcctgtacttcctccaagacatttctgcctctgggttgtaactgcccgtgtacttgtctgtgttccctaagccagatcataagctctgaagctgaggatggtggctgtagatggcagtacttgtctgtgttccctgagccagatcataagctctgaagctgaggatggtggccgtagatgacaggcctggatgcagccaggtgccttgtggatcagcttgcttttaggtggtgaaggactgaccatagacagtggccctggcatt

SEQ ID NO: 2110 - DNA, 4001 bp, Homo sapiens
ctgaatgaagaaacaaatgaccctgccaacaagggaagctaaccaaatgaagcaaccagaagtcaccagtgttataaacaaattactcaatttaaaaaatacaatttccatcatttattattgtatcattttattgtaaaaaatagaagtatgttttacagcttgttacttagctaggtctttctgtgggtctaatactatttttaatcataattatcaacatttcttgctgcacactttaaacttatatgcactataaactgtatgtggcattggagttacaggttaccagctcactgcatacacttaaaacataattcatattacttaatgatcatcaatagtttcacacagtaaatcctgagccctgggctgggcgcagtggctcacacctgtaatcccaacactttgggaggccaacgcgggtggatcacgaggtcaggagttccagaccagcctggccaagatggtgaaaccccgcctctattaaaaatacaaaaaattagccaggtgtggtggcaggcgcctgtaaacctagctactcgggaagctgaggcaggagaaccgtttgaacccaggaagtggaggttgcagcgagctgagattgagccattgcactccagtccgggcgacagtgcgagatttcgtctcaaaaaaaataaaactattgaaaaaaaaaaaaaaagatcctgagccccggttttccgagattttatctgcttttaattttctttcttctccgagggatacagtcacaatacactggatctataataccctccaataataccagctccttaagggttgaacggaatctcattcacctttgtgtctcccacagaacctaatttaacttggggtcagtaacacgagagtgggaaatgaatgcagcataaaagagataactgagttacaacaaacacaaaacaaaagaagcatcatacataaccaggtctgaggttttcagtataaaatcccttcaatatgctgagttctaaaaagaagcagaacttttaattaacacgaagatgcttcaaataattcttagacatgacaataaaataaccaaaacctcaagagacgaaaagtaagacccgaatgctaaactcccatcacttggactcctttgctttttaataatgagctaacctctgacatccacctccattataatttttgtgggggctaagaatgtatttcagaggtccatgaatcccttaaaattgtttgcaaacatttacttatacatttacttataccatttttctgaggaaaggtgcaaatattattcttatggtcccaaagcctgtgactcccaaaatactaagaaccaatattctggggggtacagatgcttccaaattggaatctttcaagaatgtctgagcggtagtagaaaaaacatcatcagttttatatacatgaggtacccttaccgcctaggcggtacaggaaaagtgaaccaagacaaaggacaggaagctgcagggggaggagccctggcttcagggactcgtaaaacaaccgaagccataaaggaagctgagggactggggcgggaagatcgattgcagaaatgtttagggctgagatgaacctggctgttgccagcttcagggcctcactgggccgctagatcagggaagaaggggacgagagagcagaacattaacttggcagggtccatttgtgttcattcccagcacctcctgggagcgctggggaagctccaggggccgagtggatggcgggaagacatcctgggctggggcccaaagcagcggccccgccagcgatttaccttcatagggtcagcgaggtaaagcttctcggcagcgcggctgaactcctcccaggtctggtactgcggcatcgtggcctagagtggaaaagtaaagagaagcaaggcctcagaacccggcccaacaaactacctacgtccgggagtcgccaaccgacgcgagtcccagcagccccaagatggcggcgcctcctcgcaccaacgcctcgctccattggacagccccgtccatgctcgcccaatgggcaggagggatgttgtcagggagtgggcggagcccagggcgtgtggctcgagagctgagcgagacaagcggagggcacggcaaccaatgccggctgccacagcgcccccggtagggctgaatgagtggcgtccgtcccgtggccctcagggctgaaccgcagctgccttcaacaaagattaagcggctctgcgatagtcgctgcatatacgaggaaggaggcgacagggcccagctgtcacacagcttggtgaagaagccaggagacataaacacaagagtgcaacggaaaactttatatgataaacatttatgtcgggttagtggagcgcgaaggaagaaggatctcttgtgggtggggggagactcacagaagcggtgcaagctcaacaggtaggcaaggaagggcagaacacgtaggcccattttagatctgcagtgtatgtcagatgactggtgtttaggagatgaggaagaagccatattatcacttctgcaaggataaaaaatctgatcctccaagcaggaggatcgcttgagcccgggagtccgaggctgcagtgagccatgatcgcgctacgcacccagcctgggcttcagaggaagacgctggcgcaaaagtaaataaataaagaagatggcctgcaggggacaccaggtaaagggtattatattttgagatggaaagattttgtgcatgtttataacttttagagaaggacacataagagatagaaaaataaaaaatacaagagaaagaagaaagcgaggtctcgggaaatatgaaggggaagaccaaaggcccagatgaataaaaacaggtgcattattgcctttgatggggtgaggaggagggaaaagtcgggtgagggtataggtgagcatgtagatacgagggcaagaaggtacattttcttgtcacctaagacaggagaccaccttcgtaaataggaagggtggttttggatctttgaggaagcaaggatgggtttggatccttgaggagaaggtttggaaaagccattgtgagaaatgaataaggaagcctattagaaaaaaacaggtgggaagcggtggtgcacacctgcaatcccagcactctgggaggctgaggtgggcagatcacttgaagtcaggagttcaagaccaccctggtcaacatcgtgaaaccccatctctactaaaaataaaaaaattagttgggcttggtcgtgggtgcctgtaatcccagctactctactcgggaggctgaggtaggagaatctcttgaacccaggagatggaggatgtagtgagccaagatcgcatatcactgcactccagcctgggcaacagagcaagactctgtctctaaaacaacaacaacaacaacaacaaaaaaagaaactcaaaagcaatatgtcaagtagagtaaaaagctgaaactggagatcatatctgggaatagccccaattagggtctgtctccagcaacacccagaagcttggattttggactggaaaagacagatattagggatttatagggtacatgaggaagaagaacaaagggtcaagaatgttgtaggtggtactggcaagagaatgattgaaatgataaattatgggatccatgctagatagctggtaattaattgagtcaaaagagagaagttaaggaaccaggattaaaggaaatctgaattcaatatagcaggaaataagttttagtcagattggatattggggtttaacattttagagtagcaatagtccctggtgaggctggatttatagttgggttgtccacacaaagtcaaagtcttctatgagtaagaaaaggaataagatgaaggagaaggctatgagccagggacccaaatcctcatttaatgagacacgtgtgtgtgtgtgtgtgtgtgtgtgtgtgtgttgagggaagctataaagagcaatgagcagaggcagagagggcag

SEQ ID NO: 2111 - DNA, 4001 bp, Homo sapiens
agtatctggcatgtggaagaagttcattgaatggaagatataacttctatactacctgaaatagttcatctggttggcagggtactagataatgaccctaaaatattttaacttggatcttaaatccagttaactcttgtatttaagcaattgtaggctgtgtactaaaaactcgcccctctcccagacctttaccaataccacaagcaaacttcatgttaaaatttgctcatcaatcaccttactcttttatttatttggactcctttccacagaaaatattttgacaaaagtcagaaaaggctttcacttgtttcaaaatactacttgcactgcagaaaatattgaatatttactacaaaacactttgatggaaattacaaaatggacagttcataagcagtttgcaaattcgatacgctaatctgaaactatcattccaaaataagtatcttactgtttgcctaagaacagctggttgttcttaggtaaaatacttgggggataacattctaacatgacgaaaaactcgttggcatatttaaagccaattaaagaaggatttcaatgtccaattcggagtgtccaaagatatttttactaaagttctggccctcctcccttccaatttttcctttgaaaacacacaaactgcaaattacatgctctaaagagaagagctaacgtgtatttcagaaaacggatatattggcttagatcaactagtttctatacgacttcattctgcattaacagtttgcaagccctgagagaccaatggtgctcaactctagtcctgtgtcccttctagatcttgatctagtactaatttcctacaggaggggactatgggacacacaggctccagcacgagcctgataaagtgtgggccccgagaaccaactacgacggagtaacttccctgcctgcaggcgatgggcagacgacgctggcagagcctaggtaagagttacctttcaccagcggactccaagagtaaaacacgatggtggcgggtggtgagggatgtggagggcgggaaggaattgaatcactccacaacctgcctccatacccgcgcatagttttcgttgcaccctctaccctcacagaaccttaaattcacattgtcccaacaagttatctacgtccccctccctgaagggatatcaaattgggcgggagctcccgcgaaccctgacctggcgcctccacgaaggcttaggacctggagggaggacgttggggggcggggagggcgctttttcaaaaaaagccgctgaatgcttcttcctgttctccctcccctaaggtgctctcccaagatgtacccccaaaccatattctccctgccctgccgccaccagtgaccttagggctttcctttggcctcccactcgggacttcctcctccggctccgctaggccccaggacccggcggcacgcacggcgctcggcctgcaggccccgccaggcaggcgggcagcgaggtaccatcccggcccattcccgccgccattttccggccaccgtcgccgccgcgtaggggggaccattccggaggaggagactgcgcaggggcgcaccggtctccgccgcagcgcacggggggggggggggtgcgccggctctaggaggaatccttaagatctccgaagctcccctcgctggccaccctgtgccaagctaaggtctcctaccaggccttaccgagaagtccctggcctcaccccggcgcccggcgcttctacttacgcggaaaaatcccgcgtccatcttgccgcctcgctcggagatcgctccctatcccagggtacaccgcgccgccgcgacggagggcgggaccggcggagggaaagccgagcgccgggacgcagcgcgcgtcgttgcgcccgccccctccggccgacacgaggccgcgcctgctcagtgcgccgagagcccgccacgcgtgcgcacgagcgccagcgggggcgggcttctgtcaggccctaaactccccggtaggtagtggaggaggcgaacctgacgaccgcagccaatgggagcaaaagggaaggccgtcgagtcgccccgccctgcaagtccttttgtggcgcgtgaccatccttgttcgcgcaatgtgacgtgacccatccttcgacccgtagtggaagaggcttggcgtcctggagttccatgaagcgattgaagagaaaggctgttacctcagagtgacgcgggcgaggcggcccgtgcgccgacgagaggcctgcggcttccctctcgttgtgaaagttgtgattgtgtaggttttacgcgtttaccagacgagagaggattgtctgtaaagcggtcgagcctggcagcagacatgaaatctgccttgtagctcagcttgctcagcctttggaggaagctggaagtgtccagtagatgggtttcggtttcggcggcccggtaatcacgccgctgggcaggacgcccgccagagagccgtggtcctcgggctctgcctcgggctctccccagcccgggtctcggactccgagaagcaccagcttcctcgcagcgcctcgcctggccgccctggtgcctctgctctggctgcgagggccttgggttggatgcgcactgctagattttcttattttgaaaattattggccgggcgcggtggctcacgcctgtaatcccagcactttgggaggccgaggcgggcggatcacgaggtcaggagatcgagaccatcctggctaacacggtgaaaccccgtctctactaaaaatacaaaaaattagctgggcgtggtggcgggcgtctgtagtcccagctactcgggaggctgaggcaggagaatggcattaacccgggaggtggagcttgcagtgagccgagatcacgccactgcactccagcctgggtgacagagcgagactgtctcaaaaaaaaaagttatttttatctaataaagcagagatgggggtctcgctctgttgctggtctcgaactcctggcctcccaaagtgcagggacttcaggcctgagccaccgcgcccggccccactctgccagctttttcgcaagcgcttctcgcccttctcgcttccctttctcggagggaaagccggcgtccctttctcagaaaggcctcctccggccatcttttgcatcgttcccgcccccacacacactctcgcctcccttttctctttttttccatggcacttagcccacctgaaagtatgtgtgtgtttgctctcgtggctggagacactagctgtgtgctggagacatccctgcatctccagctcagacttctctcttgaccgtcccacgtgccccaagttgaaatcctgattccttcgccctccatccaccaaaaccacaaaccacctgcccttcccagggtcttccctggctcccgctgaccgcagtggctttcctttggtgtaggacgcaagcgtgtgttactcttgactcctttcctttacctcggctttcaaaccatcaagaaaccctccctgctgtcatcgtggttcagggcaccatcgtctcttccctgaactgcgctaaccccctaagtggtcttcctgcttctaccctggccactcagcatctactctaagtgtagccggcagggtagttctgttagaaaaccttaatcagacacttttctcaaaaccttccagcagcctctcatttttgttagaacaaaagccaaaatcctacctgatgcacgctatttcgtctttgatgtaatctagaatgctctacttccagatatcttttttttttttttttgagaccgagtctcgctctgtcgcccaggctgaagtgcagtggcgcgatctcggctcactacaacctctgcctcccgggttcaagcgattctcctgcttcagcctccctggcagctgggactacaggtgcgcaccaccacgcgcggctaattattgtatttttagtagagatggggttttgccatgttggccagtctggtctcaaactcccaaccttca

SEQ ID NO: 2112 - DNA, 4001 bp, Homo sapiens
aaatttaaatcacatatataatcatcgatatgagtttcagaagcatgaatgggaatttatatattttaccatttttggattaactttaataacgagagcaatgtgtgagtcagaattaattttcaaaaatttgaagacagacatttattagaggacaaaaagaactactttttagatgttaccacttacataaacttgaatttcaaacttcaacacccctcactaatcagccatctgaagaaaggatattgaacataagcaaatcctcttggacggcgagtgtagaaatcaagtggaacatacacatcaactataggaccataacgaccaaattcacgccgcaagtcttcagacctaaaacatcataaaaagacctcaaatttttatgtccaagtccttaagatgtataggcaatatatctttttgatgaaggaaagctaggatccaagaatttggaagataaaaatgcagtttacattaacaggacaacagcagacatatgtatggtacaagggaatgaccacaacttatttttatctacagccgtcatttttcataaaaggtacagcagcattaggttgtatataagccttgtttttttttttttttttacttttacagcatcaaatcgactctagcactctgaaaaataccaagcacttatttttactccccaattttagcgacagatttacacacttaacagtagataaatatggtctgaaaaagtcacaaatatcgaacttcttaaatagttaagtgtcaagatgacgtaaagagaaaatttctctagatgctaacgtaactattagaaattatggaaagaattatttatggaaagaattattgctttctttccttcttaaatttaagacaaaagcaaatcacaaagctagcaaaaaacccccacgaaacaccaaaaacccaaaccacttattttctgtgtgtagattcattatttgtgaaataaaaagcctcatcttgtagtaagaactcttccaaaataatctgaaggcaactcgaaacaagggaatggtgagaacaaagcctatttaaggtacgtctgaattaatctaacttagctgtcaacgtcctaatgactgacgcttcccaaacctcccttttcaaagggtgaccagaatttccaggaaataagaaaaactactcgcaacatttaactggaaaaatctaactccccaaatctcaacgctccctttctccaaacacctccaactgattaaaacccccaaatattaacaacggcaacaacaacaaagataaatggtagcaacattcctctccctcgatcccgttatttcatctcactattttttggctggggaaaaaaaaaaatctctgggccaagggggcgtgaacctcgaagaatgtgaacttcaaatcaatggggggcggccgtcgggtcgcggaaaggccgcggcggggggctgctcgcgccggcaggaagcagggagaaaggggctgcaaactgcggagggggagggggaccgaaaaaccccgccacgcggcccggcgaaggcagaggcgccgccctcgctcccacgcggcggctgaggcccgctgcgcggcctagttcggcgccaaagcgggcgcgggacccgccatcttcactccgtcccctcccccggcccagtgccgccaccaccagggtcctctccaggcgcctgcggcctccccgcctaggcccggagtacctgccttgtacctacctggtgtcgtcggccacgttcctgacgaacagagacgtgttggggggacgcaggtagcgggacatggcggcggcgtgtctcggccgggcgcactaacgggctcagcaaaccgtccgcggctcaggcggccgagcctcagacacacacagctagagggctctgctacggcaaccgactcttctcgcgagacttcactcccgcctccacttccccctcctacctccgcgcaaagtcgggcgcaacggttctttcccgcgagaacaccaggcgtccgcctgcgcatgcggagggctggcgcacgcgcctcagcgtcggtgtcattcgttggcttcttgcggtgcctcttaccctcccccaagcctgttctttctttctttaggtcttcatttcccgccgttttctaccttacactccacttcatctccacccccaaatcaggaagcagatgttttagtctctaggccaaactttgcggttactactaaatggacagatttttaaactatttagttcagagaggctgccttaaatttcccggttggtccaagttaatgtcctgcttttattttgccttaaatttcccgtttggtccaggttatgccctgacctgcgaaagaaggatttacagcttgtattgagtgtgtaaaggaaggaggtgtgtgcccttgcgcagagctgggcctgtctctccagtgttttcagcctgcctttgcccctcacccacaccctagccatctccacttagtcacgcatttggctcccaacctgggtgggaccaaacctcacactgtaggttcatgactgtggtcatttgtagtgtattctttgttgctgacggcttcctgggtatgcatcggacctgtattgcagcagttctcaaactttttggtctcagaacgcctttatattcttgtgtattacggaagattccaaagagctttttttaaaaaaagtgtgggttatacctattaataaatagttaatgagaacttaaaatagaggaaacttcggctgggctcggtggctcacgcctgtaatccctccctgtactttgggaggccgaggcgggcagatcacgaggtcaagagtttgagaccagcctgaccaacacagtgaaaccccatctctactaaaaatacaaaaattagccaggcgtagtggcgcgcgcctgtaatcccagctacttgggaggctggggcagaagaatcgcttgaactcgggaggcagaggttgcagtgagccgagattgcaccactgcattccagcctgggcgacagggtgagactccgtctcaaaaaagaaaaaaaaaaaaaatagagaaaactttgacacactccactaccctttatcacacatcatgtaccctctggaaaactccacgtttgtaagagaatgagcatgaaaatagcaaataatctttagtatggttttgattttggaggcccttttgagagccatttcctgctcgataagagtcaacttctggagatgagagacttcagttggaatgcctccagcgtgtggcacagtgccaagcaggtagcagggactcaagtactgttaaattaaatgaacttttatttaataaaaagtcataaaggcattatttttgtgtcaatcagcatctaagacaattaagtgattcgatacaggtgatgatagtttgtagcactctgtagcagagctattctaaatttttgtttcccaagatttgcatgcttaatttattaaaatgttgggccaggcaaggtggccccaaaatcccagcattttgggagggtgatgtgaaaaacaaaacaaaacaaaaaaaagtttgattccctgttatgtgtcagacattgtgctagaagcttgaaattcagtaatgaaaaacatacagcttatatttctagggcgatggcaatgagaaaataaagtaaatgcaggtttgttatatgaaagaaacagtaatgtgataggttttttcttgtttttgatttttacttatttttattttattttattttttgagatgtagtcttgctctgttgaccaggcgtgaatgcagtggctggatcttggcttactgcagcctccgcctcctgggttcaagcgattcacctacgtcagcctcccgagtagctgggactacaggctcctgccaccatgcctggctaatttttctgttttcagtagagatgggttttcaccatgttggccaggctggtctcaaactcctgacctaattgatccgcctgccttggccttccaaagtgctgaaattacaggtgtgag

SEQ ID NO: 2113 - DNA, 4001 bp, Homo sapiens
taaaattttgtactcgagcaattcaattctccaaaggtgggttgtttcttccccaaaggtaggttgttactataaagagaaaaaggtggttctttaataaagaaatcttcttaaaaacaactgaagtgtctcttacaatgattacaggattaaaaaaaaaagcaagttgggaattatgaaaagccactagggaagtcatggtgattaaaaagaaaggttttggagacagatctaggttcaaattcctggtcgtgctattcagagaaacttgtgaggttgggtaagtttcttcaccccttttagcctcaatttccttatctgcaaaattagtcactgtgttaaataagaaatagcaaacagaggtattattagcactgagcctggtatgggcccaataaggcagctattaccattactgtgaagacaagctgaccagggacctcattaataacgttgcaaaagctgctacggtcgttttcctttaaaactcaggctgggcacggcgactgacacctgtaatcccagcactttgggaggccgaactgggcggatcgcttgaggctgggagttcgagaccagcctgaccaacatggcgaaactccgtctctactaaaaaatataaaaattagccaggtgtggtggtgcgcggctataatcccagctactggagaggctgaggcaggagaatcacttgaacctgggaggcggaggttgcagtgagccgggatcacgccactgcattccagcctaggcgacagaccagactttgtctcaaaaaaaaaaaaaaaaaaaagacaaaaatccactctttgcttttttagtagggtaacaactattggtaactttctcttgttcgatattagtgtaaaggactccacagaaataagaacaaaaagggtagagttaaaaaccgaattttacaggtagcaataacctggactcaggtaaaagtgcgtgatgaagaattgatcaaagggccttcatcctagctttcaactattctaccaatcctcagtagacttgatgggggttagaatggtattccctggcatatgcttttaaaacaaaatcatttcaggcaaaagaaaagtctagcacccaggatagtacacatactaggcaggattaatcttaataattacttgttgaatcaagaagttgtacatttcagatgaaaattttaatttcctaggaaacaccgacttacattgaacaaaattttcatttgctattattctggactcaccgagagctcaagattctagtttttatcttcacttatttcaaaaaccttatgcggtaggaattatccccaaagtaatgaaaaaaaggaatgagctttaaaagcggttgagtaaactgcctaaagttaacagtttctaaagtaaagaagcagctgagatttgaacttgctttttagggctcaaaaatccaagctgtctgagcttcactaaagcatgtaccactacttgtctccctaaactgtctgatacacagaacatttattaaattttaaggatttttgtttttgtcttctatgttgccagtccttccatttcacattacctcctttgctgggtaagctatataccctcaatacaacgagaatggtgtcagagtacaagccttaagaacagaaaatttcttttactccgtacgccagaggtctggcgccaccaccacaagcgacaaacacaggctggggtccagaaacgctgccgaccgcgcccagatctcaagttttagtcaaggcccacgttcagactaggagaggggagaagagagggttctctttccccacaccctcgccacggtggaagcacagaggagaaggttggagtcgcagtaacagtgcaaacaataaacccgaaagcccctcttaagcccgttaaacgcacttacttgattgaagtaattccaggacgctaggccggcaccggcaacggaaaaggcttctctgtcctccagcccaggcgctggtgctgacgacatctggactgcgccgcagagagtgaaggcccagcgcgaggccgcgagcccagcgcccagagcgcgcgctcacgaaaggagcggggcatcccaacggcgccacctttaagcgtcacgggtggggctgcagcttctggacctaggactttgaacatgtcgcgcctgaagcggatagcggggcaggatctccgcgctggtttcaaagcaggtggaagagactgcggtacctcggtaccccaagggctgttgaaggcagcgaggaagagcggccagttaaacctgtcgggtagaaacctcagtgaaggtaagacccagaggtacgaccctattgtgtctcctgtcagaaagcctttggcccaggcaacctcccttttctctgggctggctttggccccctttctcagactgctagccagaatttctgtgctctaatctaatccctgtgctcatttcgaccggtttggttagcccagttcagttccttcccaggttcccgcaatctctgttaaagggaccctgctaaaaatacggtctaaatttaaacggggcgctttctgggattcccacattctgtgggataagcaacataatatgtgacgaaaccagctatcaaatcacgggcaaatcttttgtttctttggcccttattttcctcctcttattgtaatcttcaagggcaattaccaaagctaaaattatatgttttatcggcccctttgtgaacctgcactgttccctgccgagacgctcttctgtatgcagctgtgcagagttctacttacaaggaataatgagtatattttctaagttgaagatcaggatagatgccacacagagtgtttgaatgtggggacatcctgagaaacctgttaaagaccaagaagcacaaatctgggtaccatgaatgaatggccagatgctcttctgattgtcgtgtgtgtgtgtgtgtgtgtgtgtgtgtaagagagagagggaggggaatggagagatggagaaatagagcatttttcctgtaatgtttttcttcatttatatttaggttttaagactgattaaaaccttccattttccttctaatgattgctttcttattgtgacatgtataaagtagattaggcaagcaaatgcttctgaatgaatgaaaagacacagaatccttactccacctaaaagagtttttgatcaatgggaacatactcattttcaaactacagttgtgcatatatatatatctacttggtttccccaaaacctgaaacatttttctctaaacttgcatacctatcatgctaacattctgttctcttacctgtttaattttttaacagcatttatcactatcagaatttatatcatttatgttttttgttttctctgccctccaaccaaaaggttaatatcatgaagtcagtgagctttgttttgtgctttgttgtatttctatcactgaaaatagtgcttggtacatagtagagtcttattaaattttgcggaagcaataagtaagtgaatgagtattctcaaatcataagtggtgtgctagaatgtacttattgactagactcaggtggtttcgtctgttaaactttaagagagcacatggattctgactcttaggtccgtgatgatatggattagaactgcttaggttattgttatataaccagaacctaacactttacctggtacataaaatgattttaaatgagtgaataaacagcatttcataggagggaaagatataaatggcagaaactcatggtatttgtagcttatatataaaaaaggaatccctgttactataatatagaaagtctttctctgtctggctgtatgtagccctcagtttcatcacttgttagtgaaactttgataggcaaaccactataattctgaactgtttgtagttcgttacggggtcgtgcttcttatcttcctatctttgctcacataacattgagatggttaatcactctgtgccctaatttctcatttattatgcaggagtcata

SEQ ID NO: 2114 - DNA, 4001 bp, Homo sapiens
agagaagtaacttgcccatacgtagtaagtggtggaaccaggatttgacttaggcctggctggcttcaaaatccacactttgtccacaaaagttagttatgctgtcaatttagctgggctctgaaaaaaactggagtttcaactttcacatatatggtatgtatacaataacgtctacccgccacttcaatatatccttaagaactgaacgttttactgtagaaaaggagtagtttttaaagccttttactgtaaaagaaatcagtactttactaaagacgtcctcagaaagaaaacgattctaataattaatttgaaatggctttttaaacccaaatcatcatttgagaatacggtagctaccagttttctcatacgtgaaacatacttaggtaactttcaaaatgtttcaggtgtcagttactagtataaccctggggagtaaacggtagctatattacaactgttgcaaagtagagtttcttttttaagccaagagttctctaacacccaaggtttagtgccctaaaatgtcaccccagtccttttaattttatatccatgccttccaagccctacctaacatctggttcccagttttccccgttgagtattttctccaggcctgattcctcaacagttttccctaaaacctgtagctcatgctggcactatttttgccgaagtagattaagaatacaagtaatagatcatactctgggggaggcagtaagttaacaatttcgtctccgtctgcgttaaccagacgcagatactagccagggtggccactattctcctaacaaattctacaacggccaagcaatttttcggtaagttggaaaacggaaaccacagcgtggaaactctgcacggagtcttaaagataagaagttaagactttaatttactcttgcagagggaacggtgaaggctttcagcacggcaagacgatactttcgaaactgtcactagactactcaaactggagtctcccgcccaaaaaagcgtggcacacggctaaaaagggcctccctccaaggctccagtcctcggggaagacggcgctgtgaccgtctgatccatgagaccgggcaagaggtgaaagggagcaggaaatcctgtttatttccagtagtcctcagagcgggaaaggttggtgtctacccagaaacgaatagggccccagttccgggcctaggaagggaaaacccaggtctcccgggcgccctggagctgtgcccccctgcccggagcaccagccccactcgggctttccttctccccgtcccactcagggcctcagcacagctcccattatgcctccaccacccccacccgcgcaggcgcagtgggaaccggggcctacccgcgcccccgaggcgccgccactatggcggagcctggccaggccggtagccgctccgcgcggaccaggcgtccctctcccgtccccgcggcctccccaccacctatggggtctgtccccgcccggccggaccctctttcgccctcctcacccgttcttcagatccacctccaggatcttcccgtagcccttaaagaagcgctccacatcgcgctcccgggcctggtagctcaggcggccgatgtacacccgcggcatcccggcaacggcagtgatggctggccccggccccagccccccttaggcggcggcgggcaaagcgagagcacggcggcagcggcggcggcggcaacgggcgggcggcgggacggacgcagccgaaccccggcgacgtacgcgagcacgcagctcgcgagcgcgcgcttccacttcccccgcccttccccgaggcggaaggtaaccggagagagcgcgcgttcgcttcccgctcggccaggactgggggaggagcttgcccgggggcgcgccgacgtgcggcggggcaaggtgatcgacaggcggcgctgcggcacgtcctcgcgcgagctcgccaaaggggttcctgcaccgccttccgcagccagctggcttcgcccctcccccggaagtgtccgcacctcctagagcccagcgagcgagcgtttgtgcttttgtcctttgaaccgggtgtggtttggatttcggagctggagctttggaatcaaacctagcttccaaacgattgtgtacccgtgaccttgggcttgttacgcgcgatgtctcggaccctcctttatcttttctgtaaaagggggagagtagttcctaccttccagagttgtcttgagaattatatgagaatacgtacataaagcacttagtagttttgtcatatcaagtgcccaataaatgagaccagtattatttttaagaggacactgcttaaatagaagcagtgtgagaagcggagaaggctggagctttggagctagactaggcatgacgccgagtaaattacttgaccacaatccaacctatttttttttttttgagacgagtttcgctcggtcgcccaggctggagtgcagtggcgcgacctcagctcactgcaacctccgcctcccgggttcaagcgattctcctgcctcagcctccagagtagctgggactacaggcgcccgcccccacgcccggctaatttttgtatttttaggagagaggaagtttcaccatattggccaggcaggtctcaaactccagacctcaggtgatccgcccgccttggcctcccaaagtgctgggattacaggcgtgagccactgcgcctggcctatccagtctattttctaacctgtaaaattagaataatgtatacccatctcaaggattacacaggtcactaaatggggtagtgtatgtgaaagtacttggaacagtgtctgaaacatggtaagagctcaataaatattggttcccttctcactaacgccatgtacctagaaccataaagggttttgtttctttgcttgtttttgttttttgaatattttgaaaggataactcaaggttcaaatgatacacagtgaaaagtcttcgctgtccaccagccacttagtttctcttcccagaggcagtttctgaaatgtcctttaggaggttaatttacccttataaaacaaatagtaggatactatacatatggttctacacaaaatatattttgaaaatcattccttaagagtataaaaggactagttttatggttcataccattttatacacagtaatttatttagccagtgccctggtgaaggacattgaaataagttccaaccttttgttattacactgctgcagtaactttgcatttctctctctctctttctctctctctctatatatatcatctattcctagaaataggatatttgggtcagagttttgataagttattgctcaattccccttaagtggctgtttcctcatatcctcatcaacaccgtgttatcaaactttttgatctttgccaatctgagaggtgaaaaatgttatctccaagtggtttaatttgcaaatatcatattttgcagagatatgagtctttcttcatatgtttgagatatattttcctatttctgtctgtgtatatcctttacccatttttcttattcataggtgctcactatatattaggaaaatcagctctttgtcaaatgagttgcaaatattttttccatttgttgacttttgactttgccaagagtgttttttagccatgcaaaaacattagatatttatgggatcaatttatccatcctttatttttctttgattctggattttatttttaaatttttatttattctactttttttttttttttttgagactgagtctcgcactgtcgcccaggctgcagtgcagcggtgcgatctcagctcactgcaacctacgccttctgggttcaagcgttctccttcctcagcctctagagtagctgggattacaggcacctgccaccacgcccggctaatttttttgtattttagtagagaaggggtttcactatgttggccaggctggtcttgatctcctgacctcgtgatctgcctgc

SEQ ID NO: 2115 - DNA, 4001 bp, Homo sapiens
atcctcttccgcccttctcctccttggccagctgggccggagtgcctcgaggtgccccgctctgtgcaacgcagagggccacagggcggagggcctgctccaagcctcccttctttgttcacttggacccagggctcacaacaaaacaaacacacatgcaaaactatcacacaaacttaccaccaccacgagtgcaaaaacccaggcggttctcccaacgtgatgtttttttcccatcgaatctggaaaggtaagagcagaagcagcttagaggagcagagacggggtgggctgggggcttcccagagccaaaaggctaggaagaccaactaacaataaatgccaaaaggtgataaaaattcaaaatggtggccacagtggctgctcctgaaaacaaaggctctaagaatagtggggggggggggtgtcaagaaattggatgctggggggagtcccactcacctccgataagaaggtctgtgcagatttctgtgctcctacgtgcagtaaatattcgtagacgtataaagctaacctggaaagtggacagggggcaaagagagagagggaaaggcgtcagatcccaccggcgctctccaggaccttgccagcaggctttgagccctgtctgcgccgtcccattgtggccccgaccagaggtaagcagctagctcaccccaaacagggccgccaggtgcgaacagttagggggtggggaccagggaacgcgttacctcaagcggtgagggatggagagcagcccccaaacttgaacttccaagtggcgtcgcgggcaaacccacctaggttcctcaaactcgcaagccactcgaccccacagccaccttgcctttcccgacccactgctcgctacgctctcgccagctttggaggtccgaggagactcggccctggactccgggtgcttggcgcgctctggagagggcagcaaagcgccaccctcgtcacctccccccaaacaactgtgccccaagcctggggccaagccggcaccaccgtcgctgcccagcccggcgtccgaggacgcggagccggtgacgaagccgaggacagggaagggagagcgctcccggccgaacaaagcccccggcacgcactcctcacgccgcgggcggacaaaaggaggcttcggggctgcagaagccacgcgccccctgcccgcacccggtgggcaaagtgcggccaccgcggggagcgcccggctggggagaacgtcgaggctcgctggcgggacctcgcccaccactcaccgcgggcccccgcgctcgacccgcgccacggccaccaagtaccccctccggcggctccccccaccgccccttccccgatcccccaacctccgccggctcccaacaatgggctctcccacgccgcccgccgcggcctcggggaaggggccaggcaggcggcgcctggacccggggacccgagggcgcagcagcctccggcccccgcccgcccgcccacctgcctcccaccgcccgcccgcccgcagcccggcggcggcgcggccgccacttgcaaaatagggcttacttttcccgagcctgcccatccgagggcaccgccgagcctttgcctttggcaaacatggtttgcagggaagagggcgccgagcctcgccgccgccgccgccgccgccgctaccgctccggctctcccgagctgcccctcgctcccggccccctccccggcgctcgctcgctctctcgctcgctggcgctctcctcgccgcgctcccctccctcccccccaggcgctggctccgcgctctttccagctgtcaaagcgtcagccccggccgcggccccatcgccctggaactccttccgcgccggctcggcctgggggtgccgccgccgccgcccgcacggccgcccgctctccgctcgctcgcgcgcccgcccggctccgcctgcgccgccctctgcgcctccagcaccgctgccgccgccgccgccgccgccgccgctggtctacttggagctcaaccgaacgtggctacccgggcgagggagcgaggcgggcggcaacgtcccgcgatggatggccgcctcggccaatcggcgcacgcgggggcgggcccgggccggctgggagggacgccctgacagcgccggccgcggcagtccccgctgcggccgcctccgcggagccgctgcctgctcctgcaggcgaactgggggcgtccgggggcgcgagcctctctttctgtcgccggggcggtgggcgacgtggatcgggctgggggcaccctggtctcctcgccccagcgaggagggggatctgacccgcgctccccgcggcgtggaccactggggggctaggggggcgctgcggcagcgtccgatgggagggggcgcagacccccaagcggtcgccgctcgctccctcccgccccgtccctctcccttatctgcccctcagctcccccccgccgcggcccgcaccagcccagcccttatctcgccctccgctcttggttgtcctccccctaggctccgaccccgaccccctccccagactccagcccggcccccagcccgccccgcccccgggcctccctctcgcccagtctggcttccgagcgccgggcccggggctccacgctgagagctgggcggctcgagccggcgccgaggcgcgcggctgctcctttactagatcattaaaatactttggaaaaccccaaagtggagccgcgcgaaaatggcccttggcgtgctttggggagccgggggggaggggggctggggacaggggacttgaattaagaggagggagagtgatttctcccaaatttccaaggtttgccagtcttggcaagttagcccctcggcttctgcacgggaaagggtgccactcggagatggggggcgtcacctgggcggcccgcgacgcggaatgctcgccacagaaatctgcaaacttcaaataaatggagctaaattggggagtgaggggacgagagtcaggcgtagggggaggggaagcttccattgtcagtgacccaggtgtacaatgggaaattgaggggggggctggcagagtgacccagctatttgctgctgactcctttctgcccacgccgagaacccagaagacacactgcgtgcccctcattagggactcttaagaccagataccggcgaaataggggaaggctcccccattttcagactgtttttagagagcggatctctttaaatgtgataaaacactgtcggcactgtctctttaaaagagtcaagcagaaaaagctgtgtaagcgctgattggctgcctgtttggatacatctttaggggagccttgaaactgttagcctaggttgattttttttttttttttttttttttttttaactgcgctgttccaataaacaagtaacgcccctccccctaacatgcctcgcaccaaacaattaaaggataggtcagtgtcctggggaaaacacgtttcaagtaggaaaactcagaactagatttcaacaaaataaacaataattccctaccattaaagtttgcttattttgatctgtagaagagagaaaaggggcttttaaaagaaatgccccgcagcaaaagaatctgcattggttcaggaaggagactctgggtgcatttttggaataatgttctactcaatgtaacaacctccctaaattagagtacagccaggccctgcggacacctctggactcactctgctcccttccaggacccagcgctcacaggggaaaggggcagaaaaaaggaacgctgagacctagtttatgggcgtctgtgcgctagtccctattttaaaggttgtttcgtgaatgagggaagcatggaggttgggagttggaatacaaggataggggagagaaggaaataattacagttattttttcccctaggcggtttaatttaatagggctaacttaaggtaccttagagcccacactaattaaattggcctgctcatacccttgccctgg

SEQ ID NO: 2116 - DNA, 4001 bp, Homo sapiens
gaggttgcagtgagcagagactgcaccactgcactcctgcctgggtgacagagtgatactccatctaaaaaataataataaaaaaattaaattaaagcaataaacaatcaaacctgcctgcttctccaaaaaaatcagaattgcaaaagatatgagtaatatagcaacttggttctgttgcactgaagaatccaggtcaaggactggattctattgctcagaagcaccaaaataatcaagtatccaggaggcaataggtccaagttcatccttgcctcaatttttcttcatgtacatgcctatgtgtgtggagggagggagaagaggaacacagtgaatacagaggagaaagttataagggaataaaatgaaagaaaggcaacaaaaatgctctaggctaatgaaagaaggaaaattacacttttttttttttgagatggagactcggtcttgtggctcaggctggagtgcagtggcgcaatctccggctcactgcaacttccgcctcccgggttcaagcgattcttttgcctcagcctcccgagtagctgggactacaggcgtccgccaccacgcctggctaatttttgtatttttagtagtgacagggttttgccatgttggccaggctggtctcgatctcctgacctccagcaatccgcccgcctcagcctcccaaagtgctgagattacaggcgtgagctaccatgccaggctggaagatgacactttaaacccctgaggtaacaagggattgtgtattttctgtgtctttatctttccctcctagtttttccacaattcttgccacttccctactctaaaattcttccaacccgaaacgtgaaagatggtttcttgtagcttaggtaagaatgtcctcctttccaaaagtagatcccgaagtgtattcattcactcaatatatctgatgctggaagtgtcccaaagagaaaccactacccaccaatatgctccctattcccatctgaaaactaagaatccagaaataggcttaatctgtaactctagggcctcgagttaccttgagccaacattgtagatgttgtactgcaaggtcaggtctcgtccctccacggcgtatctgttcagcagtgatttggaagccaaaagcctggctccttcctctgcttgagtgacagcaaatagagccaacaccacaaatgacagcagcctcatctttagagaaaaaagcaaagtgagttatcaaaccaagtacgtcaaattcaccaaaatcctcttgacagcgctcccgtagaaagctccttcgatgctaccagaacagcagccccttccacagagtagtccataagccaccagagcagacccgttctccagactctcctaccatcttcaccctgcagccctcgaaaaaccggtacaagcaccaatatatctactgccctcttcctgtcagaagccccgggatgcccaccggctggtggagtcttctgaggggacaccatgtggccagagcagggcttccttggggtgcctgatttcggccgatctcggacctgcaggagcctgtagctttccctcacacaggagtgcccacagccttcccgctgctcccctcctccttggccacagctctattgggatcccaccgcggactcgcggggtcctcctcacatccctgtaccccactctccagtccagcccctgagatcccattcgtcctcgcctgtcacatccctttcttggtcccacgggcgggggggcgggggtcaatcacctctgccccccgcctcccgcctcttgcaaggttacacgtcctccagccaccgcgtcctctgcccttcccgccctcccctagctaacccccagccacggggtgatgcgcggacacgaggctctcgcctctcccgttcggacgccctaagcctccggacttaccgttggcatcccaaacgcctttccggagccacaaagacaggaagagagcgtcagcatccgaaagaccggaaataagcactggccggaaaccgtggtgttccgcccaatgccttgtgggagttgtagttcttggagaagccccacctttccctttgtagtgcccgcctgcctgagaggctgtgagcgctcctaagaggtttgtgcgttctccaggcttcttattcggccctctttggggggcttttcaagctgatttttcactactgtatgtgacccgcacctcattaggtgctttgggaaactagcaaacctagaaatttggatcatctatctaaaatgtcaactagtactgtcgaacagagaattagagaaaagctattccaaccagtattttttctattctcagacaagacacatagacattccctacatccagcaggtcaccgagccctgagctttatttagaagccctttgaagtgccaaaaaagtagatctttttttctccattcctactataactgcttcagttcttgctggtttctggatgtgggttttactctagtagtctttctatcttaggtctttcctgcactttttatttttatttattttattttattttattttatttttgagacagggtcttgctctgtaccccagggtggaatgcagtggcgcgatctcagctcactgcaacctccgcctcccaggttcaagcgattctcctgcctcagcctccccagtagctgggattacaggagtgtgccacctgcccggctaattttttgtccttttagtagagacggtgtttcaccatgttggccagactggtctcaaactcctgtcctcaagtgatctgcccaccttggcctcccaaagtgctggaattacaggcttgagccaccacgcccggcctccctgcactttttaatcagctgccaaacttcccaaaacagcattttgaacagtagatcttaggttcagaggatgaactgtgaagttaggcagtcatgaattcaatcccagttctgtcacttactggttaggtaaccttgaacaagcattacttatataacaccttggttcccacatctgtaaaacaagataattatagcactcacaaaaggttagagtatcaaataagatgatgtatgtaaaactcttagtacagtgcctggcacatgtatgtgctcagtaaatggtaattatcagtattgctgttattctatacctcccttgtagcattcctgcattcaatatgcgtttactgagcacctactttgttcctggtgctgctgtaggttctggagatacagtgataaataggacagatatggtttctactttctgggggttacattcttgtagaataatacacattgcctgtatctgccttagtatctgtccttccattctccacctccaagattgcagcttcttgagaaaaggttgtccatttcccgttgcttagtgtcttgcctgagcacacaggaagtagtccaggaattaataatgacttctctacatacaacctccaatctgctctgacttcaggccttggtgtgtggcttccctgaaatgtcctactgcctctctttcttatccaaatccagccaatccttcaggaccctgttctggtcttgtcctctctgggaagccctccttggctttgagctcttttacacacaacagtttatttgttttcctttaattgtttctggcttgaaaaatgtaccttaggccaggcacagtggctcatgcctgtaatcccagcactttgggaggccgaggcgggtggatcacgaggtgaggagatcgagaccatcctggccaacatggtgaaaccccgtctctactaaaaatacaaaaattagctgggtatggtggcgcatgcctgtaatcccagctactcaggaggctgaggttggagaatcgcttgaacccaggaggcaggggttgcagtgaaccgagatcgtaccactgcactccagcctggtgccagagcaagactccgtcttaaaaaagaaaaagaaaaatgtaccttaatgattaggtcctatttctgtagtgtacacttttt

SEQ ID NO: 2117 - DNA, 4001 bp, Homo sapiens
ggggggggtgagccttgcattgttttgcttaaatgtatcaaatttttacaggtaactgcagtttataaatgaagatccagcacaatgtaattctagcacatttctagttttaaaaacaacctttggccggatgcggtggctgacgcctgtaatcccagcactttgggaggccgaggcgggcagatcacctgaggtcaggagtttgagattagcctggccagcatggtgaagctccgtctctactaaaaatacaaaaaaagccgggcgcagtggctcacgcctgtaatcccagcactttgggaggccgagcgggcagatcacgaggtcataagatcaagaccatcctggctaagatgatgaaactccgtctctactaaaaatacaaaaaaaaaaaaaaattagccgtgcctggtggccggtgcctgtagtcccagctactcgggaggctgaggcaggagaatagctcgatctcgggaggcacaagttgcagtgagccgagatcgcgctactgcactccagtttgggcgacagagcaagactctgtctcaaaaaaaaaaaaaaaaaaaaaaaaaaagaaagaaaagaataaagagaaagaatcagcagatcatgaacacttgacactgatttttggggggtgttttttggtctccaactcctgacttcaggtgatccgcgtgcgtcggcctcccaaagtgcggggactacacgcgtgagccaccgtgcctggcccacgtgacactgttaaaaacggaaaaaaaagggggactgttaattttcccaagttgctcaggaaagttatagctggactgcgagaagagaagcgaaacactgttttcatttaaagttcacgtaggtaactttggaggtaaaaaagccatttcaactttcttactatcaaagttgacacataccaaattttaactgtaagtcaagtggtcagtttctcagtttgctatgtgactgaacaaaaaacttgttatcaagcaggaataaactttcattagacatacgctacgcaagagtcacaggcggccagttagcagggaatataaactagcagagccaaaccaagtccacgttgtattccagaaactaccggttggaggcgttccagggaggaagagaggatctttcgcaaaaaaaaaaaaagaagaagaagtagcaaacacacaaatccatggcattaaaaaaagagaccgctttgttatttacaacatcgtggtatgccgtgattgtgttgcgcgccgtttccagggaaggtggccaacgacgcacacgaaataccatgatcggccgccgccgcgcagcccctcgccgcggacgctaccctcgccccccgggcccggcctcggagagctcgaaggaccaccggacagcgggcgcctcgtcccggaacctgccttccctgtgatgcccacccgcgtgtggactacgcgcgctgccgtccagctgccatcccaaccagccgacccacgagcgcggcccggcccggcttcctctcaggggtcctggcgcgggccagggggaaccggggaggagggagggccggtcgccggagcagagcgcgcggggacagggtggagcccaactacctgaggatgttgtgcgcctccatgctccggttctggttgctcgagcacaccaccgccacccgcagcggggacgacggcatggcggcggccgcaaatcccgcggctctcccgcttgggttcccaccctaccgcggcgcttccgcgcgaacaaaatggcggccgcggtggccggaagcgggcgacgcgaaacgacggcgccggcggtgtagcgtgcggcgactgcgcggcggcctccccgcccaccctgggcgccgggccgcggacggagcgcaggcactggccttcgggcgcgctgcactcggcgaggccgggggcggccaacgccgcgccggcccccggcgtccgcagcagagacccgcactccacaaggcccggctgagcgtcacggcgccaagcggcggcgtcctgacatcagcaccccgcgccggcgcctagtgtgacgcgacgacgtgcggaacaacaggacgtcataaggtgtcgccgccgcctttgggagcgatgcgaaacgccgcgcttgccggagatagcattgagggcccttccgcggcccggcgtttcgtctcttgggacgattttgtgcgttccctcggtccccgtggggcccatagtcctcacttctgccaccccagagtcgtcgcgcttcactagacccgctccctccactgtcccggaggcccacagacattcccgcattctgaggctcgctcccgtcccgtgccgctgttaccggcctccggccccggctcatacaagcaggagcacatcgctcttttatgaaagcccttcaacatttaacgtttaaatgcgagggccgacctgtgacagacctggttgggagtgcacgtcgactaggatcttcctcgcctcgggcttccttggagaggccgccggctggtctgagatttgggtccagttacagtaaatccagtcaacgcgagtgtgtcattccccagctatgcctgtctgcctggatgcagcctcgcggtggacagtgggctgatgttttgccgtgggagcgccacggacgggagagggagtgataatgattgtcaacctaataacaggctaactgaaaatgatatttatttgggaatagggcgttggcgaatatgcgtgccatagtaaacgatttgcgcattcaggaaagtaatggtttttaaagaaaaaatgaagaggaagataatggtttggaaataattaaccttggctacaaagaacagtaacaagtgtactcccggccgggcgcggtggctcacgcctgtaatcccagcactttgggaggccgaggcgggcggatcacgaggtcgggagatccagaccgtcctgcctaacccggtgaaaccccgtctctactaaaaatacaaaaaattagccgggcgtggtggcgggcgcctgtagtcccagctactcgggaggctgaggcaggagaatggcgtgaacccgggaggcggagcttgtagtgagccgagatcgcgccactgccctccagcctgggcgacagagccagactccgtctaaaaaaaaaaaaaaacaagtgtactcccgttccagggttggacaggcagttgctgggcagctgtccttgctgaagtattttttgtgtaagattgccttagtgcaaggttgtggtttttgcagaatcttgtgatagtttttcttattattgattcatgagaattctccatggcctttcccagctgtctttgtcaaggtattttttaaacataagtgagtccacttttatttgacaacttgggtattttccccttttgattgagatctttctccaaatgcatcactaatgagtcatcctgtaattaggttttgatagtccccgtgctgggatgaacttgtcccagatagctggtctggtcccacactggagagagtggctgctgggagtcattgtcaaaacccttttttaccatatttgagcatcaaaggaggtttgaagggtgtggctctcaggctaagtctaacctggagtccattattaacttcaacttttgtcacttctgtagtctttctatcatctcaaagtgctgtgtcagcattattctgttagaaattgtacttgtagccgggcgcggtggctcacgtccgtaatcccagcactttgggaggccgaggcgggtggaacacgaggtcaagagatcgagaccatcctggccgacatggtgaaaccctgtctccactacaaatacaaaagttagccggatgtagtggtgcgcacttgtagtcccagctactcaggaggctgaggcaggagaatcacctaaacccaggaggcggaggttgctatgagctgagattgtgcctatgcagttcaccctggcaacagagtgagattccatctcaaaaaaataaaaaaaaagaaattgtccttttgcaaaatatggcaatgaa

SEQ ID NO: 2118 - DNA, 4001 bp, Homo sapiens
acaatttgggggcggtgtcttttcatgcacctaatttctctaggggtatactacataaaaggcactcaaacgcctactttataaaaccggtgtcacggcctgctttggccaaaaagcagactgtcaagtactaggagatcccaagtatacaattggacactgtgctggacttgaggtctttagcaaacaatttcagcgtaacattttagttttctcatatatctgcctcattatgtttagaacataatgtgctttaacaagtcttgtcacaaggcacaatgtgttatgagatctccacatttcatcctagaataactaagtcttcacagttatcttcaagctgcctcacccatgttacgtaatccatgagctttttatcttccctgtacagttggggaaagagaagggaaggaagagtacaaaatgacttggcctaagaggttcagccagtcactaaaagagccttcgttttaattatcagttcctaaccctcttctcaaagaaccgttttgtttgagaaaccttcattaacagcaggcagaacagagtgttaaattagctattagctttccttacttgtttagtgtgaatgaataacctaagcttcctaagcctgtaggttgatagttttaggataagagatctgatggatcaagttttgccgactggatccaaattcataaatctacctctaacttctaaatttcaaaatagcttgacgtgaactttaaaggcatttctttcctctccaaatttctaattctttacaaattttattcactctcctaaatgagtcaactcataccaacctttctagttcaggatcaaactgtaggatcaccagaattttcttctaccccacagtaagccaaacccccatgaaccatgaaaaggtccatgacatccatcacccacagctaactctacaccttgactctaatctgaattgttagaaagcccaggaagttcaagaagcctccacccttacacttctaaatcaccttcttttctaatcctcaacctattacagcgtccagaaaagagaaatctcaattctctcagattcaagaactttatcagcgttgctagtaatcgcagtttggcatttacaactatgggtcctgaaactgggtaataatctaaaaattcctacattatacgtgcagacagcaaattagtatattctatgtcctgggcccaagcgatatgcctaactgggcaatcagcataggctcaaaaaatgtgcagggagctcacaattcagtttactgtcgttgactataaaattctaaaccaaagtattttcatgataaaattataaaccaaagtattttcacacatgcctgcctcttggatgatgtaaattcttcccctagactttttactagaccactatcggggttctcttccactgcagcggccacccaataactcgttttaaagactgcctcttgcggctgcactagcaaatcgccaaaccccgcatgccccacggccgctgctgagactctgcagccccaaatcggccatcccctcctcccccacgtccccgcgctgctcgtcccccaacgccgggcgccaaccttgctccatcccagagagggtttggggctccccgggtcagagcgctccgcaggcgcagctccgcgaacgccagcgagagcggtcccggggccagcacctacctcccacctcctcctccaggagcggcccgggtcgacgctcgcccgcaccctgcaacggccccaacagccgcgcggagcctcccgccgaacaacggggcgctgagccaggtgccggctctcacctccgcgcgcgcccgccccttgccggcgcccacccccgcccgcccctccctggcggggcgcgtcacaatccccgacgcgaggcgctgctgctcaccgtcacggcccccgggagcggcggggagtcaccgctcggcgtcctagcccggctcccgcagcccgagggccagcagcgcctcgcagcgcctcccgcccgcggcccctcctccgctgcgggctcccgccttccccgccccttgcagccgcctcccggcctccgcaggtttccgaggttcccaccccgcccccgcgcgccggcgccgcaggccccgccgcctcccattggctccgccagttgctaggcgatgaacaaccgtggcctgcattggtcgggtgggggcctcggtagtctcctccttacctccaaaaaaacccggagaaaaagaagaccttatccctgcggtccgcgcgcgctgcgggcgcagctgcggctgcggcacctgttacgcccagtgattcacccggccgttttctgctccccgcccccttctgacgcctgcagcgtccggggccggggctctgtgggggccgggactctgcagggaccggggtcgtggctactttagagcacgttttccgagccccactgaaccccaacacccagcctagcagcaaaagtgaagcttccaggagagccacgtgcgtttgccaaagtggagaaataaactgcgggcacctagaattaggtcaggtccaaggaacgggaggttcaagcgtcgggagtcgtggatgcaaacaatccagccgggagaaagttatatgtaaaattagggcgaagaaatggatctgggcagaagaccgcgggcaaaggaaagactaagaaatagcattcgtgaactcagtttatgcaaaaatgtcttacacccactcgacaaagtatgtgcgatgaaaatgtatgcctgctgcacccgtggccagggtcaggctgtctcctccctggtttcatggcagcctaaaattcactggggaagaaaagaaaagaggccagagaaaggagatcagatggagaaatcacaggcatataggttacacaaagatgttctttgatttttgttttgtttagttttggtgaagccaagggatttattcaaaaggcgaaaaacaggtttggtgttttaaggagactcctgagagcactttgaaaccaaaacagtatgagtgaagatgctaacactgaaaaacaagagcgggaggaatgtccacctcccagtttgcatgcacgtatccccaatcctggatgaaagatcagggccagaagaagcacgccacggtgacaacttcagggcccaacgaaatcctcctcttttcctttggccaagcaatcagaggcccgtctagctgctgttgagcccaggtggcgttaccattaacagttacatttttaaaaggtttgaaccaagcttagttgagctctgggaagtttagctctgacctcagcaaccccgggaaaggaataagatctgcctgaataaaccagcggtctcaatcttttggtctcaagaccgctttccacttgtaaaattattgagagccccaagaacttttctttatgttggttacagctattaatattaaaacagaaatttaaaaattgctattttttaaaataataatgaataaaaataaaaatgtcaaatagcgcattttaattaaaaataactattttcaaaaaattagttaaaagaatggtgttactttaaaattttgcccatatctttaatgtcttgcttaatagaaggcatttggattttcatatctgtttgtgcattcgatctgttgtgctatttcaggtagcgtctggaaaactctactgtgcactcataatgagagggaaaaaggcaaataatatcttagtattataacaaaaatagttttgactttgcagactccctggaagggtcttggaaacttgccgccccaaggttcagcagatctttgaaaaccactggtctaaacctctttgtactctgtccctctttgttaaccaataactggttaaggggctaaaaatatgacctaattctgctcagtccataatggggagtgggggatgaggagcttcaggggaaggattttatcctgacagactaaggacaagttttttccttcttgccttggacatcctccagtaagccagacatgtttggagctgtggca

SEQ ID NO: 2119 - DNA, 4001 bp, Homo sapiens
gtgtcacggcctgctttggccaaaaagcagactgtcaagtactaggagatcccaagtatacaattggacactgtgctggacttgaggtctttagcaaacaatttcagcgtaacattttagttttctcatatatctgcctcattatgtttagaacataatgtgctttaacaagtcttgtcacaaggcacaatgtgttatgagatctccacatttcatcctagaataactaagtcttcacagttatcttcaagctgcctcacccatgttacgtaatccatgagctttttatcttccctgtacagttggggaaagagaagggaaggaagagtacaaaatgacttggcctaagaggttcagccagtcactaaaagagccttcgttttaattatcagttcctaaccctcttctcaaagaaccgttttgtttgagaaaccttcattaacagcaggcagaacagagtgttaaattagctattagctttccttacttgtttagtgtgaatgaataacctaagcttcctaagcctgtaggttgatagttttaggataagagatctgatggatcaagttttgccgactggatccaaattcataaatctacctctaacttctaaatttcaaaatagcttgacgtgaactttaaaggcatttctttcctctccaaatttctaattctttacaaattttattcactctcctaaatgagtcaactcataccaacctttctagttcaggatcaaactgtaggatcaccagaattttcttctaccccacagtaagccaaacccccatgaaccatgaaaaggtccatgacatccatcacccacagctaactctacaccttgactctaatctgaattgttagaaagcccaggaagttcaagaagcctccacccttacacttctaaatcaccttcttttctaatcctcaacctattacagcgtccagaaaagagaaatctcaattctctcagattcaagaactttatcagcgttgctagtaatcgcagtttggcatttacaactatgggtcctgaaactgggtaataatctaaaaattcctacattatacgtgcagacagcaaattagtatattctatgtcctgggcccaagcgatatgcctaactgggcaatcagcataggctcaaaaaatgtgcagggagctcacaattcagtttactgtcgttgactataaaattctaaaccaaagtattttcatgataaaattataaaccaaagtattttcacacatgcctgcctcttggatgatgtaaattcttcccctagactttttactagaccactatcggggttctcttccactgcagcggccacccaataactcgttttaaagactgcctcttgcggctgcactagcaaatcgccaaaccccgcatgccccacggccgctgctgagactctgcagccccaaatcggccatcccctcctcccccacgtccccgcgctgctcgtcccccaacgccgggcgccaaccttgctccatcccagagagggtttggggctccccgggtcagagcgctccgcaggcgcagctccgcgaacgccagcgagagcggtcccggggccagcacctacctcccacctcctcctccaggagcggcccgggtcgacgctcgcccgcaccctgcaacggccccaacagccgcgcggagcctcccgccgaacaacggggcgctgagccaggtgccggctctcacctccgcgcgcgcccgccccttgccggcgcccacccccgcccgcccctccctggcggggcgcgtcacaatccccgacgcgaggcgctgctgctcaccgtcacggcccccgggagcggcggggagtcaccgctcggcgtcctagcccggctcccgcagcccgagggccagcagcgcctcgcagcgcctcccgcccgcggcccctcctccgctgcgggctcccgccttccccgccccttgcagccgcctcccggcctccgcaggtttccgaggttcccaccccgcccccgcgcgccggcgccgcaggccccgccgcctcccattggctccgccagttgctaggcgatgaacaaccgtggcctgcattggtcgggtgggggcctcggtagtctcctccttacctccaaaaaaacccggagaaaaagaagaccttatccctgcggtccgcgcgcgctgcgggcgcagctgcggctgcggcacctgttacgcccagtgattcacccggccgttttctgctccccgcccccttctgacgcctgcagcgtccggggccggggctctgtgggggccgggactctgcagggaccggggtcgtggctactttagagcacgttttccgagccccactgaaccccaacacccagcctagcagcaaaagtgaagcttccaggagagccacgtgcgtttgccaaagtggagaaataaactgcgggcacctagaattaggtcaggtccaaggaacgggaggttcaagcgtcgggagtcgtggatgcaaacaatccagccgggagaaagttatatgtaaaattagggcgaagaaatggatctgggcagaagaccgcgggcaaaggaaagactaagaaatagcattcgtgaactcagtttatgcaaaaatgtcttacacccactcgacaaagtatgtgcgatgaaaatgtatgcctgctgcacccgtggccagggtcaggctgtctcctccctggtttcatggcagcctaaaattcactggggaagaaaagaaaagaggccagagaaaggagatcagatggagaaatcacaggcatataggttacacaaagatgttctttgatttttgttttgtttagttttggtgaagccaagggatttattcaaaaggcgaaaaacaggtttggtgttttaaggagactcctgagagcactttgaaaccaaaacagtatgagtgaagatgctaacactgaaaaacaagagcgggaggaatgtccacctcccagtttgcatgcacgtatccccaatcctggatgaaagatcagggccagaagaagcacgccacggtgacaacttcagggcccaacgaaatcctcctcttttcctttggccaagcaatcagaggcccgtctagctgctgttgagcccaggtggcgttaccattaacagttacatttttaaaaggtttgaaccaagcttagttgagctctgggaagtttagctctgacctcagcaaccccgggaaaggaataagatctgcctgaataaaccagcggtctcaatcttttggtctcaagaccgctttccacttgtaaaattattgagagccccaagaacttttctttatgttggttacagctattaatattaaaacagaaatttaaaaattgctattttttaaaataataatgaataaaaataaaaatgtcaaatagcgcattttaattaaaaataactattttcaaaaaattagttaaaagaatggtgttactttaaaattttgcccatatctttaatgtcttgcttaatagaaggcatttggattttcatatctgtttgtgcattcgatctgttgtgctatttcaggtagcgtctggaaaactctactgtgcactcataatgagagggaaaaaggcaaataatatcttagtattataacaaaaatagttttgactttgcagactccctggaagggtcttggaaacttgccgccccaaggttcagcagatctttgaaaaccactggtctaaacctctttgtactctgtccctctttgttaaccaataactggttaaggggctaaaaatatgacctaattctgctcagtccataatggggagtgggggatgaggagcttcaggggaaggattttatcctgacagactaaggacaagttttttccttcttgccttggacatcctccagtaagccagacatgtttggagctgtggcagcatattctgcaaccacgagagaaaagcaagaaaaatacatgcgtacctcgttttatacttcaatttattgcactttacaggcactgta

SEQ ID NO: 2120 - DNA, 4001 bp, Homo sapiens
cacctgcctgtggtcccagctacttgggaagctgaggtgggaggatcgcctgagtccagaaagtcaaggctgcagagagccacattcactgcactccagcatgggtgacagagggagaccctgtctcaaaaaaaaaagaaaaaagaaaaagtgacaatgacaagtaaagtgttactgtattcctgatagttagctacagcttcctttgaagtaaattctattacttgtttactctttgcaccacacaggacaaaggtacctcttggattaatgccatcaacctaccttttgtgcaacctcatatcctgctttttctgctaagaaaccccctggaaccacccatgagcatctcaggttcccctgcacctttgtcatcctcactttctcatctgctcacttcttccccttcatacagccggctacccactcttcatgacccaattcaagcctcagcttccctgtgaaaccttcctcaaacacatggatttctccttttctcggtttctcagagtacctaccatcttggaattctagagaccatatcacagttatcattgtcatgtgtgtgctttattccctcaagtatattataggcccattagagcaagtttcttatcttaaatggttttgagtttcccctcagtcaatgccttgcataaaatatgtactcaagaggcgttccattgattgatacaaagtctgttagtctctgagaacatgaatgtcttgtttcatcgttaacattttatttttattaaaccatggttagacagttagacacgcgaaatggagagattcaccacttaatatctcaaaatatccttaagaatctctaatcataggaggagctgtattgccttaagagattatttgaaagtatcatttggctataaatttctgtgccagcttccttttaatcctctgttgacttgaaagtacaccaaacatttcagtgatcatctctacaagataattctgccttagaaacaacctaatttgtcatggggactatcttacttttagtaacctaataagagttttttcctaccttaatgtccagctatctataattcacagtacatccactgaaaagtttgagtattttactttctgaggtaatagccgccttcactggtccttccctcaattaattacattcagttatcaggtttcactccttcctcatacgtgaaggaaacataaatgaggcttactgaggaatcataaaaatggacattgttgtaaaaaggaatccaaaatgttcatgggacactctcctaaccaaacctgccctcctcactaagatattttctcttgcaagcaaaagcaccgaggacacaacgggggaaagtgccagaaggaaaggaagcaagagaggcgtactttgccgatcaaactgaccccagttctggcccccgctagagcagtaagcaatgacaaccgctacccaaacgctgccgattcccgctcaggcgctccctggacttttctttccttttcccacagcagggcccgaatgacggtgtccgtgctctgcgccaaggtgcgcagcgctgcggggtttcacacggagatgatctcagacctcctggcctgcgtccggccggcctttcccccaggctcggcggcccccacccaggagaggtcatccaggtactgggcccccagcccgaaggacgactgggccgtgccccgaccccgccttcccgggcactagcgcgcgggctccgcgccccgcccagcccgggacccgcggccggcgggggaggggcggggcggagcggcgaccgttattcgcggtcagccatcgcgccccgaagcgcactgggcaggcccttaccacagcggagagggaggcaggggggaggtggcgcccggcccgacgcggggcaggaaggcggaggcagcggcgtaggcggcggcgacagccgcgggggaccccggcgggagcccacaacgcgctgggctgcatgggcgccgccatagtggggacgcagcggcgggcggagcgcgcggccgcgacccggtcgggcgcctgcgaccaatgggctcgcggaagccgggcggagcgagggcctggccaatgcggagctgcgctgccccgagcagcccaatagacgcaggagccgcggatttgccgtcccgcccaccccgcctaccacgagagcagtgctgcggcgagtgcggggcgagaggttcgcgctggtggagcaccccagcttgcaggttcagcgtgggtgtctctcccgggcacatcgagctgtctagaggaaccctcttcccctggcttcacggcccagaggacgcacggctctctcccctcgagagcgtgtttcgtcgcccgcgcggggaacgcaaagtgctagggtagtcacggccacttcacgccgagggacatctcatctcgccctccaggtcgtgagcgcacccattccgctcactgaggccgaaagcttcggacctccgtgggccctggtgggtaagggggcacgggggtgagcgttaagagactcgtagaacatttttagtccgcgcgtggcacaaggcctccaagccccacgtacactttgcagccctcccactcctttttcattcctgcggctgagccctggtgttatccgcctggggcggaatttaaaacttaattcctcaacaaagtcggggtggtctttaaactgcaaccttggatccaaaggccctaccttacaaagggaaggcagtttgccctacaaaaaggcttctgggaggagctgcctaaggcaggaagggactggcaggccgggaggtgccgcttttggctggggccagttctcttgaggtcgacccgactgcataggcagccagtaggggagagaacgggccggtctgtgtgatttggatcacctgagttgcagtttcctaagagttattaggttgaccaaaaaaaaaaagtgcagtttctggaaaactggtcagctgttgagtaaaaactgctgggattaaacccagcgcccacccctggaggcagtggggtcatcgagaaaggtagggatcctgtgtaaaaaggctggtgaagtgttcctctcttccaaagatgtatggattagtgttctctcaccaatccactaaggcctggttctgcccagcctcccttgctacatcccctgggaatccccaagtggagtgtgggcaaagaaaaaaaaaggccaacttccctccctgggccccaggagggagctgacatagaaaagatcacctcctgcacctccctttctccacaatgagataccaagtagcaaccacctctcaacccccagggacacaaggaagcatccagagcagctgaactgacctaagcctctcctgcacctggacagggccatgccacaggaagtgcctggctgtttaagggccagccggtgcagctccggggcacccaagtcctgcacctattcattgcccccctccctgctctgtggttccccatccttgtccactttgacctcagggatctaccagccaaaggagattgggtcttcctccagggaagcttctcaccaactagacagctcggagagcaatctgaggatcccactggaggttgagtcccttgcttttcaagcacctaaaatgcacccatccttcccactggttccacaatttgtatagagcacagatgctggcatgaacttaggccagttcaacaaagatgtatcaaatggggcagcagtgagagatactctgttgagaggactcattggtctggtgcttcctctgttacctcatcttgcccgtctctaaggcagagcaagcacaacaaagaggtgctcagagccagaagtgtccctgctcccatgacccaccatacttggcctaatacagagcttgacaagcaaaggacccactctctggaacttcctagggaatgccttactgatttgtcttaaaatacacagccccgctccagagcctatgactctagatacaccccccagcctgacgtgggccacgtgggctccttg
